United States Patent Application Publication US 2009/0018031 A1 - sequence listing, part 20

SEQ ID NO: 10463 - DNA, 6000 bp, Homo sapiens
atcattggtagaatgtagttccttgagtctgtaagactgaaatctctgtttccttggtggctgtcagctgagggttctttccagcttcagaagccactcacatgccctagtttaagaaccccttcctcaatcatcaaagtcagcaactcttctgctttcctcttccactttcaaggactcgtgattacattgggcctacttgaataatccaggataatcccctcctctcaaggttcttaaccttaattacacctgcaaagtctcttttgccatgtaaggtaacatatttacagattctagggattatagcatggacatctttgggggaggggaggattatttggcctaccacacaatgcctgcacctcctctgttattgcctgaaaatgtagccagtggcagaatagggagccagataggctggtgctggggcgtcgagggtatcagcagacacagcagcaaatctggagactagacccactgtaagagatgatggatttcagttctaatccatcagtgaacccagaatccagtgaaccttttgaggcaagaaacgtaaatatctaacttggcattttcctagcattccccagctataagctaggcagtttagaaaacaaggaattcagactctagaccctgctcaataggttcaccaattaaaagtgtcagtctgaggagaagcagcatgatgatgatgggaggcacactctgaggggaaaagaaacagggttagggaggagtgagccactgtcccagattaatagaacgttagaactgtccaaaggatctgagatatcctttagccatgttctaggccttttaggaagttttctggagcaggccttacgctttatacctggtttactgctttatccacaacatcactgttttagttgctcaagaaatacttgaatgatgtactagagtagaaactctggttagaaaggtgagttgatatgttcaagatcaaacggttggtttgcaggagagagggcatagactggttttgagtctttgttctaccaaatttaggaggtaccttccgtaaaatgaactcctgcaccaaatgaggcttcttgtataatttctctctaccttgcacatagcatttcttccttctatatgaaattattcatatagaataattctattcatttaataacctatttatttaatgtctaaaacattagtcaagagacctgagttctgttccctgtttccccattcacttccttggtgtctgagacaaattacttaacctgtccaaactccagtttcttcaatcatgagagaggctgaggttccttctcagctcgcacattctataattctaaatttcatggaggctaatgaattaataagctccctgctatggtttgggtatggctttggacctgcaaagtgtcatgttgaaatatgagtcccagtgctggagttggggcctggtgggaggtgtttgggccatatggatgaattcctcacaaatggcttggtgctattctcctgagagtgagttctcatccttgagaacaggttgttcaaaagaaccgagagtcagcttctccctttctctcccctgatgccccatcttgcactgtagccatgtgatctctgcacgaagtctcccctttgccttctgcatgagtggaagcagcataaggccctcatctgaagctgacagcctgcagaaccatgagtcaaataatcctcttttcttcatacattatccagcctcccgtattcctttatagcaacacaaacagattaagaccctcacccatggaccatatgtctgcatgtcctcatatcagtgttcccaaaagtgtgatcagccaccaccaaagtcatctcaggttggccaagcatggtggctcatgcctgtaatcccagcactttgggaggcagaggtggcctggatcatttgaggtcaggagttcgagaccagcctggcaaacaaagtgaaaccctatctctactaaaaatacaaaaattagccgggtgtggtggtgcatgcctgtaatcccagctactcgggaggctgaggcaggagaattgcttaaacaagggaggtggaggttgtagtgagccacgattgtgccactgcactccagcctgggtgacagagtaagactcggtctcaaaaaaaaaaaaaaaaaaaatcacctgagatcctttacatatgctgatttttgcagttgttaagaataatgaatcagatatatggtttccattaggccatgcttcccttttcactctataggcatgctacacataaaaagtgataatatttatgtggcatactaggggaagaaaccttaagactgtctctctgacaatgcacatcttgctgagaaattctgccatacgtattgagaaaaacagctgcagaaaaatatacatatgatctaactttttcaagacaatgccaaagctcagtattagagtgtatgcatatctgcatgaatatgtattgtttttatacaattacatgttattttatgtaagtgcagatatacactattacaagaatatttaaagaaatgtactaggttgttaatgtaggggaagagaagagggaatacacggaataaaaatttttgtaagtgaaaaattcaatatgtatgtcatgactccatttatacatttatgtaaaataatgtatagagatgtaaaaaataaaaaatgcagatccagagcccctacctcagatcctttcaagcgtaatcttagcaataggaggtatggtaaggtgggtgtctgcatcttcaacaggtattccaaatgattctataacagtaaagtctgtaaacctttgcattaggtgcaaatatcattagctgtaaacagaacatagttggaaatttccatcctgcaatgcgggctcagctgaccctcattgtcttggaacatagtagatgcataataaatagtgcagattattttgagtcatttggaggacaggtggagggagtgagggcaaaagtggtgagagaagcagatgagctgggcaaggacatgcttgctcaggagaagggaggcaaagcgtataagaacatactgagcctccttgccactttcgacgttcaaccaatatttgttaggcactaaatatacatgcaggacacttttctgtatgttgtttcatttaattcttaaataatcctttacagactcagagaggtgaagagagtagcacaggtagtatcagaattgggattcaaacctgacacatacactgagcactaagttaaaaccgggcactgggcagctgctgaggatgcgatggtgagtacaacagactgcttgctctttttgatatctagaatcgtacagctctgctgtgctcatccttgtctgttgtcatttactagttgacatcttcgttgactacctagaagcagctgcttcgacatctatcccaacctgaatcccgtcaaagggagattacaacaaatgtgctttttgtctatcatctctagctagtgtttcacagtggggggagtatcatttcctgggtgactttgcatagagcaagctccccaaaggccaaggaatactcaatctagattcttccaatcctccggtacccaccaagtcaaaagaattctggctccctgtagcttcatctaagtgcttttctgttagaggagaaaagtgaggaaagcgatgctctttcaataagttcggcagggtggggcaaggaatggtacaaattgattttttttttttcttgagacagagtctcgctctgtctcccaggctggagtgcagtggcccggtctcggctcactgcgacctccacctcccggattcaagcgattctcctgccttagcctccagagtagctgggactacaggcgtacgccaccactcccggctaatttctgtatttttagtagagacgggggtttcaccatattggccaggctggtttcgaactcatgaccttgtgattcgcccgcctcggcctcccaaagtgttgggattacaggcgtaagccaccgcgcccggccggtacaaattaatttaacacatcttttgataatctcatccttggtgttggaaaagacgggaaaatccaaaagtgtctattttgtgcccaaatgctcaagttaatactcgagggccttgatctctggcctcttgccatccctctccccattatttctgaagaagtagccattttgcagattccggaggatgggagccacggccggcccctggtactgaatctcatctccttctcaaggctccttggatcaagttgggaccggcagcgccaaggctgctctccgtgatttagcagcaacctagagtcagagagaccggaagatgggaggccgggattctcaggtggggtcaggggtatgcaaaaatccttagcagcggccgcgcccccgccccggggaggtaatttgcggagggcggtgcagtagcctctccagtgcccgcgtcccacggtctaacggcactgctcccggggtgcgcggcccacgactcaggctgcctcccccaacctgacaagtgtgcgtccttaccacaaaatgccaccacttccctaagtgacgctgggccccgaggacctgatttgaaatcggtgttcagaagaccgagcccggctggacgcagctggcctccggctgagagcggaggggaagggttccatactctccgaggatcccgcgggctcgtggcgtgtggaacgcttttcatcgctttcagttcccgtttccttcgccccgactgcctactcggtcgcagctaaagcccggagcgtgggatccgggcccggaggaacgggatggcgaacgcgagctgcgccgcggccaggagcccgccgcaccgggcatgctcagtggcgcggccggctgggtggcccgcgagctgcacccggatctgctcggcggcggcgacgtgagcgcgcaggggggcggcggcctcgcctcgtctctctctctgcgcctgggtcgggtgggtgacgccgagagccagagagatgtcggatttcgacagtaacccgtttgccgacccggatctcaacaatcccttcaaggtgagcttcggccccagcatctcctgccgccgcgacgcgtcgttgtttgtgaaaacggacgagttccttcgcgcccactgcgtctgcccctcggctccccttagcagcccagagaggggcgcggggccgccgtcctccatttggggtcgcgccccggccccgtgtcactcctttgggttttggggcttgggggtggaacctcctcagctcgtgcccggtcgcccttccacacgtccccgactggtgagggtcgtgtctgcagccgggactgggcccgcgcgcccggaggggtcctggcccgcctctcaggagagaaagccgagggcaggtagagtcgccccttgccaagcaagtgtggctggcagggccgggagtcggcggaggggggcccgccctggggtggggttgtcatggggacccgaggtggcggcggcggagagctgcgtggggtgatggcagaggtgtggaggaggagagaggtgagggcaccgagtatgctgcaattaaaaaaaaaaaggttatgtttttattttttaaacttgtgttgcacccaaataccaccagtggcgctgccatcccccctctttctgttaggttgaggttgaggttattgataccaaagcaaaacttaaaaataaacatatctggaaaacaatagtgcacgtggacgacctcttccctacccagctgcttctagcaaggtaaacgatgggatattttccaagctcctagtgcgtcaccggttctctgggctatgtgaggataccatttcctacttgagctgcttttcttcttggagtcgaccttatcaaccccggcttcggaagggcttggcacagaatcctgcaaaggaaggcggctgagatattcatcgtctgcgtttaaatgaatgcaacatctaaataactctctctttgaaagtattctgaatttcctaatgagtg

SEQ ID NO: 10464 - DNA, 6000 bp, Homo sapiens
aacaaaaaaaaaatgaataagtgtttgttgaattaaacaccagttattcctcttttttactgttgatatagaaagctcataagatttattatgtttatcaacaaatcattgctatgtcattaatttattgtttgtcatatatttctaaagaactcagaaaaaatattggttatttgagctttttgactttataactttaagtaaatacagttgctgtattaaatacaaggatctacagcgattatctgagcaccacaactaaaactttccttagagaattgaaaagcctctctcacaagaaccaatactaaattatagcactttgtacaaaaggagaatgggctgttgagagtgtgttcttcagtttgctgttttgataaaggccttgaccagtaagtgttgctgtacttaacaaagtagttataacagcctgtacttaacaaagtagttataacagcagggagaaatcctgaacttcaggttttgtttatggatgagcaacaatgttcatactgcgagaacacctggtttacttataagataaaggctgaaaacagtaggtgatcaataaatgacagctatttataaagtggttcttagtaataagtgatgatacgtgtgtctggtgcaactgaacaataggaatggagcatttttctgtgccagagtacaactgaccagctgtctgctccataaaactggtcattgtagattttttatctctaatctagttaactttgggtactacttggtacaaagtttaattttcattggtatagggccttatgtagaagttcaaaacccagttctgaatttctgaactcacatttgtgccgctgtggtcatcagaaaaaaaaaaaaaaaaggaactgtttactaggaattggaagaaatatactagctttaaaccactcactggctaaatcagggtttctcaaccttggcactgttgatattttaggctgaaaacttctttgttgttgggggttctcctgtgaattgcaagacagttagcggcatccctggcctgtatctattagatatcagtagcattctttcagtggtgacaaccaaaaatgcctccagagattgtcaaacgtcctctgggaggcaaaatcacccctcacctccacagagaactattgggctaaagtagtagtcattgatttgaactttggtttgttggttgatttcatctatttttactactttatagatcagaagttttgtggaacccaaattaaatactctttcaaagcataattaggaaaggttattataattctaaacatctactaaaagtattgcaattgctttgttagcagattaaatttttagtagacatttggcattaaaaggtaatcaaaggctacaaattttatatgaacaaacttattaattctccttaaaaaacaaaaacagaaacaaaaacagagcaaacgagtcttcatatagtgacaaacatgtggagtggtcatcaagtccctgtatcttattctcagtttagtagactaagaaattcagttttaaaatgtatttgcaagtaattgtgctccagggaacttatacttgcattagccaaattcataggctactgatataacaacatggatgtaactgatcaatttataaaaagaaatataaccatcaagaatagcaattgttaggctggcacagtggctaatgtctgtaatcccagcactttgggaggttgactacctgattacctgaatttgaattctaattgggaggattgcttgggcccagaagtttgagaccagtataggcaacatagtgaaaccttgtctttaaaaaaataaaaataaaaattatctgggcatggtgatgcacgcctgtggtcccagctactctggaggctgaggtaggaggatcacttgggccccaggagttggggctgcagtgagccatgatccaaccactgcatttcagcctgagtgatatagtaagatcctgtcaaaaaaagaaaaaaaaaagaataacagttattcatcatttacagtcagtgcttcagttaagtactttatgtggattatctcaatcaatgtattagttctattagcatttgactacaggagcatcaagcttagaaaatttaggccacacaactaataggttatagaattagaattcaaattcaggtaatcagactctaaagaccatacttgaaatgacaggggaaatggattcttaggtttcctggtcaacttatcacacttgttacattagaggtttttttctttttccccagaatataaaggtaatatatagatgttgtagaaaatgtagactgtccaggataataacatctacattctaatcagatagacatgactactatcaacattttgatatactttcttcactcttttacatacattgtatactatagctgacctcatactacataggcaatgttaaatatttttaaatatttaaaatgttttttcatgaggtaatttcctcaggccattaaaaattctttgtaaacataattttaatagttttaatcacatacatgcagtaattattttaaccattctcttaatggtggattttcgacttttatcaatttacttactatggttaagtatctttccatagagatcttcgtcttctggactaccttcttataacttccaaaagagaaatgatcaaattgggtcatgtgaacactcataaggttcttgatatgatttgacaaataactttccaaaatctttgtcccaatttatatccctcccagggtataagtgtccacttcactcttctgtcaccaatcgagtttattcacattttaaacagattgggtaattagatgccagacaacctcttttttgtctctgtttattattaatgactttgaatattgattggtaaaatgtgtagtaggcatttaaatttcatattttgtgaactgaccattgtatatactttccccattgatctattgaaggtgtttgtgtcttttttctattctctttaccctcacactttaccgtataaatacttctgtccccagtatgcatttgtatatgtgagtctctgctactagactgtggttccccatgggcagtggccccattttattttatctgtgaacaatgcctaacacatagtaggaaaaaggcatactgtagtttgtagaattattcttaggattaaatgagataacgtaagcaaagcatctaacacactgtcacaaagcagatgctcaatacacacattactttaggcaatcaaaagtttggctatttcattttgttgtttaggaaaaccaaggttaaagattaagtatctttcaaagatcaggaactatagttgtaaactgcagatttaagatgcgaaccctgattctcaaatctttcatcacaaatcacatgtggctggaatactcgaaaaattataattcttgcaattttttttttttcttttttgagacggagccttgctctgtcacccaggctggagtgtggtggctcgatcttggctcactgtgacctctgcctcctgggttcattcaatggtcctgattgtcctgcctcagcctcccaagtagctgggattacaggcgcccgccaccacacccagctaatttttgtatttttagtagagacggagtttcaccatgttggccagattggtctcgaactcctgacttcaggtgatccgcctgcctcggcctcccaaagtgctggggttacaggcgtgagccactgcgcccggccaattcttgcgatttttgaaagatcagtatgaactgtgagctgtttaacctttgaggaactgctttttccctgtatctgtctgtatctgatcccacatgtatgtctcttcccttgtttttattttttatttttttagagacacggtctggttctgttgctcaggctggaatgcagtgttgccatcagagctcactgcagccttgacctcctgggcttaagtgatcctcccacttcagactcccagccagtagctgggactacaggcacgcgccaacacgcctggctaattttttcattttcatttttagtagagacagggtcttgctatgttgcccaggcctgtctggaactcttgacttcaagcgatcctcccgcctcggcctcccaaagtgctgggatgacaggcgtgagccaccgcgccgggtctcatttaaatttataggaaacttgtggtaaaaatagcaaaactcaacaagcaaatatacatcaagtgagtgacattttatttctacatcagataagtcagcttttgcttttagacagggagacagctgttctaccagctgctttaaaataaaaatgcagaactaacgcagcgaagggaaggaaagtgtggctgggaatgtccagtcagctggaggggcttggagctcggcgttggctgggagcatttttattgctgccgggaggaggaaggggaagcgggggaagcgggggaggcgggggggcagcgtgttgtaaaatcagtttgaagtaaacaaaaagttatgttttccgaggggccagcagcgcggagagcaggcctagcccgctgccgggaaggcgggtctgtccagtagagaccggaacgccgcgcaggctcagcaaagggctaaggctggagccggggaagctgcctctaggttagcgaagggtaaaggaagtcagacactgacgcgagtggcctcccgatcccgcagtcgagtggagaaccgagtcccgacctaaggtcgaatcatcaggcgtccccgtcacccaacaacccactcaggcacttccggtaagaaatctagtgcccttggctcggaacctgcgtcgtagtgcgcaagcgccccgggcctggagacggccgcggatgccgagggagggggcgtgtgagccgaagaggaaagcgtcctctgcgcctgcgctctctgcgctgcccggtggggcggggaaagaagccctgagccgggatctggcactcccaggactcccggccggggtagctcttcactcctcagcgcgacgtcgtgtcgagttcccaaaaagctccgcaggggctgtagggaggtaagagccccccgtgaccggtcgtctcggcctcccctcagccctgctgttcccacaggggggcggggtgaccgctggacccgccgacctgggcgctgggtctggccctcttcctctggggacagagcctgggccccgaccgattccttttccgagcccccggagctggccggggaaccctggccctccaatctgatgtcccctcctggagcctgaagggccagaccggactggaccgggagggcaatcacggcggctgtttgcccggttccccgctcccgggccgccggagtgttcggcgctcctgggggagagaccccagcggacggagggagaagcgccctggcgccgccgtcccgcctggggaggggctgcgactgcggaggggactgtggttcttcaggagtggcagaggctcggtccccgcagaggagtctcatcgccgccggtgctctcgcactgtccattcccgcacccatgcattttctcttggttagagaccagaaggatgcagtggccgtctttcccgctgcctttcctttggtacttttgagaactccaaaagaggaccttatttttaactcttatttgtattatcgtgattgcaaatattatgttccagactaaggatgttctttcttattagtttgacttgtatgaaaaccagtccatacatttgatattaagttaatcttttcaattcaaaaaataggcactttgttgattcaatcagattcctccatttattcacttgagcttgtcgtctcttgagttggcgggagtttaatggtttaatccagtagaactatatataatttttcgcctaatttcttcctttttttcctctcctggatattaaaccgcatgcttagtggcaaaaattgaaaaaatagaataaagaataaggaaaaatgatcaatcataattccaccatgtaatagta

SEQ ID NO: 10465 - DNA, 6000 bp, Homo sapiens
tatgtattttgcaccagggaccactttgttgaagaaacactgaaccactttctattattatgaagattaaatgagatcttatatgtaaaggctatggtaagaactgggtgttagtttttattaatgaattttaaaagtttaagtagaattaagaacacactgaaccactgaaaaaatatgtgttttgcaccagggaccactttgttgaagaaacactgaaccactttgtattgaatacattatttatccatctattcatgaaacaaaaatttattgagtacttactatatgagaggataaaatgacaaaacactgtccttttttttaaaaaaaaaaagcatatggtaaggagatagatacatacataactaattacaatgcatgatattactaacataagagtattataaattaaattctaggtgaccttgaaggaaagataaattgatttcttttaagggttttaggaaggcttcttagagaaagtgacatggatgtagaattttgaagtcaacaataggaaaaagaggaaggaagcgagggcattttataaagaagaaacaatataaagagttaaacatatattatagttttttgatcagtaagtaaggatttttgcaaaactttctctttcagtgagtcatcaataaatcattcagaagactcacagaatatttcacaaccctaatttcttcagaagaatctcattttctccttttcctgaagccaggctccccctcaaccctttccccaacaaacataaaatttcaaatagatgttaacacagagccctgattctaatgctacagtagcgagaagttataaaaacttaaaaagaaacttgttaacttgagttttgcaacataggatggaaacatgtaatttattcactaaacaatttattttttaaaaaaaacttcaacctagtccttaaaaatctaacatagcagctgttgagaaaaatgacaaatattgtactttaatttttggatatactgttctatacaatattgagaaaatgacaaatattgtactttagtttttggatatactgttttatataacggaatttcagtctctaaagcctcaagtggatctagaaagtacattgctcattctttgatatacaccctactcactacttaaaataattggattttatttttaagatataatgctgaagtaaacctcatgtctctaaagacactttctattttgtacccatcaattcatgaaatgtctcatttctctttaaatgcactttatagtgaaagagtatcatactgaatccaaagttgctctagaattattcacatttttcttgccagctattatgacatgaatataaattgttaggctacttgtataagaaaaaataaaacatatctgttccaggtttatactcccgtataacaaactaccccaaaacttagtgactcaaggaaacaatttactattttctcttacaattctgggggctaatgggctcagttgggcagttcttgtttaacaagcttcataaagttgcaggcaaatatagctgtggctaaagtcacctgaaggcacctttacaaatatatctgatgcctgggctgggatggcaagaatagctgggtgctggtaagtctgtccctttccctgtctccctctccctacttaccctctccttctccttgtccttcttccctcttcttccctctccccttctgcacatagcctacccccaacccctgcccctggtaatgtggcttctccatatagttagtttggttttcctcttagtcctgaaagtctctggatagttagacttctcacatggtatttgacttctcccaagaaaacattccaagttgctaaagagaagctgcaaggcttttgatgagctagcctcagaagtctcagaatgtcactctgttgcattctattggtcaatccggtcactaaggtcaagaaaagggatgttagaccccaccactcaatagaaagaatttccaaaaaattgtggccatctttaatttcctacgatgcctacacaaaaatggaatattgctagatttatttaaactttttcttccttctttagtgaatttgaaagagaccaaaattagcataaaactcctaaactcagactacattcattagttaactaatttattaattgctttctacttagtaattaagaaaaaaccatatagcaactagtataaaattttattttgtgctcagtgtggcttattgacaaaaatattctttagaaaatattttgaaataattctcaagagtgtgctctataggtggtatctagccactaatacaaaagtcagtaatctgccaagaatgagtgatctcagccactttgaatcccacttcaatttacctcctaacttatcagtagcatcaaaaagctgcaaagtgcatttctgagtgtctagcattctctagaatatgccagctgctacaccaccttcaaatggaaccactctacctcccatactttcaatgttttggcatgtttggcacatccatcttcattatagctgaagaactatcacagaaacatgactccagagaaagatatatttgaagcaaagataatattttacatgatacagccaaattctcatctacagattggtaatgagaaactgttttcctcatggcatctagaagaaaggctaatttccttaaatagaacagctgtgttacttctagttctctctttgttgctccataaaaaactaccccaaacttaatgacttgaaaaaacaaccattttattataccacacaaatctctagaacaacattttgggtaggagtcaactagacaactctgctccacacagcagtgactgtggtcactcagcaatattcagctgagggcggggctgggctgaagtgtccaagatagcttcactcacatgcccggcacttgagtgtaaccaccaccctcccccatatttacataggtataaactttttttttttttttttttgagatggagtctcgctctgtcgcccaggctggagtgcagtggtgtgatctcggctcactgcacgctctgcctcccgggttcacaccattctcctgcccccgcctcccaagtagctgggactacaggcgcccgacaccacgcccggctaattttttgtatttttagtagagacggggtttcaccgtgttagccaggatggtctcaatctcctgacctcgtgatccgcctgccttggcctcccaaagtgctgggattacaggcgtgagccaccgcgcccggccaaacatattttttttttttgtatttaacttaccacaaagcccatgagaaggcagacagttctgaaaccatattctggaatctctgccctgcaggtccctaaagagttaactcaaagccagatacccaatggaggctcaattaatgtgaattagaagcaacaatgaaccaaatccacagataacattactcacactagattgaaaagtgtaatctagaaatattaagtgtgaaaaagtttctcaattatagttaaatcagaattctttaatatgtaaaggcagtgaacggaatgttaaaaaaaaatggaatgtcacataacttctataaattaggtggtagaggacaccagttatgatgcatttcatgaacccctactcaaaaagaagctacttgttgaaacaaaatatgaatttaagtgttttttttaagtgtttttttgggggggaggggcatggttgttctcttccaaaaactgaaaaaaaaaaaaaaaaaaaagacgaaaagagcatatatgttatgcccttttcaaagcaaaccttaggtcttattggaattgtttcctaatgctatataaatgagacacgtgaggcaatatacactcccccacagatgaataacataacatttaggttaccagggcctttcacaatctaacctaacaccactttcccaggttcatttatcactggtttcttctcaataccttctggtcaaagaccaccagaagcacacatgtaattgacaaacggggtttattattcattgcagtaagggttctctgtaaaatattagaaaatgcttattggatttgggatttttttctcctaatattggctaccttaccaaatcttaggaggaagaaaggctagatcaaggctaagattgtaattggtaaagaagcagaagtcatcaaattaaaccagatagggtgatgtccggtcattttcgtggcttggacaatgttttatctgtgttcagatgtgattacacagtgatcatattcttttcttaatgaacactgtcagagtggtcttgttggatgctaatgcttgctgaaattgtgtacgttcatcaggcggacaccagttcctagtccaggctagctccaggtgtcagaggccacttttcccttctactcctcacacatgctgtactcataccagacttgagttttccctgccctttgttcttccttcttttttattcgattcccattatctttagtgatcattcccttagcatttcagttttctctctgaagtcctttgtgctgcacgttgtttgattacttgtgtttatgctttgtttcttcagctaggatcattagcacatatctctcagcattggcaaaagtcctcgaaatcattgacacctagcatatactttatttttaaaaaagaaagaaagaagagaaaagggatgggtttattgtccttttcaacagactagagtatacggggtgaaactgcttcacttgattcaataaaatcgtttccggtaacaggccccaggaatcctagacctaagcctggcgcgaaactacatttcccacaatccttcgggggctgataaggctccgcaatggtctgaactacaattcccacaatccagggcgatttccgctttgtcgcgtttcctcaaggctccgccccatttcccatctttcttttcagtccttgcgcaccggggaacaaggtcgtgaaaaaaaaggtcttggtgaggtgccgccatttcatctgtcctcattctctgcgcctttcgcagagcttccagcagcggtatgttgggccagagcatccggaggttcacaacctctgtggtccgtaggagccactatgaggagggccctgggaaggttagtgtgtaaggggcacggcttcgttgggggagggggcgcttggctgtgactcgcgcacctgcaaggccgcctccgggctgtggcgtgggagatgatagccagaaaccaggctgagacgcagactagcattccacttagcccaaggaccagtgaggaagctgggcatcctagcgcgtagccgctaaaggaatgggcaggtagatccggaagccctgcctccatcagccacctgacgccccctcccccgccccgcagaaagccctgagatggctccgggaggccacggctgtaggtgtgttggttaaatccgagctggaggtcatcggacccgaaatgaaggtcattggaaaatcatgaggaaatcagggcctctggttatggaacaggctttttaaactagctgcctaagttagaagtactaacccttcacctcagttaaggctgggtttggcctcaggtgtaaataacttaaaccacatagcagtaacaatctcggagggtcacacgaggcctagtcataaaggccagagaaggtgcttggtaatgaaaaacaaacaaacaaaaaaaactgtgggccaggtgcggtggcgcacgcctgtaatcgggaggctaaggcgttcggatcacctgaggtcaggagttccagaccagcctggccaacatggcgaaaccctgtctctactaaaaagtacaaaaaaattagccggacgtggtggtgtgtgcctctaatcccagctactcgggaggctgaggcaggagaatcgcttgaacccgggaggtggaggttgcagtgagccgagatcgggccactgcactccagcctggacagagcgggactccgtctcaaaaaaaaaaaaaaagaaaa

SEQ ID NO: 10466 - DNA, 6000 bp, Homo sapiens
gtgtgtgtgtgtgtataaaaggaaagcatggtgaaggagccccttccagcccttattccatgaatacaaagaaggaaagatgctggagccattttttcctggccagcctgacagaaaaggaaccactaagctgaaggtacatggaggataggggtcaggtctgttttttcactgttgtataatcagtgcccaattacactggttaacagccgggaaacatttgttgaagaatgaaggaatgaagagagggagagaagagggagggagagcttctatatgccagccaatgatggaaagatgaagagagaaagttcttcatgagaagagcttttctaatactaagtggaccaaaaataaaccttttatcccgctacttctttataaatattgactttactaatttaatgtgtattcatgtgcctttttcttgtacacatacgtaggaatactttagaactgcaggatttctcttgaaaatcaggcttgcattactgatagaatataatagtgttcatcttctacaggatagcccttttttttcttttacttttctttgttcattgggcttgtggttagacattttatcttttaaatttgcaatttaccagaattcctttccttaactatcacatgagccaatcgttcaagacaactgtcctgtatctttgtttgagggtggggaggaagcaaagcaaatcctcacccttttaaaagtacaagtaggtcttagatcttctgttttcactctatttaaacactgatcctataaaacaaaacagaattttatgaacttcaatgtttaattaaacaaacatttattaaatcacatctagaaagcaacattttcttctaatattattttataagtattctttttttttttgagatagagtctcattgtattgaccaggctggcctcaaactcctggtctcaagggatcctcctgcctcagcctccaaagtagttggaactgcaggctcatgcagccaaatgtagcccatttgatattctgttccttgccaataacactattagtgctactaatatttaaaatagtgtaatttattaacaataataattctcaaacattatgagtaaacaaaggaattattaagttaggcgtcaatctgaaaataatttagagaataatttttttaaaaacatgcaagaaaagtaaaaaaagaaaaactagaaaatggattcatatgcttcttgataattaagataacttccacaattgcaaatgaaaaaatacttaggaacatcaggagtaagcaagctatgatcttgacaactgaaggtttagatgtacacgttagctgaatgttctaaaagctcaagtgctatcaccttttagtgaatattcagaagatggtgcacatacatgttgtatcagcaaaaagtttctttatagtcaatagaaaaatgctaagtcaactttactgaaaggggactttttgtcccttctctattcccaactttgttctatttgcttgatgtgacgaaaaagaaagatcaaggccaggcgtggtggttcatgcctgaatcccagcagtttgggagaccaaggccagtggatcacctgaggtcaggagttcgagaccagtctgaccaacatggtgaagccctgtctctactaaatacaaaaaattagccgggcgtggtggtgcatgcctgtagtccccgctacttgggaggctgaggcaggagaatcgcttgaacccaggaggcggaggttgcagtgagccgagattgtgccattgcactccagcctaggcaacaagagagaatctctgtctcaaaaaaaaaaaaaaagaaagaaagaaaaatataaatgagataaggtggcaatgttgtaaaggattgagcaagattttttaacaatggggagaagaaacaagccatgtccttttaccaatgaaacatccaaggtttatttagaaatgtaaatgttttagcatatttgaatgaggcaatgggagtgttgagattgatacaactgaaagcaacagaatactgtataacattttgactatagttactaacaaagtattctattcttgaaattcactgagagtagatgttaattgtactcgccacaaaaaagataagtatgtgaagtaatgcatatgttaattagcttgatccagtcattctacaatgtatacatatttcaaaacactatgttgtataccataactatatatagttttatttgccaattaaaatataacttctgttttttagagacagggtctcactttgttgcccaggctggagtgcagtgaccagaccacagctctctgtaacctgaaattcctgggcccaagtcatcttcctacttcagcttcccaagtagctaggattacaggcgtgtgccaccacgtctcctaattttttaaaattttgtagtaacaaggtcttgctatgttccccaggttcatctctaactcctggactcaagtgatcctccagccttggcctcccaaagcactgggattacaggtgtgagccatcatactgagcctaaaatataacttaaaaaaaaatgaaagcaacagaattagacaagctcagaatattttgccaccactattgtttaaggaaactttttttcccaaaaaagtatcccaaagggatacttaagaatcctctttaatagataacttttaacagtgtgcattgtatgaaagccaagccattctaaaattctgttgttgaaattgaagcaagagatttgtaatttaaaagttagtgcttcattatgagattttacccttttttgccttagttgcatagaaagttctcagaaaacagacaagcttacccagagggagaactaatgttcaagtttccaaagtgggtggtgaattgaaaatcatgaaaaatattatgaaactaaagaaaaattaaacgtatgatctgatgaatgtatttatgtgatgattgacaagttagcctctaggttccactgagcaatatttatgggaaaggagtggaggagacagggaattctggcagcttgtgcctgctatttatgtaccgttcagcttagcaggagagggacgaagaactggggctgcattaaaaaacatcctctgggctggctcactgggcttgctttgaactcttgttcatcattattttatgctgcagcttgtctttgtgttggtggaagggaaaagaaaaacacaagagactagcctttagtttctaaatcaaagctgtgctttgctgactgctggagtggcttttcaaaagcaaaacaagtggggacattaaaattccttgcttttgtaaaccaggagctgagttggggttttttttttcttctttttaaattctcagatgcaaaagggtatgtttcaatgtgtcttacatttaccttgaaacaatctcagtatgtttttttccatttgactggcacttggagaagataaagcaaggtgaaaaaaatactaaggaggaacctgcagaggtttggaggaagggcgttcattgtcatcgaatttaagaaagagaaggatatgtaaattttactaattaatgcctcttacacatcctttcttgatagtgaccccaaggtccaaagacgttaaatcagttgcctaaagcccagacccagaaagtcaggactagaccttcctctgtggattcccactcgtcctctttacactgccctatgctgcctctagcgttagccggagaaactgtaaggaggggttaggggaggagaaggcaaagaaaagctggagagggtcgtagattcttgcctaaggaggcaagaagtgacctccctgagtcaggatacttgagcatttgacttgactaagagaagtagcccgctagttccaggcgttgaacgcgccaattagctgccgctgagtatctgggatgttttttgtttgtttgtttttctactttggaagatcaatgtaaggtagaaagttaatccctttcttcttgccctccacgccttccacgctgatcgaagcgaccgtcctccctcgaacatttcgtgggctcattctttgtaacacacttgctctgggccttaggtgtctctttaaaccctctctcccctctttatttccaaatctttatctttggctttcttaagctgtaaaggcacactggcaccttaggtggtcaggtaagatcgctggattccttatttcggcgaaagtccagcggaccattcccgccactgtacccattttagaaacacttggaagacccttaaggatcatttacggagagaaaggtgtgcattctgcggctgccggcgggcagctagagaacgtggcggggggcagcgcatctggcgccttggccggggcgcggagtgggaacagcccgcacgcgtccgctgccgccctgcctggcgacgagtggcacaatcgcccaccaggaatcggctggtgccgcgggtgggcgaaggcagcgccgccggcccggagggcggcgcggagggtggcgctggcggcgtgaaaggcgtctttgtgcaagattgagtgtggtggggggaaggcgaagagagaactgatccaggacctggacgcgggggtctgcggcgcccctacgcccccacgcccccagccgtccgcagtgccggaatgagccggatagcgccggcagggggcagtgtggcgatataggggttgccggggggagaggagggtctctgttcacctctatttgaggctgactggggagaaagctgcctggaggaagctgctggggtgcggggggctgagggatttggctccccgccctctcccctagatggcggagaaatcgggctagctggaagggcgcagctcctctcccagagctcattctggagtcggagaactgggagagcggcccccgaggcggagcctccctcccgccccgagtcgcgctgccccccacctgggggagaggggcgggcgccgcgctgccttccctccgcgcctcggccgcgtggcttgcggcttattttcccagctggcaagcgtcgcgctgcagacaagggaatgcctgtggtgagttgtttattttgttgaagtttgcggtgggcccgggggacgtggggggcgagcggcaggcagcggccgggactgttttgtttaggtctccatccacctgtggggtataaatctgccagcctcaaggcggcgggggaccggagtgagaaagctctgacgctcccaaaagccccttttcgcaacttacagatctaggaccacatttgattctccacgcctggaaccggctagatcctagtttacgctcaccccgccctccagcctcccatcaacgcttcccgcacccgctgtgtgcagggctggcgctccgcagagcaaacagcgcccacgacccagggacagctggccaccgaagtccctccccggcgcccttccccgttccttgaggataggggagctgaggttttcatgtgaagggcgcccatgaaattcgtgggaacttgttctggcgtcttctggagtggagttctttcaggggtttcgggtctgcccgggactacaaaatgggatcctgggttggctggagtttcccagactaggctggagagaggtcggctgttggctcgcgggagagcccagaggaaccccttgggcgatggcagtcaagaccggcggctgcgtttgcctggaagaaaagcctaaatacattagcgagctggtaaagcttttaaggccttcttgggagcgagtggctggctaatgagaggttaattttgtttcgaagggaaggctgcactggtttcctgagataaatggacaggaagcgcattacctccgcgcgctggcaagcggctcccaaatgctttttgcacctgccgttttgagcggtgagagcagcggcggagcccgcagggattgcgggggcccgttgtctacgagcgggtgatgagccccccgcaagccccgggctctctccctccgcgagtgcattgctcacgccaagctttgggactcttctctcacacccag

SEQ ID NO: 10467 - DNA, 6000 bp, Homo sapiens
cttcagatgactgcagttctggttcacatctaaactacaacctcataagagaacctcgcagctaagcttttcctgatacacagaaactttgcaagataatgcttattgttttcacctactatgttttgggataattagatatgcagcaatggacaattaacacagatatagtgagaagaacacaccatcatttctgtcatactcctgccaaagatacataacctgaatctggtcctaatgaaacataaaacaaacactgattgagaggcattctgcaaaatagctagcctgtaatcttccatagagtcaaggtcatagaagctgaagacagactgagaaactgtctggagtgaagcagactggagatatgacagctctctttggaacacctgattctgaactggattattttactaataaaagacattattgggacagtgggcaaagtttggaacctgaggattagatgttagtaatgtatccatgtgaattttgttattttgatgattttattgaggttatgtagtagaacatatttgtttttaggaagttatactaaagtgtttagggatgatggagcatcaggtcagtaactctaaaatgattacggaaaaaagttatttgtactatacttgcagcatttctataagtttcaggttctttaaaaattttttaagttatgccaaaaatatgttataaaatatgcctttggaggccaggcatgatggctcatgcctgtaatctcagcacttcaggaggctgagacaggcagatcacttgagctcaggagttcgagaccagcctgggaaacttggcaaaaacttgtctctacaaaaaatacaaatattagcaggacatggtggtgtatgtctgtagtcccggctactcgggaggctgagacaggaggactgcttgagtctgggaggcagaggttggagtgagccaaaattgcgccactgcactccagcctgggtgacaaagtaagaccctgtctcaaaaaaaaaaaaaaaaaaaattgcctgtggctttaaaaatagacacatattgtcttttttttttttaaaggggtgcatagcattctggtttttgtaactataagtttttttttccacaaatctcctattgaaggacgtttaaattgctttcagttctttgccattataaacatccgggtctttgttattacgaacaatactagtaaacatttttataaacatagttgtgccttgttcagtttttgcctaagaattaatcctcagaagtcaaattgctatgtgaatggatatgtgccctttcatcagtttaatcgtaagtcattcaaggaaactgcataaaatccccttacaagaaaatgaaatttacagtttggtagtcatttttatttgtttctctcccccagaaagtaatttctataagagtgggaacgttatctgtcttgattatcaccgtccccagcattcagagtctcaggcattcaatatatatttgttgcaacaacaataatagggaatatttattatgtgtctagcactgttctaagggtattaatttagtttttgctggcaacagccctacgaggtaggtaatatgattacatccattttgcagatgaagaaactgaagctagagaggttaggtacttgtctagtttcacacagctaataaatagtggacccaggaatcaggcagttttccttcagtttacaggtatccactatgctgtacagggtctcttataaatgaatacacgactgaatggtcaaattggttaatatatttatttggctctttgaccagtaacaaatgccagctatcttttttttttttaaaaaaaaatgaaaattagagggaatggactgcctactttgtaagagccaaattagttttatggtcttctggactaggctgtacttaactacctactaatactcctcctggaattaatatccatacaggtataggttataaatcattcttacctgaagattttatggatatgtaaacagaacatttgctttgtattacaaataaaatagtaaatctgggcctgcagcttgagtctaggaggcagaaattttattactttatgaacatactctgttccccacctgggctcctttgctcctgccatttccctgtacctgtaatgctgattgtccacctcccacagtggaaactctaactgtcctccaaggcttgctcagtagccaccccttccactgaatactgcttttactcttcttttttcttgccctccttttgaggattctttccttcttcaaaattctgagtctctttttatagtactcatatagaatactacattctaaatataccttatgttactgtgtagagttctcatctcccttaatagactatattcttttttagttttattcattttataaaactccagtatgtattataatcttttgtataaagtattgaaactaagggtttttttttttttggatgagtgaaggaattatctcaatgaaatatctgaaatatatttaaaatttttaaatcttaaataagaatactaataaaatttgattattatatgttctacattatccagaattataaaaaaaataaaataggtggacatgttttttttttgatctgatgatttgtattttgtctttagcttacaagtcatccagaaacaagaagcataattagctttcatttttataagaccttttgttctattcatggctacaaataccaactttgcttctacccacaactttaattcccttttctttaagtgggtggtttagggacatcaaaggtaataaaatcaaagagataagtggaatatttttttcaaaggctagtacttaagggtgtgttcctgttagagaattttaatacttaatttgttttcaagtgtttgtgtaataccaaatctccttgccaactggaagagggactgtccttgaatcctgttctgaataaaatattaaaatataatcccttcttcatatatatatatatatatatattttttttttttttaaagaacttcagggaatgtgaagtattgtcatttgataggattatactttgttgctagcaaaggcaatagcatagccttcctgccaattgtttctcttcctccagaaggagttctttcctttacccacaggataaggataaagctgaaggtttttgtttctgaaagcccaaacagcaagccaaagagaaagttcaaacaaatattgtcagtcttttaaaaatgtcattgcttatgtaaattagctgacccttgactgctggtgagcctcaagcatccttgatttggttggatgttaagtcaggttttatttatatttggtatatggtatctagaaagcacttatcatgaagaatctcacttcatttaaggttagtgcttttttatttgttttggttctaggtttttgttttgttttgttttagattagcttcactatcttgtgatttccagaggctgatgtattactgtgaaacattccgatatgatttttccttattttttctttttactgttacacatcttcccatcaaattcatttgagattcttggaacgatgtttatagttactgactaaaataaaactttaatctctttctttggaagtacagtatttttatattgtgaattatacagttttaatttatgccttcagactaaaatttgcaggtttgataacatagttttaaatatattcagtcaaaatatgaatattttcaagtttaacctagttgagtcctcttataaaacgttgagctgtaacattagttcttcatggcctctcatttgtattaatgtgacgttcttgatcataacctttgaagataaaattcatttggggggcagctaagattctccctactctttctaattatgttgtaaaactccaaacttaggaaaggatatcttttggaaggcatgccttatgagtacaaaattattattttgcttatgagatgcaggatttttaaatgggcatttacatcttgtgtatcatgttagctgtagagtttttgtttgttttaaaataattctgagaacttgggcaattctgtgatgatccttgggagctcttggtaggagatatcattcctcttggatctgtagctctgtgatgcatgtatataagcatgcctttgttctcaaaagtctttttctatctgattactgtggtatccagtgctttgtctttgcctctcttcgttttttgttttgtttttttccttgcgccttagccggtcatttgtgtgatgtttacattcagcagagaggtatttagagcatttttggtgagagaaaggagtgatagaggaagtaaagagaaattcagactggggtggctgtgagggataaaggggggaagaagtaggaaaagaaaacaggagtgggtccaagggaggaagagcaagcaaagacagaacaccggctctacaggggctgcgccgtgggggttcctgaaatcttgggggctggctgtgggggagggagctcaacagaccagcattttccccaggcttgggcgcaaccttgtgaaactactaatgtattaaagaacctcagctgggatttgctgaggacaaatgctgtaacgtgttagtcatccattatctgcttctatttttgcaggttctgaatgatgactgacgcgggtttgggtgatacccctcacagcccctgtcattccggagtcataaggcacccgcgcgtctagccccagcgccagggcacgcgagcggcgctggagggaggaaagcttccgcctgcgggccggacaaaagtcccgcctgcccacggctttttgcccgccgctcgtgaccgagacgcctcgccgcggccagctcgctgctctcgctggcggatggtgtgtggccgccgcaggacgcccgccgtgcccgggccatgaagtagcggctgctggcggcgccgctgcccaaccgccagccccagccccgcgctgcgctgcccggtcctctcccggcggggtcgtatcggcgtggacatggctggccgcgtccctagcctgctagttctccttgtttttccaagcagctgtttggctttccgaagcccactttctgtctttaagaggtgggtgttcgttgttcgggtgctttctgtgcatgctgttgagaaatgtaatcacttttatgaacctgagtgttggcaaaatagacggggttgatgttctttgctggaatgacttggaattttaccacagtaacttcttgtgaagtcccccgtgcagaaaaagcccactgcattgtagccaagcagttctggctttcaaaactccaattagaagttgtgatttccaaaactaatcactccctctgggggaggtatttcaggaactacaatatattcgcttagttttgaatgcctgcttgtttataacagctcgaagaataaaatataaggatacatcagtgtcgaggagaagcagatcatagactgtaatagctcacaaggaaacactgagctgtatacaaacgcctcataattactttattaaatatttatgtacttgtacatttgtaattcacatcgcagtcttttatttcttcctcctaacagctctgcctcctagcaagattatggttggctttcttgtttctagctagtaattctggacactgaaaatagttacagaaatttttactgggtcatggttaatatttctgccattagaaaattggcatgcctgtgataatttgtaatgtattaatactatatcttcattaacttgaaacagatatatgttttgacatatttttatatgacataattttttataaattttcaataaaaacaagtttttattgaatggagttttaaatgtagcctggttgattgcattggttatattttatttacaaattaggtatatattgttattggactataaaatgaaaatctgagtatgtttacgaacattgtgtagtcatcacatctttagagttttcattgggtttaaatca

SEQ ID NO: 10468 - DNA, 6000 bp, Homo sapiens
cgattctcctgcctcagcctccacagtaggtgggattataggcacctcccactacacatggctaatttttgtatttttaatagagaacggatttcaccagtgatctgcccgcctcagcctctcaaagtgctggaagtacaggcagaagccacagtgcccgacctagagcaccttttaatattagctgtgggccatttgtatgtcttctttgaaaaaatgtttatccaggtgacttgttcattttaagattgggctatttatttatttactattgaattatgtgggttcattatatattttggatattagtcccttaacaaatatgtggtttgcaaatattaggttggtgcaaaagtaattgcggtttttttgccattacctttaaaaaatcacagttgccattacctgcaaaaaccgcaaatacttttgcacctacctagtattttctatcagctgggtggttgccttctgtatttgtttgctagggatggcataacaaaatactaaggactggctaacttagacaacagaaatttattttctcagtctggaggctagaagtccaagatcaaagtgtcagcgggtttggtttctcctgaggcctctctccttggcttgcagatggctgccatcccaatctgtcctcacatggtcttttctctgtgtgcatgtatccctggtctctctctcttcttataaggacaccagtcagattggattagggccttactaacagcttcattttaacttaatcgtctttttaacttaatctcctctttaaagaccttatctctaaatactattacactctgaggtactgggggttgggacttcaacacgtgtattttaaagagaaacattcagcctataccactttccttccatggccacgtgattggtatgaccagtccctgcaacaatcactttgccccttttcccccaaatcctaaccattgctaacccacaccatctgtttggattcatctctcagtgactcagtggttttgtcctcatatagctttaccatcctagaacatatcccacatccgaagtgaccactttagagttgtcatctcatactcaagatcattatctccttctctctggttcaaatatatattattacagcacctaaaatacttactaattcctgctcatcaggtccaatcagcataatgttgtcaatgtagtggaccagtgtgatatttgatggtatgtcaagacaatcaatatctctgtggactatattaaggtgaattgacatacccccaagacaatactgtgaaggtatcctgttggccctaacatgagaaagccaactgcttctggtggttttacaaacagatatagagaaaacagcattagccacatcagtagctatataccaagtgccaagtgctatgttgatttgtttcagtaaaaataatacatttgagacagcagcagcaattggaatcacttcctgattaagtttatgagtccacagttattctactagatgtatcctgtactggtgaattaaatgagagtaagtatcaccactcctactccttttaagacttttatgatagcactgattcctgcaattcctgccagccatgcagtgttgtgtttagtgagctaagtggaagctctaagagctcctggagcttccatttagctctccctaataatagccctcattctatggctaaatcccaatgtggggatcctgtcagttgctaagtatgtctgttacaattattagattggtgcaaaagtaattgctgtttttgccattaaaattatgctgttaatacatattccaattacactgggaaagtagccacatagttggtatgtggactaacagtggtgatttctgtccccaggaattagcatcaactcagagccagtgtttagtaaacctcaaatgatctgtgtatttccttttcgccaatgcagtttcactagtaaatggccacatgtcgttttggggaaagcttgaaagaatttgccatgtgtactgtagccaaggtgcaagatccttcttaaagggaacacagattctctttcaaccaagggactatgggtctgtgaattgacttaggtctgagaactgagagactgtgactatccactgtggtgactcaagtcaggttttggctacctgacttagatctttttacctgttataaatatcaagcaataatctatttcaactgcctatctattttgttctcagagcagctccgtaagccaaggcagtctgatttcctgctgccctttaaggtacatgtgcgcccaccttgtctttgttggttatgtgctgcctggtttctgctattctgagatcgtgtcatccccattgaaatcagggagcccatctagatagtggcatcctctatagtcaaggttttcaagcaaggctagtctctttagacactggagggcaacctacttccactgataagagaaagagttggcgtgtttaagattgtcggtttcatctgggtccaacccatttcaagtattgagattctattattaaaaaataacaccattttacacgaaaaactcagaatatgtgtgaatttaatagcagttataattcagtaacatgaaaattaaaattttgtttgattctcagcataattcttgttgctacaataaaccagagcttttggaattctgcagaatatctctggttctcataccataactctgagagttaaaaaacctgtgcttgtcatttctctttataaccactcaaaagcacgcaaaagaatccatcccacaccagtctttctagtcatctttataaccatagcagtcaagtgtagcagccacttggggccccaaggcacaggcttcagttggcacttcatcaggatcaaccacaggtaattgcttaattgagatgcccagcatgtcatgaattacatttccctttggcaaggagctaaagctcaaaacctcaatcaaactgacctttaatcccatctttgcaggtctatttcttgggactactcccgggacagggaaggcttaataaaaagaattgttaactataatagaggattagagtaatgaaggattcactagcaagaagagaactttaaagaatatagcaacagcagctataaggagctaaccttataactaactcttgggttgagagacagagtgcccaatgaagaacctccccaattcctcccagggctaagatctagacgtttttggagagggcatgacctggctcactgaatggcagagaagtcaccattgggctacgtctgcaaagcttgtggaagatgtgccctctgcaacttgctgcaaatgcctctagggtgccagggaagttattcatggggtagtgtctcacctcctctacaaagctcctagagttgggcatgtgagaggaaattgctagttactgagcactataggaccttggcagtggagaaagccaggtatgctgcaaaagcttatcaatacacagaaatcaggaagcaaaatcctttttttctgtaatgtctcttcagcgccctctgctgataaagcttcagtcccagaaggcaaacgaaaaactgtttaaaaggctcagatccgtttttacagtgcagtcaaaaagggcgaatttggagctgagaggcaataaatcaataactggcagaagcatcacttctcagattacactcatggatttcgtagtcagatgtttctacatgtgcctggacggccctttgtcagtctcctttcccccaggttttaacaggctgtcaccaaaggaggaaatagtgagcccgaagagaatgtgcaagccctcttctcttgcatttcctccagcccgtcaccaagtactcttccaggcacgccaggcccgagtgtcctaggataggaaacctgagcaacaaagggaagtggggtgtaagctcaacccctgttggacgtgggggtgctggcgcctgaacgcccccgaaggcctcaactcccagaaagctgcctgccaggtcacaagagccctgtgaggtcttcctatcgccgggacactgggaggcaggcgcggggcgggtccgccgggcgacgcgctgtgattgggcgccgtggggcccgccccctcatctcggagcgtcgggagggggcggggccagccgcccgctcggctcaggcgctgcgggcgcctattgacccagcggctgctgcgccgccgctgtctcctcctgctcgtggcgggcggtgctggagcgccaagtggcgctggagaaccggcgcttcctttcgccgcttccgccgccatctccgcgtttgtggggcgggaaagagggagggggctagcggctgcagctggagcgggcttctctccggggacggtcctttcctccctgctctccttttccttctttccgcgttgccgccgcccgccccctgcgcctccccgcggagcctgggtccgggagggggaaggtaggggcggcggggggcgggagagtctggcgagcggacgctagctctgaggaaactcatcaatccgtgagccccggagtccggggtgcacatcggcccagccgcagcgtcggcggcggcggcggcagcagcacgaaggggctcagtcggggtaggcgggggcggtgccggtgccgcgggggcgggcccgaccgtcccgcccagaagttgtagggcttggctcctcgcgatcttgttcctttcccctccgcttctctgacctagctgcgcggccccggcccgggagctgccgaacccgcgcctcccctgggtgaggaggacacgcctgccctcgtcgagaaaacttttcctgccgactcagttggggcggcggtggcaggaagtgcgggcagcgacctctcctccgcctgccccgcgcgccctgccggaggtcggcgctgagcttgcgatcaagtttgtgggggccccccttcccagttgccggcgagtctcgcctcgagaggggcgcccgaccccggggagggcggcaggccagggcgaaggccaagggcgtgtggtggcgccggagactaggtgcggagcaaggcggggactcgcacccgcatccgagagcgcggaggtcgcgcagcccgggagaagggagcctccggcggctgcttcctagagtccacagtgcgctgtctcctttggctgaggagagtgtcctggccccgagtctatcgaggaaaatgaagttaagccgccagttcaccgtgttcggcagtgcgatcttctgtgtggtgattttctcgctctacctgatgctggaccggggtcacttagactaccccaggaacccgcgccgcgagggctccttccctcaggtaagcacctgggaagggggcgcggggctccgaggggccaggcgtgcgggcccctggttagcggctgctacccaacctcttcctcccgccgcggccccacacccgtgctgggcgaggccaggggctctgtagctctcggacggcaatgatcacctcctgggagccacctcgcccgggcgcgccaagttaacaaagtgctgggcggcgtgcggcggcggcggcggcatcatcccgctcaggaaagtggccatgttccggcattcgcacccggcctgttggggtggcttcgggcacctgctggcgggggaacgggcgcggcgtgaggcaccccccgccagcccggggcccgcgtatcccggtggggtcgttctcggctctcacagggttaagccgcccgcaccagcccagagcccctgagcgcacggagtcgcggaaatggatcaaaccgaacccacctaggcttttttttctttttcttccccgctgcctctgaagagagagaagtttatttcgtgttgcggcccttttagatgtgaatctctaggttgattttagtgtcgtcattcttcagctattacatctggtttgtttgtggcagacagggggaaccgagtggggaagcgcgtgttatactccggccgaaagctgtggggcgctcagtcctgcgtccagtggttaaattggtaaatga

SEQ ID NO: 10469 - DNA, 6000 bp, Homo sapiens
gtcacctatcaccaaaataatcttagtggtttaaaatacaagtatttatttttctcattcactcctctgcgtgcaggttggctagattttggtgatgttggctgggttcacctgggattgtccccagaattccagctgggttcaggtctgctccaaatatctccttctggagcccagagtgaaggggtagtggttattcaggaggtgcttctcatggttatggcagaagcccaagcgggcaagccaactgagcaaagcctctgtttgggtcacacctgctaactaacacctttctgcccaaggatatcactctaccaactacccaaagggcaggaaagtccactctgcccatcatgaggctatgacaagggtatggacatacagtataatactatggtagagggatgaaaaattaagtccaataattcgggaatcaccatcttctgaacataaatgctatagcctatcaagtagaaaaagaataaactcggcaattaagaaaatttatacccaattcacaatttaaaatattcttggttgcttccatttactgtgtgtgtcccattaagtgtgtagatgttaaatatgctttgcctaacttccctaacaatgtaatcaggatcaaatgcaccatagtggattgttatatcacatcattttacaaaaacaaaagaaaacaaaaacacctctattgtttgaaagatatttttaaaattgcttatttcaagttattttacatgtaaaatatttaaaatattactaaatttcaccttttaaaatacttaccaggcagggcgcagtggctcactcctgtaatcccagcactttgggagaccgaggtgggcagattgcttgagccagttcaagaccagccttggcaacacagtgatgccctgtctctaaaaaagatataaataaaatagtgtatagttgcatcacagtacccaatacagtggtttacacatagtaggtgcttaatatatgttgctgagtgaattcttgaataaaaaatataggtgatttttattttatcctgtgagctgaatttatttagcatcagaatttttgagcaaaatgttaacataaatgaatgacttgcttgctctgcacaggcacttttgtttggtaggaccatagcattctgtgccaactcttgaaaactgttgaaacaatctgcaacttttcatttgtatttcaactcaacaataataatgactggactttcgaaaatatgtattaagcccgttggggggtggttatactatttctatcatattattttcaaggaaaattaatcctttatttactaaggaacaaagtaaaaaactatattattctgttaatatttgggctaaaaatttccttattattagttttggtgcctaataatatcctccacccattaattgttatatagtgatttaatattttagtcattttaatgatataaatgctattgtttgataatcctccctttaaaagatagagtcaaatcctcttcccctttaagtgcagggttggacttagtgactctcttccaaaaaaatagaacatggcagaagtgatgaggtgtaattaggtcataaacgacattgtgtttcccccttgctgtctgtctcccagctgttaagtcataaggacattcaagatgttctatgaacttcatgtggcaaggaattgaaacctcattaacagcaatcagcaagaaataaagacattctttctatagctgtctgagtaagagatcttagaaggggatcctccagccctaatcaaactcagtcatgtctaaaatgactgcattccaagtagaagtcttaactagaacctcatgggaaacctaaggcagaactatccagcgaagccactctgaaatttttaaattacagaaactatgagatattaaatgttgttttaagctgcccaatttgttatgggggtaattcattgtgccacaatagaaactaatacaaacattctgttgttttcataaaatgcattggccactttataaattcatgttttaattcctgtgttatgagtttctcaaactagtttgaagcaataaactctggacgatttcagcataattattttagaaatattttggagaaatacaggatgatagagctttcatagtgctctagagactactgattaaatgatatgaacagatttagtaatctagaaagatctttattgctgtgtctgcccataaccaaatttgctctaatttttttctaaaataatttttcttcttacaaaaaaaagctaagtttttagagcaattaaataaaaagtgaaactatgcaagcccgtgctcagacataatactatcattttagcacattcttctattgtgtatctttagtagaatttttaaaaggtaagttcatactgtacatgttttaaattgaacatgaatattttcatgtcatttaatactcatctctaatgtaatctataaacatcttcactctaaacccttctcatctccattacactatcactcgagatgaaattattactattttttgcctcagctgcttgcctttagtaggtggaagcctttactcttccccatacagagccaggtggattcctataaaacatcaatacagtcacattactcctctactctcaaaaaacctaaattttgttcaccaccgacaaggctttgcaagatctggcacctagcctcctttcagctctcatttcctatcactttcaccctttctcactggctacctagtttgctatcggggcgtttctcttgctcagctctgcctggaaaacttctcccacatattcacaaatggctcactccctcacttcattcagttctctgctcaaaggtcacttcttcagagaggacttccttattctaaaaaaaaaaaaaaaaagcttcctttattgctcacttaggcttttttaatacaatcatgtcattatttgacattgcactatatttgacaggatatatttatctgttctttgtctccctaaactagaatgtcagttctaacaatgcaagcaccttgtctggcttatttatcattctatccttattgcttaaaatagtatctgacacgagataggtgcttaataaatatatttttgttaaacaactgtatggatatacactttaaataataaattattaatcaataataattatttgatatttgcattcctgcttatttttttcctattatgagcaagcatgccataaacatatgtatgttatccatgccagaaacatgtaaaaaacccctatatttgttttctaagattttggagtcaaaaaatatggttatttttacagtttttgatacatagtgccaaactgctctccatcagaaagttatgttttatatcacttcagaaattaatgaaagctactttcttctcacctggaaagacaatgtgcattttcccttttaaacaccttaatacgtgaaagataattaagatttaccttttttcaattagtaaaggactttttatatgatattatctatttacacttcctttttttgtatgaattgcctctacatgtcctttgctcatatttctgatttgcctttattcattggtatgaactctttgtacattaaagctactgttccattgtttaaaccatgttaaaatgtcatttttctgtttgtgatttgcctttcaattgtgattactatatattttaaaatttactatatggacatttaaattttatacagtcaagagactcaacacctttgcccaagctgcatcgcaatcaaatttaagaatgtcaattcgttatttaaaaatgttaattatacattttaatgtacgctatcaaaatatctcatgtaacccataaatatatacacctactatacacccataaaaaataaaaagtgataaaaccacagaaaaaaatgtcagttcaatcaaaacaaagttgattatcactctcaatcaaggttcgcatctggaagatcgagaactgcacgtcagagttctcttggaaaagctctaggaatcctgggcttccaacgagttgaaggaacataggatgaaaccatggaagtcttcctcagatctggggagggagcctggcccaagagcccgtggagctaatgaaaacaggtagtaggggacgctctacagtagtcctctcagttattcaattagaggtcccaattttgaacgatataactgggatttcaataccctgagtgatttagacacatcagaaaaaaatacgacagaaaactatagtttctttacagccttagaaaaggaaaacgcgtaatttctaactccaggaggacagtattcgagtacgtgggtttctttcacccccgacgtgcacttcaacttttaaaatgcttgctctggtggtccacagtactttcgcgttcactgggcggtaccatatctctcaatagatttgatccaaaaccccaagtgcgggagacaaagctaggtggaacgttattaaccctccacaactccaacctctactagcttcctcggagcaggcgaggcaccaggcccgtgagaaaacactgagatctggggcgtagctgtgacatggggtatttctggccgggatctcaccgggtaggctccacccgcgggttatcggctccctccaagaagcatctttgaactcctcccatgcaggccctattcctacaccagttctctttctggaatctctttggtactgtgtttcattaatcccacaaccatattcccacctattccctaacgacaacaaacttttaaggtccaggttaccgccgcgtctccctagcaaccgtgccctttaatggttgccggaagaggctataatcacgtgctccgaagacttccgggtttccaacgtgacttccggttgtcagaatttacccctgacgcggcggcggccgacgggaagctgtgtgtgcttaggtcgtggtggccccggtggtggtgggctccgggcgggctcgcgtcatcctgcccccgctgcgatgcatccgcggcgcccggacggatttgatggcttgggctaccggggtggtgcccgggacgagcagggctttggcggcgccttccctgcaaggtccttcagcaccgggtcggacctgggccactgggtgacgactcccccagatatccccggcagccgcaacctgcactggggcgagaagagcccgccctacggcgtgcccaccacctccaccccgtacgaaggccccacggaggaacccttttccagtggcggcggcggcagtgtgcaggggcagagcagtggtgagaagcatggggaccgacacagggatgaggggttactggggccgcggcttgcggcctgcagaccccggaagcggcgcagaggatcccgcctcctattccttctcatcctatcgcgcgccacaccctttgccctcctttggtcctctgcccctgaggctggcctcctcttcctcacaaacgaattctcctggatcaactccaaaaaagacatctgccttagctatggggtgcatagcaggaatttttagaggttttggtgtctcaactgatggtctgagttaaaaaggagattggattattaactgttccctgattcactttggcagctctattttcttgatttaattaattaattaatgtgtttacttgtagttttgtgttctgaaaagagaagcctttcagcataagcatacttgggttcaaacttggttgtgccactcgtaatctgaacaacttaacctctgtgagccctcagttttctcatctttaagatgtgtagaagaatcctgtatgggacacataggctaaaaaaaaaaagtttccttccttttcctttttgaacacaggagttttgtctgcttttcagatccccagtctagaaagtttccttcctataattttcctttctgctttccttctgctgacctaaaaactacatataaaagttagaaacactgatacaatttcaagataggacttcggaatcatgac

SEQ ID NO: 10470 - DNA, 6000 bp, Homo sapiens; identical to SEQ ID NO: 2357

SEQ ID NO: 10471 - DNA, 6000 bp, Homo sapiens
tcctcctttaattcagtctgcctttccacaagcataagcatttaaaaacttcatatttggctgaaactttcattgtcagtgtggtaacaatattgcattctttctctcttcctcacccctcctctctgtagttgtacaatatctcagcaatggtgtggagtttaataggagtgtggatttggcattgaatgacactaaaaaatattagctctgtcattaattctcttaattctcttagtatatatgaaccaggacatgttactagcaattataatattgacctttttgtctccaattacttagatggctctacaaaaacaattccatggtaagtaggctacttgcatgtattaagcctcaggctacctcattcattttctactttttaatatgtgtatgcgtaccctaaggcaagaaaattatgtattttaaagtttggattcatttcatctctaaatgtactcctcaattttaggtcattgcatgacactgttttaacaggactcatatacactttagaaagaagtaaacgttatttatttacatcaggagcaaacttaattttgtgctaaaaaaaaaaaaatacatggaagattgagagacataagtgagaacatgaaggaaagtcaggggcttccagtcagactagctgactggagcatctatgctcagccattattagcatgaatgggctaattatttaacctcactgagactcaaactttcatgaagatttttgttggttgagtttggtttttcagtttgtctgcttttttatctgtaaaagagaaaacctatctcactttgcctggctttttgaagcatgtctttgtaggtgtggaataaacatccattattaaaacaggaacgaaggtaggtttagttgaatggagatgctgaaatactactttgcaatcaatctaagttatgcaaaaaatatataggcatgcctcagagatgttgcaggtttggttccagaccaccacaataaagcaaatatcataataacgcaagtcatacaatttttttgatttctcagtgcatataaaagttatgtttacattatactgtagtctgttaagtgtgaaatagcattatatccagaaaaataatgtacataccttatttaaaatactttattgctaaaaatgctaacaaccatctgggccttcagaaaatcataatctttttgctggtggaaggtcttgcctcagtgttgatgtctgctgactgatcaggatgatggttgctgaaggttggagtggttgtggtaatttcttaaaatgagacaacagcgaattttgccacatcaactgactcttcctttcacgatagatttctctgtagcgtgtaatgctgtttggtagtattttacctatagtagaacttctttaaaaactggagtcagtcctctcacaccctgccactgctgtatcaactaagtttatgctattctaaaccctttgatgtcatttcaacaatgatcacagcatattcaccagtggttttcatctcaagaaaccactttctttgcccattcataagaagcaactcctcatcattcaagttttatcataattgtaacaattcaatcccatcttcagtttctacttctaattctagttttcttgctatttccaccacatctgcagttattgcctccactaatgtcttaaagtcctcaaaatgatcccagagtgttgaaatcaacttcttccaaattcctgttcatgcatcagcatattttaacctccaatgaatcacaaatgctcttaatgccatctagaatagtgaatcttttttagaaggttttcaatttatcttgcccagatccatcagaggaatcactatttggcagctatagttttacaaaatgtatttcttaataagagatgaaaataaaaattactatttgatctgtaaactgcagaatggatgatgtgttatcaggcatgaaaacattaatctccttctagatctccatcagaaacttagatgtctagaggtctaggtgcattgtcaatgagcagtaatattttgaaaggaatctcttttttttttctctgagtagttgttttcaacagtgggcttaaaaatattcagtaaaggctgggtgcagtggctcacgcctgtaatcccagtactttgggaggctgaggcaagaggattgcttgaccccatgagttcaagaccagcccgggcaacatagcaagaccttgtctccactaaaaataaaaataaaaatcagccaggcatggtggcatgagcccatagtcccagctactcaggaggcttgtgtaggaggattgcttgagtgtgggaggtcaaggctgcagtgagatgtgatagggccactgcatgccagcctgggtgacagagcgagactgtctcaaaaaaatagttcagtaaaccatgctgtaaacagatgtactgtcatccaggctttgttgttccatttagagaacacaggcagagttgatttagcatcattctagggtctctaggattttctgcatggtaaatgtccattggctttaacttaaaatcaccaactgcattgttccctaacaagataatcagcctgtccttggcagctttgaagccaggcattgacttcttctctcaaagagacaaggattttgggtgctacatcctagatggcatctttttccaatagaaggctgttttgtctacattgaaaaacctgttgtttagtgtagccactaaatggggcagctctgaagccagacattgacttctctcaaagggacaaggattttgggtgctacatcctagatggtatctttttccaatagaagactgttttgtctacattgaaaaatctgttgtttagtgtagccactaaatgatactagctaatcattgatcatcgtcaatgatattagctacattttctggataacttgctgcagcttctctatcagcacttgctgcttcaccttgcacttttatgttatatgttatggagatggattctttcttaaacctcctgaaccaccctctactagcttcccacttctgaagcttcctcacctttctcagccttcacagaattgaagggagttagggccttgctcggattaggctttgggttaaaggaatgttgtgactggtttgagcttctatccaaacccctaaaactttctccatatcagcaataaggttgttttgctttctgatcatttgtgtgtttattgaagtaatttccttttaattccttcaagaattttgtctttgtatttacaacttggctgttaggtgccaagaggcctagctttcagcctatcttggcttacatatgccttcctcactaagcttaatcatttccatcttttgacatgtgagacgtgtgactcttcctttcacttgaatacttagaggccattgtagggttactaactggcctaatttcaacattgttgtgtttcagggaatagggactccagaagagggagagagatgggaaatggccagttggtcgaacagttaaaacatacacaacatttatccattaagttccccatcttatctgggcatggttcatggtgccccaaaacattattattatttgagacggagtcttgcactgtcgccaggctggagtgcagtggtgtgatcttggctcactgcaacctccacctcctgggttcaagagattcccctgcctcccgagtagctgggactaaaggcctgtgccaccatgcctggcttattttttatattttagtagagatggggtttcaccatgttggccaagatggtgtctatctcctgacctcgtgatccacctgcctcggcctcccaaagtgctgggattacaggcgtgagccaccgcacccggccttaaaactattacaatagtaacagcaaacatcactgatcaccgatcaccataacagaaataatgaaaaggtttgaaatattgcaaaaattaccaaatgtgacacaaagtatacgctgctggaaaaatggcaccaagcaacttctttcaggcggatttgccaaaaaccttccatttgtaaaaaggcagtatctactcgcagcagcaagtgaagtgcaataatgaagtatgcctgtagtgatggcacatggtatccttcagaagttttaaaaggtgaatagttttgtttcgtttttcctagacggagtcttgctctgttacgcaggctggagtgcagtggtgtgatctcagctcactgcaacctccacctcctgggttcaagtgattctcctgtctcagcctccgagtagctgggattacaggcgtgtgccaccacactcggctaatttttgtatttttagtacagacggggtttcagcatgttggccaggctgctctccaactcctgacctcatgatccacctgcctcagtctcccaaagtgctgggatacaggcgtgagccaccgcacccggcctaaaaggtgaatagctaagtttctaacgcagagcacactgaaacacaacgtctataactttgctagttctaccactacaaaaatccattttgccaaactgaaagcaagctctagagcccaggaacggagaaaaattaaacgtaaggagtatttccttccctgtctaacatatatttgcatcctgaaccacacagattcccctcgtggcacagtcttcgccccttaacagagagtagctagtaccacccatactcgctgagaaactggaaacgagggagggtcgaagttaaaccctttttagtggcggtgcatgcgccccacatggtcttcccggcttgggaaaggaatgagaagctttcatgattctctcgcgagaagggaagtcttcatgccacgtcagagactagagatcctggcgccgagcgacaggtgccggaacaaacaggcgatgagaaatcgcggacgcggaaccatttcttgggcaggacttccggcggaaaagcgggctgtctcggaaactcagagccgggttcctcccgggtttctgccgggtttctccctgcggctcctgggttgttgagactcttgtgaagatggcttgcgctgccgcgcggtccccggccgaccaggacaggtgggttctgaggcggtgggtcctccgaaaggaaggggcttgctgtggtgctgcaggtgctacaccgcgcttctccgctccgcggcctccagaatggcctagctgatccaactcgctctgtacgggccccgcgcctctccctggcagctcgtttttctgaatcctgcagcagccaccaggctcttctcagggctcctgaaattccgaccataggtagcctagtgtttatctgtacgcgagacaaggattttgggtgctacgtggacatgatatcaagtaatataatcacagtgtgagaaatgtgttctttttaagtattgttgcgttcagaaaggctcatttgtgaaattttaaggtttttaatacctcggacactttatataagagggcgggcccattctcaggaacttttgacgggctgctctgtctaatgtaacagttacccaagtcgttttgtttctattcctgtggtttttttccatccaaggtagtggataaagtttatttttaaataagttaaagtgaggtaatttaaagaaataacattaagcaaataatagcataggtgtaccagcaatgatgacgactaccacggaccgaaagaatgtatttttgaaaatacttgttatctgttgagtgtagttgtccaggttcttggcgttttgaataaggaattgaacaaaacacacaaagcaaggcagcgaaagcagatttattttaaacaaaagtacactccacagggtgggagccggctccagcaagctacccaagagctgttggttacagaattttctagggtttaaataccctctagacgtttcccattgacctgtgccagtctgattggttgagggagggggatcaatcagaaagaggagtaggcccgcggccagtctgattagttgctcgaggggaccactccgaggta

SEQ ID NO: 10472 - DNA, 6000 bp, Homo sapiens; identical to SEQ ID NO: 1156

SEQ ID NO: 10473 - DNA, 6000 bp, Homo sapiens
tgtggcaaaaaggaaatacagcaaaatcagtcaggttcccaccacggcactgatagcaagtctgttctcaaggttagtctctaaactgacacctggtaagtctgacaatgaaatatttgccaacaattaagtaaaggagatctctcctgataaatttttcataagtttcacataatacactttgatatttcctggaatgtttgtggccctcccctcactgcattgctctctcattttgttggctaatacatgttactaaagtcaatatatattcaactcatttttctctgcctcttggcccaatttaacacagctgatcctgttttcaaatgccttcatctgattttcttctcacctcctgacctttgtaggtcttttatgtgctcattaatgttggaattacttattttttccttaaccaagtttttcatctgtaaaatggatgtaatcttatgattttcttcatagtgttgcgagaattcagtaagattatgaatgtatagattttggcacagtatccaggacctaaattctctataaaggctaactactattactactatcaactcacagctagattagtgaaattgtgtcctgactttccatgcttattcttcctcttctccactcttctgctcataatataactagttttatttttatttatttattttttgagacagtgtctcactctgtcgcccaggctgggtgctgtggcacaatcatagctcactacaacccccacctcaagtgatcctcccacctcagcctcccagggagctgggaatacaggtgcgtgccaccacgccccactaatttttgaatttttgtgggtttttttggtagagatggggtttcattattgttgtccaggctggtctcgaattcctgagctcaagccatatacccgccttggcctcccaagtgctgggattacaggtgtgagccaccttgccaggcctagagagttttaataagcacaaatctgattatgtgcccctcaatctatccagaaacccattaatgcttttatagggcttttagaatacagacacatctcttactacttttgcccccaatccttccctatgctttaaccaaactgatttcaagcttcttgcttctttgatagtccctgctcactccatgagggcatttgtccacaatatttcccttgttggaaaccctctagtgacaatttggtcctaattttcctttagacctttgctaaaaagtcacttctgtcttgactaagtctggcctattttgcattttccttatactacgttcctatcccctagaacttctgtttgcagttacaaatttatatgagtgactactatttattattaatacacatttgtgtgtttcttccaacagacatctcagactaagctcctgatattcatccaacccaaacctgttcctttaacctcctttgccatctcagaaaatagcaatactattcttccagttgctgaggtcaaaacccttggactctcacacttcacatccatcagcaaattctattgtttccccagaattcaactacttttccccatttccactgatacccactgtggtcaaagcgctatcatcacttcctggattgctgtaatacctcttaacacatctccttgcttctttgacccaaccatttatcccttgcctacctacaagacagctagatgaatcctttaaaaatggcagatgtcattcctccactgaaaccttccaataacctgccatctgccaaggactgttgtgtaccctgctaaattaatatgttgaagcccgaatcctctcctcactcctatgtgactgtattggagacagtccttttaaggagataattaaggttaaatgaggtgatcagggtaaagccctgattccacagaactggtgcccttataagaaaagagacaacgctctctttatcatctgaggagacattgagaaggtactgtctgcaagccaaaaagaaaacccgaacatgatcatgctggcattctgatctcagacttccagcaggcagaactgtgagaaaatatatttctactgtttgagccacccaatctatgtattttgttatggcagcctgagctgactaacacactattctactaaaaaagtcaagtatgtctaacagccaaaaaaggtcctaaacattctgatctactacatcccatatcctaagctctctgatgtaattgcctttgattcttcacatctcttaagcaagttccagccaaactggcttacatgcaattccgtgagcatgctaagcatgctcctgcctttgggtctttggtttccctctgcttcagacactttttttcccaagaactcatatcactcacttccttactcaaatatcaccttctcagtgaggccatcctatggaaaattttatgatcctcatttcacacaaatatcccatttccctttccttagtactcactgcttggatgctatgtattttacctatttatcttgtctattgtttctctttctcactagaaagaactccatgagagatgggattgtccgttttgctcactgctatatcccgtaaatacagagtagctcatagtacctgttcagtatttattcaactaaatgaatgttgaattccaatagtggcagaattcgttgtggagctgaaaggtactgcacggatcaactactaatgcagcaattccctagtagaaaactgcactgcttaaaggaccacctcatttttctggcctcctctggttattactaaagctcaaaaggagctttaaaaatcctgatgcaacagctgttttcccctctcaccgtctttaaaaatagagataataaaatagcctgaaaagttgtcaagttcaagtaagatcatgtttatgacaattttttgaaaattgcctggttgcagcttttacttacagcattttcaaacagttctgccaactctgtggctctttcatcatgtttcaagtgttcagcaaacgatggtgttcgtctccataaagtcaaagtttaaaaatacaagggccgggcgcggtggctcatgcctgtaatcccagcacttggagaggcggaggtgggcggatcacgaggtcaggagatcgagaccatcctggctaacacggtgaaaccccgactctactaaaaatacaaaaaattagcagggcgtgatggcgggcgcctgtagtcccaactactcaggaggctgaggcaggaggagaatggcgtgaacccaggaggcggagtttgcagtgagccaagatcgcacccctgcactacagcttgggcgacagagcgagactccgtctcaaaaaaaaaaaaaaaaagtacataaataaaaaccaagtaattggaggacgccattcattgattttacttaggactttgggcataatctataggtttaaaaatttctgctgctaagaaagtgggaacacagttatattcccttacattttaccgaagagaaactagacctgcagaggagtacctttctgtttctatataagcagaggaattctgcacaacccaaatcacgcagaaacctcctggtaaggactccacgggtagttattgccggcattgtattctgagagatgagctgcatatcacttttggaaatgccttaaattaaaactcgtcttgaaacaacatgacgtctcaaagaagctcccttctcaccttggaacatcagcttttaaaataaaggtgtcatcagaagtgtgtagacacccactgcatcacaactggaactgatctctggttatgccaatctaggtctgcctggcagggtgagtctaccgctcgaaagctgcacagaggaaatcctccctcctccaggttcaggcccggagttacgagcggagattcgcggcggcgggtcagagcccagagcaaaccaggctggggaacgcacctcgcccgcggctccggaagcggctgcggccccgaccggaaagcccccagcatcgcccgaaggaatcgcggctggcctgcggctccggcccggcctcgggtaccacgcgcctagtgggaagccgcactgacgcctgcagcatctcgcgagatttcgggctcagcccaagtactgcgagttcaccaaagcggggggaaaaaaaaaaagccagcgtgcgagagcctctgaagccgtggctggggcgctggggtggcagctgccgcgggagcatcagctaccggcgtgaggcgaggcagggcacgcgcgccgtccgcagccccgttgcctgggctgcaggtccactgacgcgcggcccctgggtggagagaggggaggtggcctgggagcccgctccttttcgccgcagagcgcggcgggggagggaggtgaaggcgtgggaggaaggcggcggaagaggaggtagccgcgcggagatcctcccggcgacatcactgaggcggagcgtagccgcgcctgctccccgatcgcgccgttcgtgctgcccgcactgcccgaggccctttgcggactggctggccgcgctcttcgcacggggcgcttttgcgtggggtcgcgcaggagccgcggagggccggatcgctgagggagcgtcagccgcgcgccgctgcgggaccgcgggtgggcgggctgaggggcggaggagcctccggccccgcctcccgcgtgctgctgccggagccgccgccgccgcagccccgccgaggctttaaacagcggggcccgccccgcgcccgccacactcgcgcgctcgctcggctgccggtggcctctgtggccgtccaggctagcggcggcccgcaggcggcggggagaaagactctctcacctggtcttgcggctgtggccaccgccggccaggggtgtggagggcgtgctgccggagacgtccgccgggctctgcagttccgccgggggtcgggcagctatggagccgcggcccacggcgccctcctccggcgccccgggactggccggggtcggggagacgccgtcagccgctgcgctggccgcagccagggtggaactgcccggcacggctgtgccctcggtgccggaggatgctgcgcccgcgagccgggacggcggcggggtccgcgatgagggccccgcggcggccggggacgggctgggcagacccttggggcccaccccgagccagagccgtttccaggtggacctggtttccgagaacgccgggcgggccgctgctgcggcggcggcggcggcggcggcagcggcggcggctggtgctggggcgggggccaagcagacccccgcggacggggaagccagcggcgagagcgagccggctaaaggcagcgaggaagccaagggccgcttccgcgtgaacttcgtggacccagctgcctcctcgtcggctgaagacagcctgtcagatgctgccggggtcggagtcgacgggcccaacgtgagcttccagaacggcggggacacggtgctgagcgagggcagcagcctgcactccggcggcggcggcggcagtgggcaccaccagcactactattatgatacccacaccaacacctactacctgcgcaccttcggccacaacaccatggacgctgtgcccaggatcgatcactaccggcacacagccgcgcagctgggcgagaagctgctccggcctagcctggcggagctccacgacgagctggaaaaggtgagctcgcccagccctcccttcttccccagcccctggtgcatgccgaccgcgggatgtggctgcagactcttcccgagttgaggtggcgggagtagtagacgtgcacgacttgctggcatctctggattcagctgtcaagggtggaattgccgaggaatgttaacttaatctctcaaaagtttgtagcgggtttggctagttacgtgataccggagggctgcctctaacaaccttccccatccagttaggtatctcgtgtgcactttctttcccacccacgctcaacagtcaccatccctctgaatgacagtagtgtttgtgggccctttag

SEQ ID NO: 10474 - DNA, 6000 bp, Homo sapiens
tttcataaatgatcaaagaatgattccaccctttaaagtcacttgcgccttttctgtgattttaaagttattagtaaccttttccaattagttttaatatctaatgtagtcccattagagcagtttgctcaaagactctctgctaagtatagcagactttgtcttggggtggttgacattaaagtctttccaaagccacaggaacacaatctctacaagaagaaatctgtcttcactgtgaatccagatgataccttatgttccagtagctacagctcagagaaggtggcaaataattcatatgttactgtagtctaatatggacatatttgaaatagttaaagggtttaggaaagacagaaaatcagttttgtaattttctttgtaaactattataattttagaaggattttattattgcttttttctcaaaatccactatagaggtgcttcacagagattttatgagatggttcacaagtatacttattggcacattcttgcttagataagaacagcaactatatgagacattttttccagagttattattatagaattacctatatttgtgtattctttcctctaacacagtatatagatttttattatattttggtatgcaattatgtttatttttcttcaatgttagttccatgaaaatttcctcctcaacaacccttacatccaattgacatttttaaaaattattcctataacttattacttaatgttttgaaaataaaaaagtgagttcttgatagagatttcccagaaaattacctcctctaaaagtcatgtatcttcagaactaaagtgagatgagaaaattacttcactgactttgggaaacgcccacaaataacacccacaaataacaggaatctgaatacatataaaattaaatttacataaaaatcttttcccaaagcttctacttattacaaataaggaaaggggcagacactgtgcaggaagaaaaaaaaaagaggcttgttttttcccttctattctcaagtgatgaggtcacttcaataaagatttaaatgttttctctaattctacccttgtcccactgcagtttattttctccccataggagctagaatgatctttgtaaacaataaataaaaaccagatcactactctacacaacagcttcattgtcactcggaataaaagccaaagtctttatgaatgtctgcaaggatctatatatgcactgtccaatatggtagtccctagccacttgtgtctattgaacattggaaatgtggctagtttgaattcaggtgtgctgtaagtgatgagcacacaatggttttgaaaaattagtactaataaaaaggatgtaaaatatctcccgatattttgggtatattaagttgaataaaaagtatgaaaatcaatttcacctgtttttaaatgaggcttctagaaaaaaattaaattatatatcttgcagttgtggctcacattataattctattcagcactgacctaaattatcaacaagtcatccgcttcctcctttttccaatctactttggcctctgctgcgtctcaatatgccatgtctgtgtcaaagacttgtgttagctactccttctccttgaaaagtattatttcagatatcttcaggattagtttcctcacttttttctgttttctgctaaaagtatcagaaagaactttcctgacgtatcagttttaagtggcctcacccaacacataatacactcactatccttctcttttttttaaataaacacttacaccgacatattacagatatttctttatatgtaaaaatacttcatatacacacatgcatgcgtgtgtgtgtgtgtgtgtgtgtgtgtgtgtgtgtgtaatctcctcttagaatacaagtcccatgaagtcaggactttgttttgtctacgttttttttctcagtgatagtgtctgcctcacagtacatactaaataagtatctgttaaataaatgaaaagatgaaatgtaataaaaataagatgatagataccatgagagagacgttttagcataagggaagggattagaaaatgagaacatttcccaagtgtttacaatgaactaaacattatgttaagcacttcatatagtatattaataaagcctcacagaaatgaatttacagatgagaaatcaaaaacttagaattttcacaacttgcccaaggtcacttgtctcatatgtaatatcacttcaatgatttcattttatctgaatcttttctagtgccttccctgactcccatactaaattagatgctcttataaatattctcagagtactctgtatttctattcatatcatttatcaccattgtaattcatttcctagtgtgatgtttaatgtgtcttcttcaatgcactataagcttcatgatgggaagcactgaatagtttgttgacatctccatgtccagagccttccaccttgtctaatgtttaatctctaatatacacttgttgaataagtgaatgaaattaacttcctctccaaatattccaaacagttgatgaattgggttatttatgcccaatgagaattaatgattttgtagatcaacaatatgaatggcatccattaccataaagcccagttgaatactgcaggggagagggtactggtgtgtaggtggacttatttgtcctttactgttgaccatatgcaataggaaatcctctgtaaatgtgctgtcctacatggtaacccctagccacatggggctatttaaataaaaagtaattaaaattaaataaaatgaaaattcatttcttcaatcacactagtcacctttcaatgctccataattttatgtggctactgtcttatcagcacaaataaaaaaaaatttccattatagcgaaagttctattgaatagtactattctagaaattttaaaatgcctttgacgatttaaaaatcagaaggggcctgtttgactagctttgtattctaactaaaatttaactttgagagagcccagtaatctgtattcccaagtgtctctgggaaaaacctagacatggaaaaggagcttcattgtccagcagatgaaacatttagtcagacgtgctcatgcacagccagggaccggtgtggaaagaaccattcctccaaaggctccaggcaggcctagtgttccagggacgctgccagcacctcgctggatcgagccattatgtctaatgccattcaataccatccctttgcgtttgatgtctaaaacagaagactgaaatttgaagagaaggaagtacttgggatgccaaatgcaccccagactatagctttatgcacaacctttagagagaaatttgttaatgctcccttcttcaaaaatcatataccttcaggtaatttcttcctaacgtaactaaggcacaatgattttggccaatacagcttaactttttttgagattctgttgctggacaattttcctccctcattggagaggtaaaattttcctgtctttgccttagaaaataaaacggttcataggcaagaataaaaatcatatcctccattttattttttgattaagttcacttattttgtgggggtaagaatttctttcgtttggatcttcagggtattggccctgtgaatgtgtgcccatttctccactatttgccagtcccactgagccaatcttctaccaagactgaaaatagaccatagttctcatttcttgaacagatatcatcaggagagccgagggggagaccattaggcagccccacattttccaactcaacaggtggaggacatgggatttttacgttctttggggattgaacccccacacaccaccaactcccttagcctttcaggataagtatttccaatccctcagagattttcttaggagagaccctaacgacaatggtgcttctgtgaaggactgaggagagctggtggacgatgcaggtaggagggaagttaggctgggaggagaggtgctgggatgggacgtttggtttcctgacaagtgaccgactagagagagaaggcgcggagtggcagcggtaagaacaacgtggaaaggacggaaaacgcgaagagtggcgccctggcggacctggggcggggcagagtggtaagggtcacgccaggacgtacccggctgtgggccgggggaggagagcacggtgggacagcaacgaacttgctgggggctcccggacccgagctccgccgatgaggtcagcggagcctaggcgccgggaggaggccagtagagcccccagacacgagtgtcgggaggccagcggaggggcgggacgggacgggaaatgggacgaagagcaagagctgggggaggagggaagagggggcgtcggcgctgcaagccggaggcggcccgacagggatcgtttccttccggagaggaggccggctctggactgaggcgcggacggggggcgtccaagggcgggtgacggggaaataccgcggcccgcgcttctctccggctggcagcggtgccgcctgcggctcctcctccgggccagctcggagcccggcggcggggggagcgggaggcgggagtgagggcgggggctcgggaaggagggaggagggagggcccaggcgcgccactgacagggtggcagcctaggagcggacgcgttgccgccgccgctgctcctcctcctcctcctgcagctcctccagctgccgctgctgccgccgctgccgccaccgccgccgccgggagaagtttcactcccgacccttgctcggagccccggcccagagctgagcgggagcccggcaggcagctgcagcccgcggcagtcgaggcgtccgcggcgcttcgacctccagccggtgtcggcgcctaggcggccggctgcggccgcggctgggggcgcaaaggcggaggaggggcgggtgtgagccggggaaaccgcgtgccgcgccgcgacagcccagcgagcgtccgcgcccgggacagccgcgatggctgtgcgctctcgccgcccgtggatgagcgtggcattagggctggtgctgggcttcaccgccgcgtcctggctcatcgcccccagggtggcggagctgagcgagaggaagagacgtggctccagcctctgctcctactacggtcgctctgctgctggcccccgcgccggcgctcagcagccgctcccccagccccagtcccgaccacggcaggagcagtcgccgccccccgcgcgccaggatctccaggggccaccgctgcccgaggcagcacccgggatcaccagttttcgaagcagcccctggcagcagccacctccgctgcagcagcggcggcgaggacgcgagcctgagggcgcgacggggcttcccggtgctccagcggccgagggggagcccgaggaggaggacgggggcgcggctgggcagcggagagacggccggccggggagtagccacaacggcagcggggacgggggcgctgccgccccgagcgcccgaccccgggacttcctgtacgtgggggtgatgaccgcgcagaagtacctgggcagccgcgcgctggccgcgcagcggacctgggcgcgtttcatcccgggccgcgtggagttcttttccagccagcagccccccaacgccggccagcccccgccacccctgcctgtcatcgcgctaccgggtgtggacgactcctatcctccccagaaaaagtccttcatgatgatcaagtacatgcacgaccactacctggacaagtatgagtggttcatgcgcgccgacgacgatgtctacatcaaaggtgacctccctgcgccggctttccagcctgccagtctccccgactcctttctctgtaaccggtcctagcccctgcccagcccctccgctgcttctctgccagcacgtgcttcgggctcccacaggccctggcccgccctccccaccccttgcatccgcccacaattcgtagcccgttcctcgtcttctgcaatctgga

SEQ ID NO: 10475 - DNA, 6000 bp, Homo sapiens
taatcccagcactttgggaggccaaggcggttggatcacgaggtcaggagatcgagaccatcctggctaacacggtgaaaccccatctctactaaaaatacaaaaaattagccggacatggtcgcaggtacctgtagtcccagctactcaggaggctgaggcaggagaatggcatgaacctgggaggcggagcttgcagtgagctgagatcgcaccactgcactccaacctgggcaacagagtgagactccgtctaaaaataataataataataattaccacaaaaccaaagtggcagctaagtgctttgacccatagggtctatctatggcaatggctaatagaccatagtgtccctagagttaactaaattggcagatgactgtgtattacttgactgtaacaacagcaatccccaaaatcaagggctcatgagcagaaggcagatgacagctgccataatggaaaatagtatttcctcataaatttccttgatctaggccagttctcaggctcagagcctattgatttaaggaaaggccaagcctttttatagaagagccctccaatgctgccaaaggtatacaagataattatttccccaatctttccacatgagagatctgtggccatttatcatagtaactctggtcagggggaagaaaaagaaccagactttcaaaggctattgggtacagagtatgagctggcatcagtgctggggggaaacactatcatggtccccccgtgacagaggctcatgaaagccaggtaaatggagtactcttgcaaacagatccagaagtctgaagatccacactgtactaatttccttatccctaagtaaataactaggacagatgttctagcaactggcagtacactaacatttactccctattttattaagagccattaaggtaggaagggccaaatgaaagcccctgacacttaccctcacctttcttactgatttattaaatgagaagtaaaaccacatcctgggtggtattgcagagattaatttcaacatcaaatattttcttctcaatatccttcagtcaggaggatgaaaaactgtttgcttttatgtaggaataatagcagtacatattcactctcttgcctctgggctatgttagttctcctctctgcacaacacagtatctagcgactttgattgtctcaatattccattgaacatcatggtagtccactgtattgatgacctaatgctaatttgacctagtaagcaagaagaagcaagaactctagatgtcctagtaaagacacatgtatgccaaaggatagcagataaaaatatgaagattcaggacattcatattgttcaacttttttcttacctttttgttctagaataagttaaatggatgtaaaagtagacaaactagtaaaacgaatcccttgaaccactattcacagcccatattatttcatctatatccccaccaacttcttctatcccatattattttgaaacaaatgggtaaagttatcagggatcagtagtcatgccaggttatcccctgtaaagtaaagacaagttattgagctctgtatcctccaacactaaggcatagtgcttggtggagtattcctctgacccatctatttcgtgcccctgaaggctttcagtttcgggtgaaacccagagcaggagagagctgtacagtgtgtccaactagagtacaagcttctctaccatttggttcatattatccagcagatacaatggggctagaggcatacatgatgaataaggctacagggcagagtctctgacatgccctaataaaagagtttcagcacagatctctaaagttctggagcaaggccatgcagcagagagatattcgacttttgaaaagcagctgtttggccccaataaaaaccaagagcctagcaatgggacatcaagggtctatgcaaccagagatacccattgtaagccaggtattgtcagagtctaccaagtcgtaagattaggcaggtttaagccaggcatggtggctcacacctgtaatcccggcactttgggaggaagctgagggcagagaattacttgagcccaggaggcaacatggcaaaaccccatctctaaaaaataaagaaaaaaaaattagctgggtgtggtggtgtttgcctgtagtcccagcaacctgggaggctgaagtagaaggattgcttgagcctagggaggttgaggctgcagtgagctgtgattgtgccactgcactccagcctgggtgacagactgagaatctctctcaaaaaaaaaaaaaaaaaaaaaaaaaagcagacttatcagcaatccatcatataataatagaacaggaatggtaaattcaggatcaggactaagcaggtcaatagggtgcatgtaagtcaacaaaaggtggctcagactcctatgacacctacctcagctatcggctataccaacccttctgtcttagctcagacctacagccttagtaggtagttctctgtaaccaactgatggaggggaaaatagcccttactcacagatggattagctttagacattgatactagttaaaaaagaaaaaaagaaaaagagattgttcctgtaacatagctccatttagggggtagccctaaacaactttgaagggaaattcccccagtgggctaagctgtaagcagtatacttgttcattcattttgtatggaggacaaaacaattccagatagagatttacatacacttgtgagcaatggcaaatagtcgagtggtacctgttcagccctcacttatgtgcaatctggaagtgcaagcagttgaccaatggagacagaactaggaaacaaatacctcctcattctatatggctctttagaagcccccagtgggattaaacctcagtaacccacagcaatggggattgagacaaggctgaggtgaggaaaaagagcaaggcacttgtctctggtgcaaatttaaggaggcaccaagaaattcagtaaccaagattaattatattttaatgcaatattttttaaaatagaaattaatgcaaatacccatgatgaacgcaatatcaaaattttcaataaagacaggctcagtattgctaattttccatttattcttaggctccactagggctccacacaacactgttactgatcttggtcatcgccaataaccatctcaatttcacagtctatgttggctttacctccctctctgttcactctcctccctagtccctcacttctgttttatggtatcattactcagaataaacgaccttatatacgttcttgtctccaactttgctctattatatggggtggagtagggagatgaaacccaagctaagtaagataatgaccataatatatcattcgaagaaggatacttgtgaaagtaaagggaggctctattaataatttcactggattaataggcataaatcagagctgtcctagcacatcaggatgtatagtcttattacaggtaggaaactgaggttccaagggggtgggaagtcctcctaagaggaggggtcagactggaagctacacaaaaagaggcagaaatgtccctccgcctcttaatcggagcctggggaaacaaacacactcgtgcaaaatctccaaagaggtgagctcttcaccctgtcaattttatctgcctcgtgaaccccagggctcaggctccaggcccgggctagctcacacaacagcagaagggccttaggtctgggcactgagccaaaaaaagggaggctgtggtccctgctttggttaccctgccgggtctgagcgccaaatcggatctcctacttctctctccctccctccctctgttcctggactgggggcaggcccttctgctaacagaaagccttccagtcggagaaagctctgacagcctgccgcgataaagggccctgggggcgtgaggagagcaaggggctcaaaatcagaacccagcgtgacgacagtgcctccatgactgtgctcccgcaatgcgcaggctccatgtcctggcgcccgcccgcccatggacccggcgggggcttccaggctgggctcagccattacgccggcgtgcgggggaggaaactcgcctcccgggcactcggttgtctcctgcccccgcccctccctccgatccgggcccatctctgacgtagtgtgaccttgctcatcccttccaggctgtgggcctgttttccctgtgcaagatgagggtcctggctgtcctgaggacgctgtccgggcgccgccaggggtgaccgaattcagctctgctaggactgttgggaaatgagctccctgtcggcgtgtgccagccgcctgcgcgaggcgccacaggagagggcgcgctcctgtcgctctgccgcccccagaagtttcccgggaaccgactccactgactcgcccctccgcgccccacgcgtggcagcctaagctcagcctccagattggaggagaccgcggagggaaccctgctggggtctgggcccggggccacgcggcccgagcagatcgagggccgacccctccgagaactcgctctctggcctcggctcctcccttgcgcccgccctcccacgtggggcccaggtctgggaatcagcgctcgggggtggctggggacaaccgagaacgagcttcttccccggcacgcgggcggaatggctgagcccagcctggaagcccccgtcaggtccttgggggcgggcgggcgcgcgaagcacagggcggagacagccgggagcccagcctcccgggctgggccgccctccccttccccgcgcccggccggggatgggggtgtggtcccaagtgtacagtggcatcaagctcagcgcgagctcccgggaacgctccaacgccttcagcctgtttcccaggaacggtccccggcttcgcgccccaatttctaacagcctgcctgtcccccgggaacgttctaacatccttggggagcgccccagctacaagacactgtcctgagaacgctgtcatcacccgtagttgcaagtttcggagcggcagtgggaagcatgcgggactacgacgaggtgatcgccttcctgggcgagtgggggcccttccagcgcctcatcttcttcctgctcagcgccagcatcatccccaatggcttcaatggtatgtcagtcgtgttcctggcggggaccccggagcaccgctgtcgagtgccggacgccgcgaacctgagcagcgcctggcgcaacaacagtgtcccgctgcggctgcgggacggccgcgaggtgccccacagctgcagccgctaccggctcgccaccatcgccaacttctcggcgctcgggctggagccggggcgcgacgtggacctggggcagctggagcaggagagctgcctggatggctgggagttcagccaggacgtctacctgtccaccgtcgtgaccgaggtgggtgccaggccgagaccgttgacccgggagtgcctgaccctccctctgcgtcagccccccttgagactccctgcgcagtgcccgggtcagcgctcccctccccctcaaacctgctgttcatacttccagcagcgggtgtgcaccccaagaaagaataggactcacgcgaggcgcattcctgggtcgtttctgtccaataaggaggtgatggagaaaggagtttgtcaccaactgtcttttcatttccgattttcacaacaaatgaagtttcctaagaacctagatgttgcgttgggggaagcgcagccccaggctacccagacgcactgcctgagtcaccttcctgccaggcatgggaggaggggtgtgagggaccttgttactgggcagggcggggccaaatcttgtctgttccctggccacagacttctggaggcatcaggaggtgtactgccgtaccatatacttgtgaggtttggggtcctttcctgaggccccagtttctctaagacagcagatggcctcctgaggctcattgggt

SEQ ID NO: 10476 - DNA, 6000 bp, Homo sapiens
cttgtaaaaagcatgcaattggccaggcgtggtggctcatacctgtaatcccagcgctttgggaggctgaggcaggtggatcacctgaagtcaggagtttgagaccaggctgaccaacatggggaaaccctgactctactaaatacaaaaaattagccgggcctggtggtgggcacctgtaatcccagctacttgggaggctgagacagcagaatcacttgaacccaggaggcggaggttgcagtgagccgagattgcaccattgcactccagcctgggcaacaagagcaaaaactctgtctcaaaaaaacaaaaacaaacaaaaaacaccatgcagtttatataacatttttacttaacacctttcccctagcaacctccaccaggcaaccttcatttaacctaaaacaaagggctttgatcgcctcgtagggcctgcattctacaggatgggctgggggtgggagcagttcagaagttcgtcatagataagaaatgaaatatctgggttggccactcccagattccttagcttggagctctgaacacacattcttcttagaccatagggtcattcttcaggtatgcataagttattgctgccaagtgcatctgtcgggtgcatctgccatacaccccttaccagaagcgtccaaacacggatttgagggatctacagcagacactggacagatgctctgaatcattctctactctgatgctgaagctataatattggactaagcttgggccttctactcttttctttctttcttttttttttttttgagacggagtcttactctgttgcccaggctggagtgcagtggcgcgatctcggctcactgcaacctccacctcccaggctcaggcaatcctctcacctcagcctcctgagtagccgggactacaggcgcgtgccacaattggctaatttttgtatttttagtagagacagggtttcaccatgttccttaggctggtctcaaactcctgacctcaggtgatccaccctcctcagcctcccaaaatgctgggattacaagtatgagccaccgcacccagcctattcttttcttaaaggaggaggccttcccttcctcaggcaagtaattgctgactactccagcctacataacgtccagacatatccaaatctgtggagaacacaaagttcttaaggtatttatttagagtcaataatcaaagtaaaactaataattatagctaatatttagtttgtagttaatatatgctaggagctcgagctaagcactaccatcccaggaaactgaggcttaaaacacttttaaaatttgctcaagctcacaagcttggaattgaagaagaaagcaattgaatattggtctttcttctatcatacatccagaggctctgcacttaatcaatacaacatactgtctcttattgcacaagtaactacaaggttcatctgtaaaattctattctgtagaatagaagggaaaacaaattaaggaattacagatgtttattcttctgagctttaatttaacgtattgtttgattcaaataatttatatattagctatctattgccacataacataatacctcaaaatttaccattttaaaacaaccaacattcattatttctcagagtttctgaggatcaggaatctgggagccacttaactgagtggttctggtccagaagactctcatgaagttgcagtcaagctgtcagtagtcatctcgacacccaactgatgctgaaggagctacttccaagctcactcaaggttgttggtgggcctcagttcctcattaaatgttggctagagacttcattccttgacatcacatggacccctcaaagggctgcttataacatgacagcttgcttgtctctgagcaagagaaagggaaaagaacacccatgatggacatcttttataatgtaattacccaagtgatataagtatcatcactaatgctgtatgcttttggtcacatagaccaatcctggtacagggatcattcattgggtgccatcttggaggcaagctaccacatctgccagggtatgaatgcatttaatctaaagttctagccctgaactgtagggttatctaccatataaatcagttttacattttttaatatgtaaaataggaacatcccaattcagaatattgcaggataaagggcctcaggtaactgattaagattctaagctctctttctcttttaaaagatgaaatttaaggctgggtatggtggctcctacctataatcccagtactttgggaggccaagacggggggatcacttgaggtcaggaatttgagaccagcttggccaaaatggcaaaaccctgtctctaccaaaaatacaaaaaaaatagctgggtgtagcggcgcgtggctgtagtcccaggcacttggaaggctcaggtgggaggattgcttgagcccaggaggttgaggctgcagtgagccaagaccacctcactgcactccagcctgggtgacagaaggagaccctgtctcaaaaaaaaaatgcaatttaaatagtaatggcattcagatagtaatcacagtgcacctggaactggacggcaccatcttaggttgctctctgctttgcgcatgtggacaagccatctatgacaaatagtttcttttcttcctaaggatatgcagcttcttttgtagtatactgcattgttttcagtccctttcaggaatgttatctgatgcccaactgatatttctcaaatgttaaaataagacttcttcatcttgtttggtctggacagaggtcaacattcttctcataaaagctttcatttcttttgaagcattaaaataatattttagcacacaaaaaaggagtttattttcaagaagctttgctttctttttcagttagttctagataagaactataacttcacataagatgttagaaggatttaagtacattgctgaaggtataaccatccatcttcaggaagtaagaatagtgaatagtaagtataaagaaacaaacaagtcctgtgataacatctttatcataatttttttaagtctattatgctttatgcaaatgtttagatttccttgttaaaaatctgctggccaggttaggttccctttctgtagctttattttcaactcataatatagtgactattaaatattctttactcaacacattatattgtaaaaatatacacttagttctgtttctatcactaagccactactattttaaaaaggaatatcttgcattgttaagtttagcagcccaaattcttaaaggccttaggaatggtgctgtccaataagataaccaatagctacatgtggctactgagcacttaaaaaatgagtctggccaggcatagtggctcacgtctgtaattcagcattttgggaggctgaggtgggaggattgcttaaacccaggagtctgagaccagcctgggcaacacagggatgccttgtctctgtaaaataaaaaaaataaaaaaattagctgggcacggtggcatgtgcctgtagtcctagctactcagcaggctgaggcaggaggcccacttaagcttaggagttcagggctgcggtgagctatgattgtgccactgcactctagcctgggtgacacagtgggaccgtgtctccaataaataaatgaataaataaatattaaaaaataaaaagtgtggctagtccaaattgaaatgtgctgtaaaatacacactggattcctttttttttttttttcaaatcctgagaacctgtgaaacacactgaattcttaagatttagtatgaggaggggaaaaaaagatcaatgatttacatataacaatgtaaaatatcaataatttctatattgattatatgatgaaatgatcatgttctggatatacttgattaaatataccattaaagttaatttcatcttttatttttactttttaaatatgcagcattgcccaataaaatacaggacaaccagttacatttttattttatatattcctgcttgggacataatatttaaaaattattcattctatatctgaaattcaaatttaactaggagtcctatatttttatttgctaaatctggcaattttattaatatggctactagaaaagttaacataacaaatgtagctccttatcctatggaacattgctgctttagaatcacctcgctgctttttttttttttccagttagcttctgaataaactctgcacggaaataactaatctgtggggaatatttaaccctaggctaggatcgttaatcgtgaagttaaatttttacatctgcatgaacaaaatggcttgttacagacgaaaatgtggaaagggcatctggactagaatgaaaagtcatagctcccagcctctctactagggtagttaacagtcccaggttcaaaataatccccgtccctcttataagattaggcggtgtcaagagcaactatctgtgagaccctgggccagtgactttctccttacctccgcccccaagtaggccttgcaaaaagctgggaggggtgcgttttcaacactggagcttcgcggccgctctcccactcgctccccgcccggcgctagaggagcgagttcggactcggaccccaaggcctcgagtcccgctgccttcctaagccgagcccgggctacctcggtcgtccccagcaggcttggctggcagaggccgggcctcgccaggtccccaggacaggccccgcccgggcctcaggtgcactcccggcccgccccgcgccctcgcgtcccgccccagctccgccttcgccggcgccgctctgcctgccagcggggcgcgccttgcggcccaggcccgcaaccttccctggtcgtgcgccctatgtaaggccagccgcggcaggaccaaggcggcggtgtcagctcgcgagcctaccctccgcggacggtcttgggtcgcctgctgcctggcttgcctggtcggcggcgggtgccccgcgcgcacgcgcaaagcccgccgcgttccccgaccccaggccgcgctctgtgggcctctgagggcggcatgcgggactacgacgaggtgaccgccttcctgggcgagtgggggcccttccagcgcctcatcttcttcctgctcagcgccagcatcatccccaatggcttcaccggcctgtcctccgtgttcctgatagcgaccccggagcaccgctgccgggtgccggacgccgcgaacctgagcagcgcctggcgcaaccacactgtcccactgcggctgcgggacggccgcgaggtgccccacagctgccgccgctaccggctcgccaccatcgccaacttctcggcgcttgggctggagccggggcgcgacgtggacctggggcagctggagcaggagagctgtctggatggctgggagttcagtcaggacgtctacctgtccaccattgtgaccgaggtgggtgccggcccctgctggggctgagaccagggctcggaggacctgtcgcggtccttgaacccgagctcctctctcccagatgcgcactggacgctgtcactccccctcccccaacggtcaacaccctagcgatggagaccctccagccaggtggcttgggaacgcttcacgaggtgacctccagccacagtgtgctcctccctgcacaggtggtcagtctggcctcccgtcctgatggccactttgaagagggtaccaggaaggtcctggcggtccctgggcgatgctctatggccctgtgtgtccaggacttactctagttggggttgggggtggtaagtagcagagccaggacttgggccaggggctatcccgtttttcctctagtctcttgatttctttttagaagagaagaaatacttctctttcctgaacttttaaaagttaaataaagcatgtgtatacaactgcctcttccctttttcctctagttactccttcccctaccgtccacaacccaaaaa

SEQ ID NO: 10477 - DNA, 6000 bp, Homo sapiens
aaacactcaaggggctgtatttggcaggtacacatgacggtcttggcactgaggagtccagcttctcatagatgatgttctgtaccatggtgtgaactggagagccataccgatgtccaactgcccttggacagtcccctttacagtatcgagggttgtacctgtgcggagccacaatccagttgtcccacttcagctgactaaagctaagtctaaagtcatggagctcacactcattttggggaagaagaaattgtctgaagtattcactcagattgaaggaagctgggcccaagggcttcttcaattcagaactgacagtttcctgacctctgcggtgacggtgatgggaagatctcccatcctcagcagcctcttctcccacaggataggcagacagacttctctcctggtcaggaccctgggaaggcctccttttatagtgaagggaataccagctgtgataagcctgagcacttgtgtcattcaaatataagatcagtgagggggacaccagagtcatgttaaacaaaccattctgtgctgaaggatgctccagctggtctttcatgcaagtaaaatttatagacatgtgaatacttctcttgttggaggccactaaaggttgaaggaggctggtcacatcaatctgaatccatttgtgtttctttccaaattcaaactgtgagttaaaggtaaatgagtatggagctctgccgagagtcctgctagaagactttggctcctttatcattagattgcacacacatttgacagcagaggaaaaagaaactgagttgttgatattgtacagcaagactgacttgagtaagtgttcaacggtagtaatgcgatccaggttaaatagcagttccactgatggaaggattcctaagaagaaaaaaaatctaccagtagtgcttgaaaatcagtcaacacaacaggcagtcaagtcaaagaattagtacttcataatatgctttctcccttctcttttccccactttctcaagcctcaaaaaaaaaaatgggggttaatatagaaaaggaaggcaattggtatcattactaattcccagcaaccttactggacattttatctccagaaagtcagatttggtggtgaatcaaagtaacagggaatcactacattctgaagtttcatttttattttttatttttttgagacagggtctcactgttacccaggctggagtgcagtggcaccatcatggctcactgcagcctcaacctcccaggtgcaactgatcctcccaccttagcctcccaagtagctgggactacaggcatgagctaccatgcccagctgattttttgtttttgtagagacaaggtctcgccatgttgcccagactggtcttgaacttctgggctcaggcgatcctctcacctcaacctcccaaagtgctgggatcacaggcatgagccactgtgctcagcctgaagcttcattctgagtaatttgctccaaacacagaagcagctgagctgataaggaaagtagtatttttctcttggataatctctagagggaaaaccataatagaaacacttatcagacttactaagatgacattctaagccctagtgaagaaagtcaatttaaaacaatgtaattggtcctagttaatttagaacacttgagattaaaaacagatgctctaaaaccactatattaaaataggatattaaggaagcagatacaactgccctgttgggttagaatggttttaaatcaagagctggtagatatatacttttttttttttttttgagacagagtctcgctctgttgccgggctggagagcagtggtgcgatcttggctcactgcaacctctgcctcctgggttcaagcgattctcctgcctcagcctcccgagtagctgggactacaggtatgcaccaccacacccagctaatttttgtatttttagtagagacggggtttcaccatgttataattttttaaagcaccacacccaactgctgagtcaaactgtggactgatactttgttcttgtaagggccaactgttcaaaacgggaactttaagcttttctctcacagaaagtaacaaacaagagaaaaatatcctatttaacacatcacaccaatagctgtaagagatgtttaaggtccatttctgggccaaaagcttggtggaacagaaagaggtgctaacattctctagcagcacttccgctcagccttgaaagccattaagtctctggtgttgctttaaaattccatcatattagcccaccttaaccaatgagagcgttaggaataaacaataagctcaagtcccagatttgtttcaactggatattgagttttatgcaaaataaaatacaattcaaggaactaggctcagctcctttctgtaattgaaatgcagaagtgtctatcatcttccctccacccagttaaccaatctgctttcacatacctgttacctggtctccaggagcctgcttgtgccgggtacagggggtgaagagccgaacagtgttgtagaggtgacttctattggatttaggaatcccttccttggtagcatatgtcttatagagcttcttcatgtagtgcaaagctctggagtctggctgcagcctaggtgacccacctcgcccaacagatagaactttgaaaagcgcgggaaggaggccagctctgtctctctcatctatatgctgcagcaaggaccaaggcatagccccagattccaactcagcactagcagcaatctgagcttctcccccagaagcctgagaaccaaggctaataggaaaacacagccaggcaaagcagcaaaaccaaaggaggaatttgttgggacgtgccatggcttgggagaactagtgaggaacatatttctccatgccagtcctcttcctaaaggccaggaagagcctagcttggtctcttaaataaatttcaggtgtgtgggtggactacggtcacttctgtaatcaggcctcaagtatgcctagctgaagattttatcagctctatatcaagcagctgataacaccttatttagccaatttgttaattagatacagatttacttggttatttagctttcctctcttttcccctggcatttacgtaaaacccgttactgttacactaccggactaactatgtagctgaaagtctaagataaattgaggaatgatcttaaataaaatctctcattttttgagaaatttggattaagatgttcgctaggtgcttgctgaaacttctaaggcatgtggaaaagctaaccaattattcatgacgatactcagatctgctggtatgcaacttatggtattaggtttactcttcctctcaatttatcctcacggccttttccacttccaggtgtttacaattgtaattattcgctgcatgttaatttgcgaatttacaaatttgggtgagaaagtcacaattggcatagaagttccagaaagcagaaaaccattaggtctctcagtcctcccaggtggctgggtacagaatacgtacttggagtactggaattgtatttgcgatgttcttaaaagaggacaccgcctttaaccttgacttatttttaaatgtaacatactgatgtccttactttggtctgcacactcatctatacatattttggttgaaaggttttgggatgtttgcagatgctataaaataaatgaacgttttattattattcatccaaatggtggtagaatttgccacaatatttctgtccttacctgtatttctgttcttgccttggagctgagaccaggctagacattatggtttaaaaaaatgaggcaaaggagcaccatgaaaagctgaaatgaggggatattcagcgccaccccgaaggagactatgctggaagagtcagcctacactcatagtgcaagatacgaagccagtttgtgcagtacctacatgagaaaactaaggtatgtctgcaaaatacaagttgactgcctgccgagcctccgtggtccgtaagtagtgttataaaacacagccaactgttgaatgagagcttagtcctagataaaatatggccagcaattccattaacaaaacactgacaagacacctcagggcgagctgtacattgacaacagcatcgtcaagcagaatgcacttcagggaaaacataataaggcctctcacccgactttccttgcttctcacgtggggagaagaaagaactggggcatcgtgattccccccaccccacgcaaaccatctggggaggacgctggctgctgtcgaggcggcctcagcattcatcaattgacgattatttgattatttttgtggctgaaactgacgaaacgtttgtattatctcttgggaacgttaacagcctgccaggggactctaaaacagagtccaagagaagccttcgatgtgtgtccctgattttggtgctggggtcgctcatggcctgaaaataacgaagccccctttgagctactggccaaggccaaatgaaacctcgtgctcctctgctgtggggcggcccggcctcggggctcagaggcgctctgtctacagctgggaagactcgcaggccccaagctcctggccagcgctgccccggaggtcggcaggccccttcctcgtcacctttttgttccctcccccgcctcccgcattcggccgcttcctgactgggattccacagaaaagccgagggctgaggagaagtgtgagcgcctccgcctgtccactgtcccccaaagtcagttcaatccccgacgtcctccgctaggctccaccccaccggcccgggcagggcctccaaggcacctcccacctacgggtcacccagtcagcccacttctttctgggacaaaggcgtcatcccttagagacagtaggaaaatggtatctcccggaagttacctcacgacctccaagagcggcttccaaccttgccggaaatgacgaacgagtcaaccggatcggtgactgtggagggcgagctgagccctgtgcgtgagtggggtctggttgtgcagtgttcgtggaccctgggaggctaggggcgccccgctgggctgggaaaggataaggagtgcaggggcaggagtctggggttggggatggacccccgcggggactgcggcgcttcgcgaaagcgagccaagcgcctgtccaccctcggtcctgcagggccgccgccacaatgggccgcgagtttgggaatctgacgcggatgcggcatgtgatcagctacagcttgtcaccgttcgagcagcgcgcctatccgcacgtcttcactaaaggaatccccaatgttctgcgccgcattcgggagtctttctttcgcgtggtgccgcgtgagtgccttgggcccgcgggagcgggaggctggaccccagcagcagcagcagtcactgcgcctcccctctgagcgctggcggccgggcaggcgctctgtaacttgccgtacacacctttctcattgaatattcctgaccgcccttaagctggtcatattatcctccccatcttacacggggaaaactgagctacagaactgaaatgactggcccaaggtcactcgggtgattccagcatgttcctctgaggtcacctttatttagttcttaccagtggtgaaatgctttgtgttaaacgtgcagcagatagtgatgatagttgcatggccttggatatgctaagaactactgaagtgtatgctttaaagaagacaagaggactgagacctttttttttcttctatatgtcttatatgtgtgctctctgtttactctcttaatttttaaagagtttgtagtgttttatcttatctacacatgggggactgaagagttcgagagatccaagaggaagaatccagctgcctatgaaaatgacaaatgagcaacgcatccggatgacggttccctgtctctgaaagacctttctctggaagaggagtctgcattgtagtgtctcaaagacac

SEQ ID NO: 10478 - DNA, 6000 bp, Homo sapiens; identical to SEQ ID NO: 3052

SEQ ID NO: 10479 - DNA, 6000 bp, Homo sapiens
ctgggtgatagagcaagagactttgtctctaaataaataaataaataaaaaatagccagctgtggtggcatgtacctgtggtctcagctacttgggaggctaggtgagaggatcagttgagcctgggaagtcaaggctgcagtgagccccgttggagccactgcactccagcctgggcaacagagggagactctgtctcaaagaataaaaaaaagcatggggactgcctgagcaagggaggccagaaaccttaaattgccactctcctagagtagcagaaatcctcatcagtgtcaccctggggtaacatcggagagtaacattatccaaggagccaaatgattttgtcccaaaccacggcaacatccacacatttatattaacttttttttttttttttgcgacgtagtctccctctgtcaccctggctggagtgcaatggcatgatcttggctcactgccacctccacctcctgagttcaagcgattctcgtgcctcagtctcccaagtagctgggactacaggcgtgtgccaccatgcccggcctgttttgcagtgtttataacatactaaaagttaatataggcccggcgcggtggctcacgcctgtaatctcagcactttgggaggccgaggcaggtggatcacctgaggtcaggagttggagaccagcctggccaacatgcggaaaccccatttctactaaaattacaaaaattagctgggcatggtggtgcgcgcctgtaatcccagctactcaggaggctgaggcaggagaatagcttgaacccaggaggtggaggttgcactgagccgagagatggcaccactgcactctagccttggcgacagagtaaataaataaataaatactgtaaaacaaaatattcagtaccatctaaaattacatttatttcatgaggttcattacttggctttcagtttgttatactaagctccattctcattaaggagaggactattgacatgtctcctattgaaactgttaattcactctgtttcttttaaactttgagtgtttaagggtgtttaacaactatacttgagaaaattattgaaataaaatttctggctgggtccaggggctcacacctgtaatcccagcactttgggaggctgagaagattggattgtttgagcccaggaatttaagaccagcaacatagagaccccatctctacaaaaaattttttttaaaaaattatctgggctcggccggggacggtggctcatgcctgtaatcccagcactttgggaggccaaggcgggcggatcacgaggtcaggagatcgagaccatcctggctaacacggtgaaaccccgtctctactaaaaatacaaaaaaaattagccgggtgtggtggccggcgcctgtagtctcagctacttgggaggctgaggcaggagaatggtttgaacccaggaggcggagcttgcagtgagccaagattgcgccactgcactccagcctgggcgacagagcaagactccatctcaaaaaaaaaaaaaattatctgggctcaatcctgtagccttagctactcaggaggcagaagcaggaggattgcttgagcccaggagttcaaggctgtaggctgcagtgagctatgattgtgcccctgcactccagcctaggccatagagtaagaccctgtgtttataaaaataaaaatttgactcattatggaatttagaggaagtaatttgctaatttctgaaaattgttcttgaatttcttttaagcagtttcatcaattcattcttttactctttttcttttgagacaaggtctagctctatcacccaggtggttgtggagtgatgcaatcatggctcattgcagcaaacttcctgcctcgttttaaatttttttaaattttttgatttttttttttttctagagacgaggtctcactatgttacccaggctggtcttgaactcctaagcttaagcagtcctcccaccttggcctcccaaagcgttgggattacaggtgtgagccactgcgcctggactctttttttttgtttttctgagacagagtttcactctgtcgcccaggctagagtgcagtggtgcaatctcagctcactgcaacctctgcctcctgggtttgagtgattctcctgcctcaccctcccgagtagctgggattacaggtgtgtgccaccatgcctggctaatttttgtatttttagtggagatgggtttcatcatgttggccaggttggtttcgaacacctgacctcaagtgatccacccacctcagcctcccaaagtgctgggattaaaggtgtgagccaccgcacctggcctcccgatctcttttctttgtttttaaatagagaagggggtctcactatgttgcccaggtcagtcttgagctccttgccacaagtgatcctcctgcctggacctcccacatgccagcccagacattttttataattctgttcaagttcagttatacggcttcctcagtttcaaggaggaatgaaatattacttggaaataatttgcttgatgcttatatcattgaatataacactataattctaatttagctcctcaaaccctttctggaaccgtcttgattgatcagggctgtgcctcatcaaattctgcacatttgttactatttgacagttatttccattattttcagttgtgtgtaaaattgttttaaggaagtctagggctcagagatctatgtctgtgcagatatgcagaagaacttcctctaatactttaaaattattaactagtggatgtccctgggatttaactttcatccaatcaagggtgaaagttcagtctgtatattctttgagctccttatgttgttgaatccaaaccgaagtttcttttgttttcacttctttttcagtattaatataaatatagtattttattatcttctaagtggtatttcacccacttccttattttgagggtgattgtgtggcaggcttagttgcagggggcccacccagtaagctgcttcaaaaccctcctcagcctcaggtgtgaactggccatgctccctgttagcaagggttgatggattcaattccttcattcatctaatcattcacttagtaagtcattactgaatgccaaggctgcattatgactttcaagggccctaagctcttttgcctttgtggctccttcctgcctgaaaacatacttaaaattatattttatgactgtattgctattaatgatgactataatccagactggatccattacaatatagcaaatatattatttttttctgaaaaaacttttttgagatggggtctcactgtgtcacccagtctggagtgcagtggcccgatcattgctcactgcagcttcaacctccccaggatcaggtgatcctcccaccttagcctcccaagtagctgggaccacaggcacacgccaccaagcccgactaatttttgtatttttagtacagtcagggttttgccacgttggccagactggtctcgaattcctggcctcaagtgatccacccatctcagccctcacaaagtgctggaattacaggcatgagccaccgcgcccagtcatttgttctgattttattttatttatttcttttatatatgtatttttgagacggagtctccctctgtcgcccaggctggagtgcagtggcatgatctcggctcactgcaatttctgcctcccaggttcaagcgattctcctgcctcagcctcccaagtagctgggattacaggtgcatgccaccaggtcaggctaatttttgtatttttagtagagacggggttttgccatattggccaggctggtctcgaactcctgacctcaggtgatccgcctgcctcggcctcccaaagttaggattacagacgtgagccaccgctcccggcctttttgtttttttcttttcttttccttttttttttttgagacggagtctcgttctgtcgcccaggctggagcatctttagcatgcgaggtggtcatgaacgacaaggagaaaaaacaaggtgaaggggaatggggagtgttggcaatttagatagaatgtgcacgaaaggtttcaatgggaaattctaatttgaataaaaacgcacaaaacgcgaggaaagcctaggaacacatcagccgtatactttgccgtagagaagttaaggatgaggaacaggcaccaagaacaaatcccagcgtaaggctccctttaagtgcggctcccagggttacgtattcccattgcctacaggcgaggccgcgggtctgtaaacaagcgactgccgctgcaacctccattttgcttcctggcaccaaatctaggctgacctacttactgccatccctttcccactcccggttttcttttctttctttttttttttctcgagacagagtctcgctctgtagcccaggctggagaacagtggcgcgatctcggctcactgcaacctccgcctcctgggtccaagagattctcctgcctcagcctcccgagtagctgggattacaggcgcgcgccaccccgcccggctaagtttttgtatttttagtagagacgggtggggggaggggggagggggtcaccatgttggccaggctactctcgaaatcgtgacctcgtgatccgcccgcctcggccttccaaagtgctaggattacaggcgtgagccaccactcccggccctgggtgctggttttcttcacctccgagtgaacagcagagggggctgttgggtgagggccagaagagttggggaggcacgagggcgtccagcgctgccctcactcaagatggcggccagagcctcgcgcttggtcgcgtggggcggtgcgtgagtgcttagctcacaggctccgggaccgcgctcgggggcgggtctatagtgggaaggggacgcgcgccctgcggcccggcctctagtcatcgccctcgcagcggcggccaacatcaccgccactgccacccctcccagactgtggacgggaggatggagtcgatggccgtcgctaccgacggcggggagaggccgggggtcccagcgggctcaggtctgtcggcttcccagcgtcgggcggagctgcgtcggagaaagctgctcatgaactcggaacagcgcatcaaccggatcatgggctttcacaggcccgggagcggcgcgggtaagagcctcgatttcccctcagtctcccgcccatcaccttgaatcttcagggtcattcttccctctcccacctccactcctctgacctttttgaccaagccttgctctttgatttcctctctgtcccgccccttcggtgatatcccaagttctcatccctgaaccccaggatgttcctagtcgctcccctcaattttcccggggcctcgccgtgagattttccccaccctgcctgcagagctctcactccctcttcccagttacgttgaacagccccttttttccttagccactcctcgcctttcttgaagggcgcacgttgtatccccagactgtcatgtctactgctccccttaggaagatggctttccttcttaaggttccaagtgcttttccttacagtgccttctctagcgtctaccttcttttgccttttgctgtgtaactcctgtccgcccacatcagcctgtctttactgaactgcccgctagttcatcctacgtgtatcagggactcttgtgctcatatcctagtgtttgtgttcagtgccgtcaacactgtcacctacgggccggctagaaaaggtgggaaaagtgagagtgagcattcttcagagacccagcaagtgcgaagtgcacacctgagagtttcctctcctcatgaggggatattgttgtgattgatgtctggagctgcatttctaaggagagcgcctccttcctcccccaaacacatgtccaatgattttctttaaaaaaaatttatttcacgtgagtataattgagcaattagcgcgccctagtgt

SEQ ID NO: 10480 - DNA, 6000 bp, Homo sapiens
gtctggcgtccattagccaagttcaagatgggaccagaaatttgggaattgtctataacagatggtactagaggcctgggagtgaatgagattacctagtggagtaagaagagaagagggtctattgtactgtaaaatgaatacacactttatgtgacaaacagatttgctaattcgttcttagaaattgctggcatatcaggagaatacatgtgtttttaaaataaacacctgtatagcacttactttgtgtcaggaactgttctaagaactttgcaagtctctatgcatgtaatcctcataattctattaagctgatactacagttatccccattttacagatgaggaatctgaggcagagattgggttaagaaacttgtgcatagttatacaggtagtgagatagtctgtgttcaaacaaagaagtctggcatcagagttctcatgattaagacttcatgtagttaaagagcttcctagagaacacaaaattttcatctctttcccctctcctcaattccataacactttcagattttcacctgctgctctggatttgtggtggggtacacatgtggtttggcttatctgagactgtctctgaggatgaaaattgagaaggtagaaccccggaggttattcaagttaacttggggggtgttcgccatcaggagaaacagatgctgtttaagtcaggaagaaatgagtgttcgctccaaggcctgcttcagaaagcctctttgttttatgactctgggtgcaagcaacccttttaattttgtgtcttggattccagccataggaggccttctttaatgtggcagatggctggagacaggcaagccaggtttctagactctacattaagctgccttccctagagaggagtctcctaattatgttgctctgaaaaagagaagaaaagataccttaaaatggacacattaaacttataccacgtgtaaagtaaccactgtcttaagcatctgcaaacatgtggaggtcaggaaacctttgagaatctgatgaaagctataggctttttctgcagaaaatttgtatgtaggtatatacacaaaaatgtgcacattaattcccgggggtggggtcacagattctctgatatccgtccctgaagcttcaaggagtctgtggctgccagattcctgtgctttgagtggaggcagctgtcattcttttactttttcatttttcaatacattatgatctcaacttctgagctatgaaaataaagggtctgtggattataagggaagcatttcacaccagaacaccaaaattttactggaaaaaactcctttcaaatattggataaaattacttttgcatattctctggtcagcatggaaggtttgctcattctgttaaagactgacatgaaatctcttctgacaaacatgatgagctttttcttactggattgtggggtgcgcctctgcacatcatttccttggaacctcactcatctcagaactcctcagttgagttctggcttctgcactgtttccaatattaagaattgggtgcagtgggcagtctgccaattaaagaataacacagaattctcagaatttggaaaggaagctttattgtttccaaggactctgctggaggagtcatacaaacttcgccatttcttcctctgatgtccatgtgccatgattgtctgaggaagggagaaaaagtctttgaagtggctaccaggatcctttgcagatctctgggatgtcattcactcatgcttctatgctgggtgactcctaccatcatcacattcttccaattctcccagtagggtatgcagtagtcatgtaggcagagccttctgagctacagcaaactacaaaattaagatatttattaatgattttcaaaccaaaaacaatttgcctcaattactagacattttaaaattaaaaaatacagaaatgtttctaaattattccagttcttcatcttccatatattgtctcacctttcctgaaagttgcctccttcttagacctgaaaaactcaaggagggagtaggtcatgggctaaacatttaggctaattctctacatgaaattgataatataaatgattattgaaaaaattcaaaggaaaggatcatttcttctgtaaacatcaacccaacccaagaaaaactatttgggatttaaatcagggtttctcaaccacagcacaactgatattttgggttgactaatttttggtagaaggaggctgttctgtgcattgtagcatgttcagcagtgtctctgacctgcaacgcctagatgctagtagcaccgccctcctagttgtgacaaccgagaacatctttaaacattgccaaatgtttcctgggggtgcagtcacccctggttgagaattataggactaaattgtccagaaataggtttctctacaagtaaagtaaaattgagtattggagttgcttttatctggtcttcttgatcaggtgaatggctaaatgaaaaaagcagtttgtctattttgatgccccactgactatgtctatctgttcagatcatcctgttctacatttgttcttagatcccatttgattgccaaaaacagggacttccttacttcattcttatggttctgggattcctgttcatttgctgttttataatgtttttgactgtatagatatttagtgatccctctgattttccatagtctttgaggtctaggtaatttcttagaccttcggaaggctgctggtgtggtactaaaatctccattcctctcttctatgttatctcttccaactttagacctaaactgagctcaaatagcaagttggagaggctggagttgctggctgatttgatcagtatgtggacacataacttaggaagcaaaactgttggctatgagattacatatgtgattatgaaaaggaatcttgtaatcacaaattcttctgacgtatgtacagtgactgcaaaacagcaaataatttgttttgggaaggattttattggctgtttgaagtgaggagtatctctactatacaaaatatttaaaccaaattgttatgtcctataatgttcaacaaagcactctgcaaacatcagttctggaaaaaaaaaaaacgtatcctccaaggcaggattatatgcacttctgggagttgtaaacccatgcaggctccagaaatatttgccttccaagggctggaaacttctgaattaacaacaaataatcagtgagtgtgacaaagagttaaagtacacagactttactttctcaaagtttatgatgtagtaaagaagtttaagatggagacctgaaattgcaaactggtggccagtaggctaaatcgggaccatggatttgttttgtttggcttgcatgtagttggcctccagaatgtctaacagagtgagaggaagggagcggggtggggggcgggcaggagacaggcaaagagagagaaaaatagaaagaagttgctaaacagatataattgagattttcacataaaaatctaaatttccagctttgcttgaaaaatcagaatatctgccaacactgggtccttattcccacatttccctatggtaacagttggctggaatgaaatagcagtgacccctttggtctctggaactagacactcactctctggtctcttcccccacttccccttcactcctttactagccctctgtcaccatttcagatggccacccctaatgcagagacttctggacatttatttagtttcttctccacagaaataaacttctagagcctggagcaaaatagtggctgcgccatttgtgtgtcagatgagatgaccctggctcgggccatggaggtggcaattgaggtgtgagaaatggtcagatttaggataaattttgaagaaagagtcagtagaatttctgatggattggattagggtgtcaaagagcattccaaaatgaccccgattttgatttttacttattttaaaaagaaaacctataatagaacattggagagccagtattgaccttttcaaataaaaacaaaattattcaaaagctttttcttactagtactattcaaatcgggtaccctatgtggtaccaatattatattctaggaaatactgacggttttggaaatttggaggaaaaagcatcgagaagagctccaattacttagaaaagagagtccaggagatggggtggtgtatataagcctatggatggtgtctctgcaactcagtggccccgcctgtccaggggctgggtccccacgggatctccctccccacaaggaggtggagaggctatgtgtcttgaacaactggggttgcgatccagtgtatgggcagtcccactcctggaactccagggtgggcactcgctccatttccacaggccctcaagggttccaggattgccccgtgggaggggttttagtgctgcatctagtaagaagctgtaagatgctcagaaacatgttttgaagctactttgcacagaaagaagactcttcattcagatttgtattacagatcaataaaagtagctaagtcgtatctgaagatgtttttgtttacactttgtatgtgacagaaaacctccagttgtctgtgtcaaggacaattacttaattttattacaatgtatactgatttggttagtggaagcttctagcgcctactgtggtggtggtgggagctatctgattcccattcccaggcctggccatcgacgcgaaggcctccagctgatcggaagtcggcgttggccggcgcggagcccggcgcggaggcttctttcagccgcccgggcaagacacccctccctcggtcccgcagcggtcactccgcctctggcgcgcatgcgccgaccccagcgggcgtcctcccgggctccctctccctccctccctcatccgggtcctgggcgagcgggcgccgtgcgcgtgtcccgcggccgagctgctaataaagttgcagcgaggagaagcgcagcgacggcgtcgggagagcgcgcctagccggctcgcgagtgagtgagggtccccggcgcgcgcgggcgaggggaactgggggctgcaggctctgccccggcggactcgggccgaggcgggggcgttcggccgcggacggagcggaaacgacccagggcctgtcgggcgggaggtaggccgagtcctggcctgccggggtcccggctggcggacacggtgcggcccagcggctgcggaggcctcgctggctgcccggggcgtcctgaggcggggccggggctggccctcgtcccagccccgctgttaccgcccagactttggagggaggcgtctgggacgccctggaggggaccccctgaccccgcgctgtcctggggagcggtttgctttcctaactcatcggatgtaccaccctggatacacacccttgataggactgcggtgctcggccgggcagcctgggctgctgcactgcgaagctgtccaatggcttgatgaatccgtgccgccgtcgctttgtgtttcaaagataaggatccgcgcttatcggtgggaattacactctgggcagttgtgaccggctactgcaatcagctggtagttagacctggtttctgccacttgccatgtcagttttcaccactgcaaggatttcttctacttcatgtaaacttctctgtgctgcaaagagaatgccaaagcagcgtctttttgccttcaccatattcagccgctggccgggtcctatacttcaatatcagggctcaaattaatattccagtctcttcccctccccttttcccctctcctcctttcagctgctgttactacgtggagtttggagcctaagctttgaaaactcccatgtggcgcgcccgtcttaagtctgagcatgctcagtagccaaaacagatttttggttgcagaactcgggcgaggatacttggggtatttggacgtttgccggcttcccaacagaatgttccggttctgg

SEQ ID NO: 10481 - DNA, 6000 bp, Homo sapiens; identical to SEQ ID NO: 2373

SEQ ID NO: 10482 - DNA, 6000 bp, Homo sapiens
ccagctaatttttggatttttagtagagacatggtttcatcatgttggccaggttggtcttgaactcctgaccttgtgatttgcccgtctcagcctcccaaagtgctaggattacaggcgtgagccaccacacccggccaacatcatgagggaagccccagcccttgatgaatcctaccaaattccttttccaagcctgtcaaatgattggcctcaaagatgtgaatcacattttgtaagctttgctcaaacctttgaaaaacagaaaataacatacagatgtaagattgcagttccactttcacaatggctatttaaacattttccttgcctgggcgtggtggcacacccctgtaagtcccagtacttgggaggctgaggaaggaggatagcttatagcccaggaattagaggctacagtgagccacaatcaagctactgcactccatcctggatgagagagcaagaccccatctctaaatatataccctgtctctaaatttataaatatgataaaaaatacataaatatataaatttccttcttgcagctccagctctcaacagaagactttctcacagagtaaattgatattagctgactataatgtccatgtcttccttctaccaatctaatgaaatttcagcactgtctgctccatacctcctgttactgtaaaggaaattatctttcttccctatcctttcaggaacctctattatggattatcccatctccttgtctttccaacaattccttcgttaagatatccttactgccaattcgttgtgctgaagtccctcacgtagtaaaacaaaaaacccttaatcctgctttctctcctctagtctcttcatagccaaaattttctgcattgagtactttttgtcttccttcttcccatattcagcctttccagtctatttcacgcttcagtggaagcaactctcaatgttacctgatatccatgttgctaaatcttgtagatgtcattggtcttcatcttgacctcttggtagcatttgaccctgttgatcactttgtccttgaagtattttgttgttgttttcaaggcaacacaatttctgtgctttccttcctctgccttcccttcatatatacatatatttgcttttctccccctacccctgtccactaagtttcctttgctatacttgattaaagttcctcaaggattggcgctcaggcctcttttttcactgcatccacttaaggttcttttttttttttgagacagagtcttgctctgttgatcaggctggagtgcagtggtgtgatcatggctcactgcaacctcagcctcccaagtagctgggattacaggcgagcgccaccacacccagctaattttttatatttttggtagagatggggtttcactatgttggccaggctggtctcgaactcctgacctcaaacgatctgcctcccaaaattctgtgattacaggcatgagccactgcgcctggccgctcttttttttttttttttttttttttttttaacagggtcctgctctgttgcctagctggagtgcagtgccaccccctcccaggctcagtcgatccttccacatcagccacccctgaccctgtctacccctgccccggagtagctgggactacaggtgcgtatgccaccacgcctgggtaatttttgtattttttgtagagacatggtttcaccatgttgcctatgatggtcttgaactttctggcctcaagcgatcggcccactttagccttccaaagtgctgggattacaggtgtgaaccactgtgtctggctttaagtttatttttcaactcctgttacttcgtttacggcattaacttgtaaatttgtcactaacccacaatctttccctgggctcaagacccatatataccactccttaccttaaaattcatgtgtccccaactgaacttgcgttggatagtattaaataggacttgtattacccagtttatcttagattctgcatttgaatttgtaaccccagggaaatggccctttcctacatctccagccctttttaatgtctatgcacaggaggctgaggcggaaggattgcttaaacccgggacgcagaggttgcagtgagccatggtcacaccactgcactccagcctgagcaacagagcaagaccctgtctccaaaaataaacaacacaccaaaaattctgcagtttcccaaagtctacctcagagttttcacacattctgatccctctgcctggggatgctttattcccttcacctagttaattgcctactcgtcagatattagctcaaacctcagtttctcaggaaagctcctcattccctcagattattcactcgtctcaaatacatatttattggtttaatgtctgcataaagtgtaagctccatgagggcagtgcctttgtctcctttcctgctctttggctgaggcctaatatattgacacagtaggtactcaagaaatatttcttgtatcactgactaaattagattgagataaagtaatattgtgaatcagtggcttactacttattttgtagataaaacaatttaccctgtcttgagatggtaacttcatttttttttgaaacggagttttgcttttgttgcccaggctggcgtgcaatggcgcgaccttggcttcaccgcaacctccgcctcccgggttcaagcgattctcctgcctcagcctctcgagtagctgggattactggtatgcaccaccatgcccggttaatttttgtatttcgagtagagacggggtttctccatgttggtcaggctagtctcgaactcccgacctcaagtgatccacctgcctcgggtttccaaagtgctgggattacaggcatgagtcaccgcgcctggccaagtaacttcatttttatggctatgccatttcaggtagtgcttcgttgaggcatcaagactccactgaccagctttttcactttattgaattacataaccttttttttttttttttttttttttttgagacaatgtctgactctgtagcccaggctggagtgtgcagtggtgcactaggctcacggcaacctccgcctccggctcaaacgatcctcagccccgtcctccgtaccaggtgagtagctgggaccacaggcgtacaccaccacgcccagctaactttgtgttattattattattttagtagagacggtgtttcgccacgatgcccaggctggtctggaactcttgaactcaagtgatccacccgccaaggcctccaaaagtggtgggattacaggcgagatctaccgtgcctcaaatcacataaccttttaatgtctcagttttgtgatctaccaaatggtatcccacagtagccgcctctcaaggttattgtagggttatgtgtaaactgcttattgcattgcccaccttatagaaagcactccatattataatcattaactgtgctggaaaattcccaactctccagatgcggagttctgcaaggatggttggggagagagttgcagccagattaggtctccaaacaatttacttaagcctctgaaggccggagctcaaatccctccaacccgggtacctaaccagtacctcagtcccaagagtgtattgcattcagtcaaattcaccaaaaggcggcggtggtctttaggaaggaaaaggctcgcggtcctccgcctcaacgaccctcctgcacagaattcctgattttaaaaaccagctggccactttgggaggccgaggcgggcggatcacaaggtcaggagatcgagagcatcctggctaacacggtgaaacccccgcctctattaaaaatgcaaaaagaaattagccaggcgtcgtggcgggcgcctgtagtcccagctactccggaggctgaggcaggagaatggcgtgaacccgggaggcggagtttgcagtgagccgagatcgcgccactgcactccagcctgggtgacagagtgagactccgtctcaaaacaaaaaacaaaacaaaaaaaacagctggctgggcgtgtaggctcacgcccttaatccaatgctgagaggcggaggcgggagcactgcttgagccaaggagttccagaccagcctaggcaaaataacgagacaccatctctacggaaaaaataaaaataaaaaagttagctggccatggtggtgcgagcctgtagtcccagctactggggaggctgaggtgggaggatcccttgaggataggagttcgaggctgcaatgagccatgataacgccagcgcactccaacctgagcaacacagtttatttatgataaataaataaacatacctaaataaaaaccagccaaaatggtatcgttttccctttgtggccccaatatctggcgctttccaccattccttggcaaacagaacaaccagagagcataaaagtcgagtctaagccagggactctcgcgaatcccttctaaggcataccctatttaaactttgtattatgctattcaggaggttgacaaacagccttttcgggaatgggactcgaactcgtaagccacgtctgttcctccatttcccgcctcagctggatgacggagagggatctccgggattaaagaacaacgaccgcaggcgagtgcacgagcgaggtgcgcgcgctgagtagggggaggggcctggcgcgcgccgaaccagatcgagggggtgggggcgagctctctcgcgagagtgggtttgttcttgggctgcagccgctgccgccgcttctcgccagcgccgttgctgcgggggattgtgggagtctccgcgtcccgctcgctgggagagaggtacctctccttttccctctccctttccctaaggtaggcgtgaagcgggtaagagtcggggtcgggtggctgggggttctccgtgtccgccgggaggggacaacgacggcgacaggggctgcggggagccggcggcgcgcctttcttgctcgctcccgctctgcctccctccgcgttgcgtatgtgagccgcctgatcggcggccgccatgttaggagcgcagtggcggcgcaaccagccttctagggcggcggaggtgagcggtccgggagggaaacacgcggccggccaagggcccagggtgcggcgggagattttgggtgaagaggtgcgctgaccggccgagcttcctgcgcgtcctgggctcgttgtgggcgggggcgggacgactagcccgttacacgcgggccgcggcgctgagggggagggaggagctcgctcgaggcctgagggacagactgtacactgggggcttgccgtttgaggaggatggttaagatatctaagtccttgggtagcgccagtgccaaataacccgttcgcctttttttctctgaaaatgttcccccaaaatggaggatttcgcagactctgaagagcctgcttgtttgagcagcgtttctttcttttcccggtgtctcggccttcacgccgctccttgcccatcgcctcagagcgccccctaagactcccggcccacacgcgcgcgcgcgcgcggcgttagctggacatcagaaacaattcctccccgccccccatcgcgtaaaaatggccgaaaaatgaaacgttaacgcttgtttttcgtactgcgtcgtggaacaagccgcctgcagtacagtgcgaggcgggtgatttgcacttgtttagtcaagtcacctcacatcctttttctctttatcaaaatagtattagtccaggttcctccagagaggatcgtgtggtgtgggaccttccggtttccagacaaagggttttggagtaccgtggtgtagtcgccgcatcgttctttgcatttcgagctctgtgccatgttctgtgttcggcatttaccgtggatgaatatcccctaggtgtttatcctgctctgtggccctgttctgtggaatattcctattggatcagttacagttttttagccagatatttctagaacggttatggtggttctga

SEQ ID NO: 10483 - DNA, 6000 bp, Homo sapiens
gcaagacccagtctccaaaaaaaaaaaaaaaaaaaaaagaaaagaaaacttaaatgtattgagtgcttactatattttaggcattgctctaagcactttttttgtttgtttgtttgttttgttttgtttttgagtctcactcttgttgcctaggctggagtgcagtgacatgatctcggctcactgcaacctccacctctcgggttcaagtgattctcctgcctagctgagactacaggcatgtgccactaggcccagctagtttttgtatttttagtagagacggggtttcaccatgttggctaggctggtctcaaactcctgacctcaggtgatccaccgcttctgcctcccaaagtgctgggattacaggcgtgaaccaccgtgcccggcctctacacactttatacacgttatctctaattctcacaacactcctctgaggaagttagtatttacaccctagttttataaattgggcttaaggaaattgcacaatttgcccagctcgttgtaagtaaacctataaatgtgataaaattgcataaagctacacacatacacacatgagtgcatatggaaattggtgaaatctgattaaggcctgcagtctatttaacaatatagtacctatgtcatttttctggttttgatattgtactactgtcatgaaagaagttaccaccagacgaagctggatgaaagctggagatttgcaatttcttgtgaatctataattagactcacattaataaatattttaatttatgtttatttatatatttattttttaatgagtgaaacaataagtttgtttttgttttgttttgttttgagacagggtctcgctctgttgcccagactggagtacagtggcacgatctgggctcactgcagccgcaacctctctcgggctcaagcgatcctcccaccacaacctcctgagtagctagcagcacatgcgtgtgccaccatgccctgctagttttctgtattttttgtagagatggggttttgccatgttgctcagggtggtctcgacctcctgagctcaagtgatccatccgcatcagcctcccgaagtgctgggattacaggtgtgagccaccgtgcccagccaataagatttttttgttttgtttttttaaagtgttaaaaaccttgtaaggggctgggtgtggaggctcatgcctgtaatcctagcactatgggaagccattggcttgcacccaggagttcgagaccagcctgggcaacatatgagcccctctctacaaaatatttaaaagttagccagacttggtggcacgtgcctgtagtcccagctacttaggaggctgaggcaggagggtcacttgagcccaggagtttgaggttgcagtgagctatgattgctactgcactccagcctggatggcagagtaagaccctgtgtcaaaaaaagaaaggaagaaagaaagaaggaaaatttagattcagcaaagataaacctcttctccacttgccgaaagtgagcaagccaagcatcctattcctgaggccacttcctctcacttaaggtccagtgtactgcatgaaagtatgatttgaaccttggaaataatctaccccaactgtctccacttacatgtaagaaaatggagccttggagaagggaagggtcttactcaaagacatccaataagtctgtgactaagccaggatgagaacccagtctttgaactcctaggtcagggttttttccagcgcccacacacagggctgctcacccacacagcacatcttccctgggccttgtctgggagaccactggtgcccacaggccaaccctcaccagcctacccagcccagggcactcaggcccagaggtggaagtgagacctggggagggtggaggcatggtggccccctattccaggcagcactgtgagccagggtagttggggccacagaaagggcaaggatagacactctgaactttggcaggagttgggtgggaagggaacatgtatgtatgtgcatgtgggggaggtactcacgccaaatccttgctcccatccccctcaggctcctttgagtcacttgtccgtaaggttggggcacattcttgaagggagtggtcacaggggttcaaggcccattcagtccgcaggccagtttctattcctcctggcactgaaaccacctcctcactcagactcagcacccctccccaactggaaatatagtgacatgctcttctaattcctgccctgggacctccttggaccagacgcgaggctgggggtagggccggcctgggtgccctttctcaggggatggattcttggtattcaatatgtggggtgtggctgacctacattcagatgagcctgattggccctcccttccccatcctgttgttcttccccaaccccccatctctccgggccattccgcggtgggccagggcaaggctgagggtttaggatctctccctgccatctgggcatctccatctctgcgccccggcaggtctgcagccactgggcctaagggagcggccctagcaatccggtctgaggggagcagtgccctcgtgtggcctccaggagaagcgcggctcttttctcagcccggtcctttgtatgctctcattgaacaagtatttattgagagccactacgtgccaggcgccgctctaggcgccgcggccaagacagatacctgctccacggactgtgcatttcagcgtgtgcgtgcgtggacagtcaggcaataaatgataaacaaatacataaatgaggcagttactagtagtggtaactgctaggaagaaaataaaacagagaaatgtgatggagagtgacccaagagagaaacttagggtaggatgggccgggcgcggtgctcacgcctgtaatccctgcactttggaaggccgaggcgggtggatcacgagttcaggagatcgagaccatactggctaacacggtgaaactccgtctctaccaatacaaaaaaaaaaaaaaaaaaaagaaagaaattagccggacgtggtggcgggcgcctgtagtcccagctactctggaggctgaggcaggagaatggcgtgaacacgggaggcggagcttgcagtaagccgagatcatgccactgcactccagcctgggcaacagagcgagactccgtctcaaaaaaaaaaaaaaaaaaaaaaaagaaagaaacttaggataggatggaaaaggaagatttccgtgagtagctaacgtctgagatgagacctaggtcacagattgtcatgtaaggatatgggggaaaggctttccttacagagaaaatagatcctgcaaagatcctcaggcaggaacaggttttgcagaacaggtgaaggccagtgtggttagaaaggagtgagcgaggggaggctggtgtgagatgccgtcagagaggtgggttggggccagggtgtgaatcttgcaggccacgacaaggagcttgatttttttttcttcttcttctaggagtaatgggagtgtgttgggtgagtattgaaccgaagagtaatgtggctcaactgccttttgaaaggacatgtatggtgtggaggatggactttgggcaagggaggaagagtggaagcaggggggttattacaagagaccaggaagctactgaaataattcaggtgagaaatgatggttgtttgaatcagggtagcagtgctggaggtggggagatgtggttggattatgggtatattttgaagatagagtcaacaggatttgcaaataatggaccacattttcctttgctcatttagctccaggaactccttcacttacaccccctagtgggctcctccatcctcacagggcagatcccagggacacagctaaattagggaattcctaagtgttgttggacaaaagaatttaagactcgttagctgggcagccaggcacagtggcttacgcttgtaatcctagcactttgggaggctgaggcggatggatcacctgaggtcaggagtttttgagaccagcctggccaacatggtgaaaccctgtctctactaaaaatataaaaatcagccaggcctggtggcacatgtctgtaatctcagctacttgggaggctgaggcaggagaatcacttgaacccaagaggtgaaggttgcagtgagctgagatcacaccactgcactccagcctgggcgacagagcgagactccgtctcaaaaataaaataaaataaaataaaagacttagctgggcatggtggcgtgcacctgtagtcccaactaccttggaggctgaggtgggaggatcacttgagctaggaggtcaaaggtgcagtgagctataactgtgccactacactccagactgggtgagagagtgagaccctgtctcaaaaaaaaagaaaagaaaagaatttaagactcagacactaggtcttccaccattatcccatttaatgggcaggtcctctgcctgctatctcccttaccctgtctggcttccatggactcaattatttattaggtccctgtttgtccaaataggtgtgtctgtggccccaggggtgtgttggtgacacccaaaacagtcctgggtgtttggtatttatatttgatacaagtgaggggggcagcaaaatctgggggtaccaagtcctcagacccaagccaatcatttactcctgtttctttacacaaaacacagtgggatcagacctgataccacaggaaatgcacatacacattttggccccaggttgggcatttctggagagcctgggaaaggccagactagtcttacaaatactcttatgccagcagggggtggggtaagcaagtaggggagtaggtgaccggtagagtctggagtcagcaggccttgttctgtttgtgttgtgctgcagtgggggatgcattataaatgcaaccagccagagggcccctggcttcagaacctaggactgtactggttctgagattctgtgcaagcctcatggaaatgaagctgccaggccaggaagggtttgaagcctccagtgctcctagaaatattccttcaggggagctggacagcaaccctgaccctggcaccggccccagccctgatggcccctcagacacagagagcaaggaactgggagtacccaaagaccctctgctcttcattcagctgaatgagctgctgggctggccccaggcgctggagtggagagagacaggcaggtaagttggatgcaggccagttctgtgggatccttccccttccccagctggagcctcctatatgtcccccagcgcttcttatggggctgcccaaaattaggattttcccagctgtgttcccttatttcagggtcttaccttccatgatgcccagcctcctctgcagtctagttttgagatccccaagaccctagatgaggggtgactgccagggtgggggggagacttcacaccactgggcccaggatgccctcattgccttgccttccctagctcctctgcatctctgctcctggacatgggagaaatgccctcaataacactgtctacccaccttcatcacaggtgggtactgtttgaggagaagttggaggtggctgcaggccggtggagtgccccccacgtgcccaccctggcactgcccagcctccagaagctccgcagcctgctggccgagggccttgtactgctggactgcccagctcagagcctcctggagctcgtgggtaggctgggatcctttgcaggaagggcctgggtagccatgccttttccccaggatttcccctccaaagtcttgaaatcttccagagcccatccctacccctcctaggattgtctacccttgtcacagggtggacatggaaaagcagggtggaggagcaagttcattggccctggcattctgagactcccagaagggaaaggtgtctgggcagagggagaaggggaagagtgtgcggcagggaactctcaggaaggagatgacccccaat

SEQ ID NO: 10484 - DNA, 6000 bp, Homo sapiens
tgtcttgacttctagtgagaattataaactgtatattaaatagatattttttgggtgctgaatcaattttatttaaatttgtgattaaagtgacattgaatttctgatgctatgctgccataacacttgaaaaccaatttagttgttagtcattcattaaacattaacatcactatcatttatttattgctaaatgatgcatagtattttagtctacttgtattgtttataagaaacccaagcaaaaatatatagcaattgttaccttgttaagtttgtagttctctacatttctctggatggagactgtgaacatctgattgttcagcaaccttcagtatctattattttaataagaaagaaacttcccctaaactttagaaaacagttgctccactttaggaatcaaattatgtcaataaatgttataaacacagccttcatttcaacttatataaaatatgttttaaaatgcctgacaatgtagataattcaagaaatgttgactgaaattttgtctacacttagaacattttttgaaattcagtttacagaaattggagaaaatgctttttaaacaagtgtttcctttcttcaagaagatattctccttttaattgaaattttctccattcagtgataaaatgatcagccatgtgaagattcgaaacttcgagttcttttgaaattcagagtctgtaacttaaaacattacccttatgaatttagatgagaattcacttgttctgtcagtaatccataagacagaaatctgtttttttaaaaatatctttttctcctctcagctcatacataacacaaggcagaaatctggatatgagatttgcctctttaatgtcactacatgttatgtttcctgaattgtagtatgtgactttcaaaatggtggttttccacactctacctttagtgcaagctatttgtttgttttctaatttatagttttaaaaacttcgcttattgagtttttgttatgtggtttatatttttctttctctttcagctattttatttaatattgtgtcagatattttacaaggtatgacctaattaaaaactcagtagagaaagatcagaatggccttgagaatagagccacaaaaataactatgaaaatgccagtaacgtttatttaaaacaaaatattttaatttttaaattttcccttaaaacacacttttggaatatgctacaatattacatgttttttgtctttttatttttctgagacggagtcgttttctgccacccaggctggagtacagtggcatgatcttggctcactgcaacgtctgcctcctgggttcaagcaattctcctgcctcagcctcctgagtagctgggattataggcacatgccaccgcgcccagctaatttttgtatttttagtagagatggggtttcatcatgttggccaggttggtctcgaactcctgaccttgtgatgctcccacctcggcctcccaaagtgctgggattaaagctgtgagccactgtgccaaggcttttttattttttttttttgtcattttctttcaaaacttgagtggtctctgagctcctgtcattaaacctatctatatctgtctatcagcacaactcaccttgaatatagtcttatactttcaagtatctttgtctttgcacgtttttcaagtttcatgtgccatttaaacttggacccaggtatctgattatttgatgtgaatagagggatgctacagatgtcatttgtctcccgccctaagtcctccagtctccttagagctagtacttactaagcatttactatgtcatcaataatcataaaacgtatttttttttttgagtcagagtctcgctctgttgcccaggctggagtgcagtggtgccatcttggctcactccaagctccccctcccgtgttcacgccattctcctgcctcagcctcccgagtagctgggactacaggcgcctgccaccatgcccgcctaatttttttgtatttttagtagagatggggtttcaccgtgttagtcaggatggtctcgatctcctgacctcatgatcctcccgcctcagcctcccaaaatgctgggattacaggcgtgagccaccgcgcctggcctaaaatgtgttctttattattgacggctgtattgatgggattggtaatttagtccttcatattaatctctattctctctcagagtacaagctctcatcatatgcaaattctcagaagggctgtgaacaccttagtaataaatttatcttttgaggtcattagcaaacatgaactcacagggatccagagatggtaaaattcaaaacagcctgtcaagttcaaaacagagaggtgaaagcagaagagacactttcctattttgcctaataggtctccttatatgcatctgtagttaacattcctcaattcaagttagaatcatgaaacaataatgaagctcctcctatgtctcttttcaagttgtaattactatataggaaaaactaagttgtcacccaatatcttagacactttgagagcaaagggggtgctgtaaataagtatacaagatcacagacctaaattgagcctgttccagacaaattggggcctatggtcaacctatccttagacctgctaacgcattagcattagcagcacctaagtcctcattgaatgttctggttcaaggctccacctcagaaattctgaaatgggtagtaagagcaaattttcattttaaagcacacctgagatgattctcatacaaccgaaattttagatccatagccctatttgatacttgacagtgcaagtttctgtaatttaaaaagatgtggtggcctgacacctgcaatcccaacattttgggaggccaaggtgggagggtcccttccttgagcccagcagtttgagaccaatgtagtgagactcatctctgccaaaaaaaaaaaattagccgggcatggtggcacacatctctagtcccaattactcaggaggctgaggcgagagaatcgcttgagcctgggacattgaggctgcagtgaactgtgatggcacaactgcatttcagcccgggagacagcaagattctgtctcaaaaaaaaaaaaaaaaagagtagtttaactactccctactttttattcaatattggacatctacattgggatatttatgttatcacttggtataaaatgtacattagtagaaattgagtttagtttttattattttgtgcgtggagatgattgatcaatggcaaacttattttacgctccagatagctaaaacaaacgttgatattttgatacataactcattacattttaattcagggtttataaaaaagtaatctctaaaatcagaatttgaatgaattttgatgcaagaggcattccagaggagtagagaagtatagaaacagaatttagtaggacacataaactgatggattaagtgacacccatttctgtcagttttcttattcataaatattgttgctctgtcattcagattttaataaaaaaagtttaaagtaattgacacatttaaaaatattctttagaaaagtcaaaacatcattaaataaaataaattaacccttgcataagaccaatatgtctgttgttaagttttcctttcttggaaagacagaaaactcaagtttttttcagcagcacagatatattacattttcattcctgaatatttgatttcaagaactttgagagagaaaaaaatatttttactgcaagtggtgatgaaaaacttcactgacattgataaaattactagatatatttcagaactgtgtcttttgggcatttgaaaagcgtaaatataacagggttgaaagcatttgcctctgaaagcagaaataataaatttcttaattactttattcagaattataattaagattctttttgcccgtgtaagatattataaaatgaaacttcttgtataaaggatttttctgtaatagtacttttctgttttcttaaatacagaaaccaccactctcagcctgtgcagtagcaataattaaggcattctataggtaataattttgcctgatgagccaaatttggtattgagcctcatgaaaacaaatgtggccaaattgaggcctgagaatagtttccatttatgaagcactcattctccttaaggtactattgcaagcacttactatattataattcactcaaccaccgtattactattaggccaaagttataaaattggaacatgagggagggagaggttaaacgattttcccaagtcatgtggctagtgagtaggataataggaatctaaatggagaaatgtctgatgttgaagctaatgatctctaaattctagtgatgactagatcttcggagttataaacacctcacagatagttgatgcttgacattagtgtctaaataaaccttattaaatctcaaaataatgagaaagagaagtaagttaagtgtcagaacttaaatggaactaaagttgtcatttaataaaatattagtatactcagtagtatgcaaatattaagggcattttgaaattcggctattgataatcatgtggttagggaagaaatcactactctgagagtctacatttaagaaaacattgcacgtgggatcaacatttattgttattaactataaagagacgtaatgtgaggctttgaaagtccatagacataaaaatacgtaaaaaaagaattaacatatgaatgaaagaaaagttgtgaactcatggaatcgtacttacacctaaagccaccggatgtcgctgtcgtccacaaaatagctttttagaacaaaggcatcagccagtttctcaaggactaggaagtagcgtcattctgagatctcagccatttcgataaaaaatagatataagaaataggacagaaaatgtcagatcgtatgtgcgttctagaccgctgattcgtcgatttgtaaaacaagagaaggataagatggtttccagatgtagctgcctgggggtccagtgtctgctgctctcgcttcttctcctcgcagcctgggaggtggggagcggccagctccactactcagtctacgaggaggccagacacggcaccttcgtgggccgcatcgcgcaggacctggggctggagctggcggagctggtgcagcgcctgttccgggtggcgtccaaaagacacggggaccttctggaggtaaatctgcagaatggcattttgtttgtgaattctcggattgaccgcgaggagctgtgcgggcggagcgtggagtgcagcatccacctggaggtgatcgtggacaggccgctgcaggttttccatgtggacgtggaagtgaaggacattaacgacaacccgcccaggttctccgtaacagaacaaaagctctcaatacctgaatccagactgcttgactctcgatttccactagaaggcgcatctgatgcggatgttggagagaacgcattgcttacttacaaactcagtccaaatgagtattttgttcttgatattataaacaaaaaagacaaagacaaattcccagtgcttgttctgcggaagctgctggatcgtgaagaaaatcctcagctaaagttgttgttgacagcaactgatggaggcaaacctgaatttaccggatctgtttctctgctgatcctggtgttagatgccaatgataacgcccctatctttgacagaccggtttatgaagttaagatgtatgaaaatcaagtgaaccaaacattagtaatacggctcaacgcttctgattcggatgaaggaataaacaaggaaatgatgtattcatttagctctttggtcccacccacgataagaaggaaattttggataaacgaaaggacgggagaaataaaagtaaatgatgctattgactttgaggacagtaacacttatgaaattcatgtagatgttacagataagggaaacccacctatggttggtcactgca

SEQ ID NO: 10485 - DNA, 6000 bp, Homo sapiens
gcgtcgaggtccgggaggcagcgctggtggatgtcaacgtgtacctgatcatcgccatctgcgtggtgtccagcctgttagtgctcacgttgctgctgtacacgacgctgcggtgcttggcgcagctcaccgagagctcgtgcatgccgggcaagcccacgctggtgtaccgcagcgtagtgggatctggtcttactcgcagcaaaggagattttactctggagagtcgcctcccaaggtcaacattacggcttttagtcctagtgttctcccatggttcagattttggagatggacttcaataggaaatttttgagaatataagtactgtaatcctggaaagtatttcattcctattaatgtccctcatagtgacattgataatgttcaccaagttattaatttgattgctttatttattttgcttttgctttttcttttgagatgctttatttaaagtacactggggccgggtgcggtagctcatgcctatttgtaatcccggcactttgggaagccgaggcgggcggatcactcgaggccaggagtttgagaccagcctggccaacatggtgaaactccatctctactaaagatataaaaaaattagctgggtgtggtggtgcgcacctgtaatcccagctactcaggaggctgaggcacaagaattgcttgaacctaggaggcagaggttgcggtgagcctagattaggccactgcactacagcctgggagacagggtgaaactctgtcttaaaaaaaaaagtacattggaagtctagccatcttaatcactttttactacagtcaccatgaacattctttaggaatattcttcagttgataagtataatgataatagtaataatgaattagactgagtggctgtttcctgtaaatgagaaagttaaatcttaccggaaggatcatgatgaataatgatccttatgagaaggtcaaatcttctcaattttgaagcaagttctttattcctattcattttcttattctgatttgtgtcctccattccttattgtttttatgtattcaaaaataccatgacaatatttaatatcataattatttgagtttaaaacatgtttaaatgtttatctttctataatcgataagtttatctctcacaaatggtgatgagcagggttgaggcagcttcgtccacaaacaattttgtttcttcatgatcaatatccatcttttttgagatgttgattgcagtgggtggaattttagccttgcctttaaaggtgattttacttcttaatttttgtcttcaatcttcttataatttcattttaggtcattgtcttcacaatcttcaactacttcagatagccaacaactttgttcttttttaaaaagaaaacaaaacaaaacaatgtcagctctacttaattacctgttgacttaattgctgctgtcctccagtttaagttgttgagctcttctactattttgggaagatttctttgagcaccgattatactcatttttctttcatttttggtacctggctgtatgaaaatattttagggtaggaaaattcacacttatttgggctttaagtataagagagtcttcccatacatgatgaagggtgataccattgtctgtgttcattaagctgcatggtcttcagaatggcattgctgagcttggcagggtgtctcaggcctgtaatcccagcattttgggaagccgagggaggaggatcgcttgagaccaggagtttgagaccagcctcggcaacatagtgagacccccatctctaccaaaaaatgtcattgtttttaataacttaagtataagaaccatgggatattaataaaggcacttccacttgacaattgtggtgttaattataccttagaatttaacattgtatacttttgatatatttgatgcaaaatattttttgccttcacaccatattaatgtgaattgctttctttaaagggatcccagagaacacgtatttatagctgtaaggatgtgtatcaaattatatgtaaaattactttgctctttttggctctaattacaaatgagatggcctttaattctgtgtaaagaaatagtatatttacatattgcaggataaccatgttataggtagggtaaagttaatataaatgctgaaaaggaattagtagtgtctacctagaaaaataacttctgagaagatgatttctatgaagataaacattaaggaaatcttcagaaaagggaaaaccctgtcctactttatggtgctggaattctcttcatccatagctataggacaagagccaatattgatcagtaactcatgataataaatcaccattgtttgagcagtttattaatatatttgttagacatcatgaagggacttaaatacattatttcatttaatacttataacaatttctaaagtacatatgactgttccaatttgaaagataaaataagagaagctgagatgtgtatctattttatccagtgccagtacatggtggagatattattcaaatgtgtatctttcaggcttcagactcattcttttatccactataatgtagagctttctttagtaagtcatttctctgctcaaacatggtctcggctaggaaaatcaagcacaaattgtgtacaggcaaatctttctttctgttgtgcttagaagaaacttcatgattgtcttcatcattaattttgtacaatgtgtgattgagatggcactaagtttttttatgttaagtgatttttttcttgtaagagttcgtgatcatcattatcatttgttttaatcaatgccacactgagataggtattttggttatgtaattgttaagtaattaagagttgccttataagaactacgtatctgttgtttggaagtgatataagtaagaatcgtttaacatgtaagaaaagtcagaaaactgtggtttccaatatccttgtggaacacctaaactaaatactatataccaaaaatgacacccttctttctttactgtgaataaagacagtgtttgggacaagtatagatgttgatattattatttcagggaccctgaacttggccaaaggattcaagaaatgtttacaatattgcatacttcaataacaattttaaagacatagattcccatgaaaatcttcaaatgtgtgtaggtctttcagtcttcttcagtcttattgttggctgggaagctcataacaactgacaaatgatttgtgaccaaataactgtttttacttgactaagccatgatagagcagaattagcatcacggaataaatcctataattttgttaatacagtggttggataatgtaattctaatctgttggttttggagaacctcctggggttctgacaacggtgtcaaaatttatttatgtgttttcaagaaataatagcactaggtctgttagaatatcagtggatgacgtgcactagtaagacattaaactatgcactctaatacttatatgactaacaggacatacaggcagattgtatgtcctgactgatatagtaaaagtcaggcacaaagttccttaatcttcaattgattttacaaaatcagttaacaataactgtattgaaatgacttcttggtattagcctatacccagatattaggctgatcctcaaagatgagttcaaagggcgcataatctcttcactaggggctggttgagatggtgacatctgaaatatcacagccaaaatgcaaaagatgggtcattgattcatacactatatcaaactcttttatgacttggcgtttgttcagtactactttatatattcacaaaatactgtattgttggaaattaacacctaaattaacatattgttttaattcaaatatgtgatattatcatttttccagagtaaaccttctaaggttcatttccctacctcgcaagactccacattccatgtaacatcttcatccccaattcccataataaggtgattgaggatctgttgtttccttttgttcaaaataaacctgatgtgcttcaaatatcatgttgaatatactgtcatctggtctaatgttatgttttgattagaggctactatgattgattattttacagatgcgtaatggaattaacggttataaaagttgatatgtctcctttaattttttaatacagaattttgcatttacctgaattagagttctagtgttatgacaacattgggaaaagagtaaatatgaaaaaagtagaacaaaatctcaaattaatagttgaatatatatataaaatattagcatacacatatgataactttttcatatgcccttgcagtatttttagattggagataaaccatcaaaactatagaacaaaatatttaagctagagtgatatttattctaaatcactttctactctaaaattttgttgcatcttctttttttcctcctaaatcctaagggtatatgaaaagacaaagaaaattcaagcaagttacaacttcaggcaaagaaaactctcataagcaattcctgtattttacttagcattttctatgaaattccatttccacaagcactaaggtaatttaccatttagttgaattgtttgattaattttctatgttttaagcacaatatcaggtacttacagaaggtataattaaaaatcacttcccttgttttccatgaacttctgctcccaaacccaaaattctttcaacaagaaacaaactattttcatgaatataactgaattagattaaggaaaccaatgttggtgacttggaaataccaatatggcacaaagatgttcagggtgattttatttattttataaaatgataataaaatttattttatagttgaaaagcctatttctgtcatatcattgattctgttacataaagtgctaaattttgatatctcatattatgctactatggcttacattagaaataatatatgtcaaataaaaactcatctagatcaatagacttttcctttgtggattcttttttaaaactaccaagtttgagaatatgaatatatttgtttttcatattgttctgcaatgaatataaagtcacttataatcagaaagcaattaaatgtaaataacagtaaagaatgagaactatagaaaatagatatgaaaatgcaagcccacagagatgagaatagatcatgtggaacataaacactaaagagctgcttttataaaacttcaattttttctttgagttccctagcagccaaagtaacaagggagactgaaagtaaaacaattcaaatttgatagtatttttatatgaggaacaacactttcaggaaatgtttaaccctagtttttcatgaggccaccttaacaactgaattctctttctctctcactctgtgtataagtattttagataagtaaaagaacaatgttataatgttaagtcaaacatagacacaataatttaaatttgatgttaatcgagaaatacaatgccatttccatatatatttagtttcaatatgacttataatctgaatattccataaataagcacgttggaaatatttgggggaagaaacccaaaacacgtgaaattctgtggtggtaaatgcagtgcacagtactcacagttttaggcgcaaggtgtcgctctttacttggtggaaagttcatttaaaggttggtctgaacagtgaggcactcccatacaaaggaactccatcataccggatgccaccgtttaaggatcctttgaaacttcttaagaattcaacgagatttttaacctgaaactgaagaatctggtactgtaagtgtaaagaagcttattttggaagccaatttcgtatgcgatgtttggttttcagagaaggggattgggcaccccacgactacagctctggcttctcctcctcgaattctgggaggtggggagcggccagctccactactccgtctcggaggaggccaaacacggcaccttcgtgggccgca

SEQ ID NO: 10486 - DNA, 6000 bp, Homo sapiens
ggaggtggccgacgtgaacgacaatgcgcctgcgttcgcacagcccgagtacaccgtgttcgtgaaggagaacaacccaccaggctgccacatcttcacagtgtcggcgcgggacgcggacgcgcaggagaacgcgctggtgtcctactcgctggtggagcggcggttgggcgaccgcgcgctgtcgagctacgtgtcggtgcacgcggagagcggcaaggtgtacgcgctgcagccgttggaccacgaggagctggagctgctacagttccaggtgagcgcgcgcgatgcgggcgtgccgcctctgagcagcaacgtgacgctgcaggtgttcgtgctggacgagaacgacaacgcgccggcactgctggcgactcaggctggcagcgcgggaggcgcagttaacaagctagtaccgcggtcggtgggtgcgggccacgtggtggcgaaggtgcgcgcagtggatgcggactcaggctacaacgcgtggctttcatatgaattgcagccggcggcgggcggctcgcgcatcccgttccgcgtggggctgtacacgggcgagataagcacaacgcgtgccctggacgaggcagactcgccgcgccaccgacttctagtactggtgaaggatcacggtgagccggcgctgacggccacggccaccgtgctggtgtcgttggtggagagcggacaggcgccaaaggcctcttcccggactttggcgggcgccgcgagcccagaggctgcgctggtggatgtcaacgtgtacctgatcatcgccatctgcgtggtgtccagcctcctggtactcacgctgctgctgtatacggcgctgtggtggtcggcaacgcccactgagggcgcgtgcgcgccggggaagcccacgctggtgtgctcccgcgcggtggggagctggtcatactcgcagcagaggcggcagagggtgtgctctgaggagggcccacctaagacggacctcatggccttcagccccagtcttcctctaggtctgaataaagaggaggaaggggaaagacaggagccagggtcaaatcaccccggacaggtgagttttctacagattccacctatcaggaagtgtatgtgaaattatttaaaatccagttttttttcacggattttttaagggaaagttttatgaataaccagtgttttgaatattgttttagataacaatgtctgttcataaaataccaaatgatacacatcttcagtcttttaatcatatgaataatctggcttctttaaccaataaatgtcctatttctcttaatatttggttagcaaatcctaaaagaaatgagatgcaagagtgactcttctgtagtcacttgagtagaaataattactattttcactaaagtacccatgccccttcatctctaaacttcaattatgaccataataactatggattatttaaatttgctcctctttgtcttttagcagagttttgccttgatatttccacattgttagatcaactggctttgtttttctaaagggaggaggtcttcctatgatgtccaggttggactgcagtggctatttacaggtgacctgtagcctggaactgctaagctcaaagaattctcccacttcagcctccagagtagctgggaatgcagtgccactgcacttagtccattggctttcctaacttcaggcttgtatcaaagctagaatactccattagtatgacatgatttacttttcttttttttttttacagtgttaaacgttcatcataaattcattatatatgaaacaatctttacttttgtctttattcctgtgataatacttgttttcatattgtttgaagaaaaaagttaagccttgcattcttatatgctgctttatggaaataatatgactaaaattctacatgttcttgccaggcaaagtggttcaggcctgtaatcccagctatttgggaggctgaggcaggagaattgcttgagcccaagagttcgaggcctgcctggacaacatagcgagatcctgtctctataaaaaattaaaaaattagccagacctagtggtgcatgcctgtagtcccagtttcttgggaggctgacatgagaggatcccctgaacccaggggttcagggctgcagtgacctatcatcgtgagacccccatctgaaaaaataattttttttgcctgttcttgattttgttccatgaaaaggcaagagatttgtcaactattggatactcaaacaaaatggcatgatttatgattccaaaggaaactaggtaaataaaattattcaaattatctaaacttgctaaagacatgcatatagggctatattatctataatatatgctagttggcattcttccataagtttttcagattcatctagcagagaaaaaattaaatatattaatgtgagtacctactgacaattatcagtttcattcatctcactttgtaactgctctatcttgtaatgccttatctctaatgtttttgaaattttctttccacgtagtatcatcccatctgaagatttgagcaaagatcatttacttctgagtcattcttcatatttagttattcttactacacgtagagtggtggtattacagactttcttgagaatcatatctagctatttcccccccgtatagaggcataacataccatttggcacaatattcaaagagtctatgctgaagcctattcatagactttagatcgagagcttttgtatcataatattcattggctaaaaacattctttaagtattaaagagaaggcaacaatataaaaatataaaatatttcagactcaaaagtgattaaaccatcataccacttatgaaactttataaatataataaaggtgaatattagatagggcatacattactcatctccagatgaaatttttggaataactgaagatcttttaaagacttgggaatgttttcagtacaggttaaaattttgtaaattattattttatatcacataaataacaaatttgcattttagataattcaaattacttggactgatttctgcaaagttgtgtcttttatacttaatgccaagattgcattctatggtataaaattataatttcaatttattttctagtttggttgtttaagtattaagctaaacttagatgttcctattggcttaacaatttgtttaggtcaaagagtatgtgagaactacataacacactattattatttgtttctttttgagatagagtcttgctctatcacccaggctggtgtgcagtggcgcaatctcagctcactgcaatctccacctcccatgttcaagcaattctcctgcctcagctttccgagaagctgggactacaggcatgcaccaccactcctggctaatttttgtatttttagtagagatgggttttcaccatgttggccaggctggtcttgaactcctgacctcaggtgatctgcctgcctcagcctcccaaagtgctgggattacaggtgtaagtcactgagcccagcctattttttaaaattaaagttccttagcatgtatggtacattgaccacttttgaaaatgaaaaataggaaagaaacttggtgatgatattagacaatttaaataattagcctgatgacatcaaaattcaaatatgtttttaattacttaacgttttatagtttatttaagttatcttatacttgtagagccattcttggttactctttcctggtgttgtaaaggtgtcatatttcagttgcctttattattatatgcagtaggaatgaatggcaacaaattattggtttaaagattttgacttgagtattaatagacttacaaaatctatgtgtacttgttcacaatgagttgtaggatcttatctgtttttttctcttaaagctgatcttgaattaatgaataaactcatgaaaggtcttttgatgcccccttgcataacagtcaccattctgattttctgaagagaagcatgtcctaactactaaatgacctgtaggggaagatttagagaaaaagcaaaaggttgatatcaagttcacattctcttgactttagtcaatgagattaggctccaaaaccctttaagagatctttcgcattttagtgctccattgttgctttgggatagtgtgaaatttggaggcttcaactaaacattttacattaaagtgctttacttttgctagagtaaaactttccagaatctattcctgagatttgttttaacatgttatggaaatgagagcagttatgtgaaaagttatcacattcaagcatcaaggaaccaaacaataacgctctccatatttatgatgaattctaactttcatcagatttatgaataagacaatttatataaatgaaatattgtttggtattagacatattttagtttcttatcctttgttaaatacaaattcctaactttctctaaaatcttacgatggagtgcttgtgaaggttaaaagttattgaaacagcggaattgtaagctatataaggggaggggtgctgtatattattctgtatatcattttccatgataaagtgtaggttctggcctactgtatttgaaagatttctactttgaagcagaaaacatttttaagctacagcgtaataaaattgttgatgttttgttactaatatcatgtatattaactaaacccgcatttataaatgatccgtgaaaaataacccaaagtcgaaacattagaattaagagtgacccaggaagtggctaaaccgaaaagaacctcaggatctttcttgtacttacataatcagtcacatgatgtcgctctacactcagaaggtgaaacaggaaaatttttttctccgcacccacattccaatcattcacggaataggatcgactccataatgactgtgatgctggaaaaaatttactaaatatgtacttacagaaaagggtgactgctcataaaatacctcaggcaagcgatcccttaaaactgattgtcccaactcagaggccctcattttctgcaatggtgattatcggaccaagaggcccgggatcccagcgtctgctgctctcgcttctgctccttgcagcctgggaggtggggagcggccagctccactactccgtctacgaggaggccaaacacggcaccttcgtgggccgcatcgctcaggacctggggctggagctggcggagctggtgccgcgcctgttccgggtggcgtccaaaagacacggggaccttctggaggtaaatctgcagaatggcattttgtttgtgaattctcggatcgaccgcgagaagctgtgcgggcggagcgcggagtgcagtatccacctggaggtgatcgtggacaggccgctgcaggttttccatgtggacgtggaggtgaaggacattaacgacaacccgccggtgttcagagaaagggaacaaaaggtacctgtttctgaatctgcgcctctggactctcattttcctctagagggcgcttctgatgcggatatcggcgtaaactctcttttgacctatgcgttaagtctaaatgagaattttgagcttaaaataaaaacaaaaaaagataaaagtatattgcctgaattagttcttcggaagttattggacagagagcaaacgccaaaactcaatttattgctgatggtaatcgatggcggtaaaccagaactaacagggtctgtccagattcaaataaccgtcctggatgtgaatgacaatggtccggcgtttgataagcccagctataaagtagtgttgtctgaaaatgtccaaaacgacacaagagtgatccaactaaatgcttccgatccagacgaaggacttaatggagaaatttcctatgggatcaaaatgattttgccagtgagtgagaaatgtatgttttcaataaatccagacacaggtgaaattagaatttatggtgaactggattttgaagagaataatgcctatgaaattca

SEQ ID NO: 10487 - DNA, 6000 bp, Homo sapiens
tgactccggctataacgcttggctgtcctacgagttgcaaccggcggcggtcggcgcgcacatcccgttccacgtggggctgtacactggcgagatcagcacgacacgcatcctggatgaggcggacgctccgcgccaccgcctgctggtgctggtgaaggaccacggtgagcccgcgctgacgtccacggccacggtgctggtgtcgctggtggagaacggccaggccccaaagacgtcgtcgcgggcctcagtgggcgctgtggatcccgaagcggctctggtggatattaacgtgtacctcatcatcgccatctgtgcggtgtccagcctgctggtgctcacgctgctgctgtacactgcgctgcgttgctcagcgccgcccaccgtgagccggtgcgcgccgggcaagcccacgctggtgtgctccagcgccgtggggagttggtcttactcgcagcagaggaggcagagggtgtgctctgcagagagcccgcccaagacggacctcatggccttcagcccaagccttcagctgtctcgagaagattgtttaaatcctcccagtgaagtaagttattaatattatttagatatatttgtttccttgaagaacttccgtttaggttataactacattctctcatttttctttatgattctatcctttaaactatcgaatgtctcatctttcttggtcattcttactcattttgaacttttatgtatttgtctaacattaatgaaggaaatatgtaggtacaatggaggccatggagcaccacacttaatatttttctttttctataatattttatatgactgatgaaccttgaaaaaaacagtatattagattaaaaagtggccagatgtttgataacttaaaaatttaatttgttcataatttcaagattacaggtaagttgcaagaatggtacaaagagttcctagatcccattaatggattctttaactcttcctcacgtgcttaggcttttaaaatagccttcttgatcactattctaatttcagtacaatctagacattttcacattatattccaggtattatcacaataatataaatgatatgtctgacatatgatgaatgattttcttcattgctcacaaaatatcttctttatttcaagtaggaatagatactgtactattcttatttacatgaaatataataaaatcatttctcaatttaaaaatatttaaccatctgtacgatacagtacagttggtaaccaactgtggctcaaaccagtttcagatgatcccaaacttatcatagtataccactgccctgtgcctattaccaagtgaatcttctaatgtgcattttacatattttaactttctatttctacaaaaatatccagaggcttctctttaaccagggaataaagtcttacataccccagcctggtagtaaaggcattaaaatttccagccttatatctactttcttacatatctttagtttaggatctggaatatagtatatgttcaatcactttttaaaaacatatgggggtcttgctatgttgcacaggctggactagaacttctgggttcaactgatcctccatttcagcctttcaagtagctgagactacaggcaggctccaccactcccagcttcaatcaataattttaaataaatatatggtattgaaatgtattacctggacattcccctctatcttagaaatgagagtatgccctagaaatcagataatgttttattgaagagtgtcttgaaagatagacaacattttaccaagaaagtgttaagagagataagtaggaacaactgcacagtatatggtgtaattgaaggattagagcaggggagattgtgaaggcaggaaagctatttcttttttaataaattaggtatcaagtaatggagacttaaattatggcagtagaaatgaattgaaaaagacatatacaagaggcactggcaaagtagaagcagccagataatgacagactcaatacaaatgataagagaaaaacaaaagtagaagttgactctcacttttttagtttgttcagctgagaagatgacattgccattaaccaacctgcagaacaaggttggagaaacagtttgtgtgtatttgagcaggtagggaatggagatgaacatttaagaaaatgttactttgaagtcctaagagaataccgttgtgattggaaatatgggtctggatctcagaagagattattgatatagattttgggaacaactcctttagagaaaaaaataatccatgaaagaataaaattgccaagacagacattgaaaagtgaaaaacaatgtgtccaggtacttaggtgggtaagtgtgtcgcttcctgtggctgctataacaaacgaacacaaactgggtgctgtaaaacagcaaaagtttattatttctcagtattggagaccagaagtccaaaatcaaggtgttgtcaaggctatactctctttggaggccccagggaagaatctggtttttgtttcttccagtttctattggctgttggtgttccctggcttgtggctgtaccactcccatctcagccttctcagctttcatggtcacattgcctcctcctctccatgtctctctctatgtgttggttttacaaaggtacatgtgattgtatttagggcccatctggataatccaggataaactcctttcaagatccttaacttaatcatattattcaccatataaagtaaaatccacaagttccagggattaagatgtgggcataactttttggggaccacaattcaacctattatagtaggcttaaaatcatagaaggatagacaacaggaagctgaaataaagctcaaagtgcaatatatcaagtatatgttagaagttaaacatgaagggaaaaagataaacagaagaggttttccaccagaagtagaacatttaaattagtgtatgtgcgtgtgtgtatgtatacatattttagttaaagaagtttgactatcttcatagtgtgagtgaaagaaacaagtaaaaaataagatactaaaaataagacaggcagcaggtgaatttagatgaaaaccatgagagaatagaaaataatttttaagagcatatggttgaccttaaaagcgggaacagtttttccttacaactagtagaaaatgaaaacagataatataaggaaaaatgacacaagaagagagcaattgaatttctgtttggtcacatctctcaatgtgtgaatcatctgaaagtgaactgatggaaatgaggttgagaatttgagaagagaggaaagagaatatggaagaatctctgtaagcaagagggaggagttaattatcaattcacttgagagcccaactgaggtaaaggtgagagtaaatttgaagagaatagtcatggttaagtgacaatgttgagcagcttaataggaagcatagagaaaatggattgtcagtgtaactgcgtgttggaggctaaaaagaatgttagaggagtaatataaataggtgaatgactctagagtgtctggaagggcatattttaaatggttgactatgtagtctaattatgtgaagaggtaaataaagaaatgtagggccagatagaaagaattagaagagaaatactatgttagtaaaagtaatggagcaggagaggatgatgagggtaagagaataccaaatactctgcctaaattttcagaggagagcagagctatggaaataaacccaacagtcatttcctatagagttgtgcacagaacaggccagataattattggagctatgatatatttttcattacaccatttggcctgggattttgtggcttggtagagatagttataacaatagataaaagtaagatcctcttcctcttttccttgctaaagatatgttaacatctttgtctagctgttgtttcttggaaaattaaagtcaatttaaatgacggcaaggttttactcagtgatgatgaagtaagatggagagagaaaatggaaactttaacctcctggttaaattctatttaaccaggacgccgattcgggctacaatgcgtggctttcgtatgaattgcagccggcggcggtaagttaaattctattaaatcaataggatattagttccaggcatattttataaaaacagaatccaaaaccttagagcattgttgtggctaaattattgtgtttatgcacatacacacactcacatacaaaatcccacacatattgactgaacactttcttttgaatataaatatcttatctacatctcaagtcacattgagggaaatttattaatatgatgtgcttattcaaaatctgatatatcagttaccaatatttttcaccttcaccgattttattcttatgtgattgttatgtttccttttggagtcaatggctgttgtgtgaggaggtcttgaaaaatattacaggaagaggacagtaccacaaaaacctacatgactatgcagaactaccgatcaattgtcccaaaacgagtgtcgaatattctttgtcttaaagttctgcatggaattcttacacatggaaaaataaatttgtggcaaaatgaaactcatcaaccaattgtcagctaatataaaatgttgagcagaatgcagtgatttgctgtttctgggaaggtaaacatttaatcttcaattacatatttgcagtgaaaatgtcaggaaatgcaaggggcaaaaaaatactacatcaatggaaaatatgaagactgagtcatacttacacttacacgttcatgcgcatggtgtcgctcttcactgagaacgtttccgcgaagaaagccgccgtttctttcttcctgcagaaaatatagcagaaagcggaatacctcttgcgaatccttccgcactaggaagccataaaaattgggccttgagagacagtttgaggtaaggcgttgtatatattgcagatagctctgaggtttttggagtgtaccatgctgtcttcctggcaaggaggcccaagaccgcggcaactactgctctggcttctgatcctcgcagcctgggagacgggtagtggccagctccactactccgtccccgaggaagcaaaacacggcaccttcgtgggccgcatcgctcaggacctggggctggagctggcggagctggtgccgcgcctgttccgggtggcgtccaaaagacacggggaccttctggaggtaaatctgcagaatggcattttgtttgtgaattctcggatcgaccgcgaggagctgtgtgggcggagcgcggagtgcagcatccacctggaggtgatcgtggacaggcctctgcaggttttccatgtggaggtgaaggtgagggacattaacgacaacccgcccatattccctgaaagcaagaaacgaataatcattgcagaatctagacctccggaaactcgatttccactagatggcgcatccgatgcagatattggagtaaactcggcattgacctaccgactggatcccaacgattatttcactttggacgcacaaaacagtcttgagcaaatgtcttcattatcacttgtactgaggaaaacactggacagagaggaaattcaggaacatagtttattactgacagccagtgatggaggtaaacccgagctgactggcacagttcagctgctcatcacgattctggacgtgaatgacaacgccccggaattttaccaatccgtttataaagtgacggtgttagagaacgccttcaatggaacattagtgatcaagctaaatgccacagatcctgatgatggtacaaatggagatatagtttactcatttagaaggcctgtatggcctgcagtggtatatgcatttaccataaatccgaacaatggagaaattaggacaaaaggcaaactagatttcgaagaaaagaaattatatgaaatatccgtggaggcagttgacaaaggaaatattccaatggcgggtcatt

SEQ ID NO: 10488 - DNA, 6000 bp, Homo sapiens
acatatttatagatgtgtgtgtatatatacagtatatatataagattttagaaaggaggataaatatatattacatgataaaacttatagtcaatataattttacacttgtaaaatcccagaaaaccaaaggaaaaaatagaactaaaaaagagttcaatgaaatgattagtttaaaaaaataaatataaaaaatgtaattttcccacataccttcaaaatgtagcaatcccactaagcaaaaagtggtatttctaccaactatagataaatgaaaattcacctttaaatgtctcttatcctccatgaaactcatcaaaaacaacaaaaagtacagcagacaaaaaaaaagtcttatctttaatgaaactttgtaaaacatttgaacctcaaccatgatgtgtatgaagataagttactaagtgccatgaagattggaccaagatatgaaaatgctaggagaggatacctttcactgaagatcttggaaagggttggtatattggtattttctagagtagtgattctcactgagatgcaaaaccaaagactccttgttttggattaaaaagatctaggtacagaggctgagggcagaactctctcattatcctatttgtcaacacaaaataggagagaaggcaggactaaatctgagagtgagcagatgcaccattatttcaagattgaacctaaggatgtggcaaggtaaggagaaaagtcaggatgacaagttgccctgtagccgccagttctcatcagttgaagatatattaaaactatggtacacataagccactccatcaaacagtaaatatggctatactgcaagcagtaaaaaagtgaacaggctctgcttccatacagtcaagaacaaaaagaaacacttgacaaggttgagaaaaataaatggaaaaaaataaagaatttaaaagaactggagagaaaactgtagctttggaatacagaaaaaggagatacagcatactgctaatagatgtcctcaaagagaccaaatacatagacaaggggaaaaaatccaaagacatcattcaagaaaaaattttgagatacaaataaacttcagacttttacttccagcaatggaaatccagtttgtcttcagccagtggcatatctcagacaataggcaagccatgagaatggttgttggactgcagtttcggactctattactacatgtatagtatttagaataaaagagctaggtctcctcatgtcagcacttatttgaccaatgggagtatgattttaagtttttagggtcacactttgaaggtggaatataaaaaaaattatagaaagataaatttttgttcagatgcatctactgcagcaatttgggaggctaaggtgaaaggatcgtttgagcccagaagtttgagaccagctgggcaacatagtgagaccttgtctctacaaaaaattaaaaattagctgggcgtgggggcgcttggcctagaagttcaaggacagtttgggcaacatagtgggaccctatctttataaaatatttttaaaaattagttgggcatggtggtgtgtgcctataatcctggctacttgggaggctggggtgggaggatcacctgagcccagagaggtaggggctgcagtgagccatcttcacaccactgcactccagcctggatgatgaagtgagattctgtcccaaaaaaaggacaaaatgaaatatcagcaatgaaaggtcctgctaaagagaaggtttgttaattcataattttaatgtttatctggtcatcttatccaaaaggcaaaaatctttagcctcccttatctttgggatatcgttctctcttaaatgttgctttctcacaaatcccaatttacttgaataagaatgcaatgttatgccaaaagttagggaggcatatggtgggacaaatcctactgggtggatggtttcttcattcttttcacaaatgaaatcttctgaaaatagacgtcagtggcagtttaaatagagaaatgggaaaaagggaagccaaaaatctgagaagcgtgtgaaagaggaggagtttctgtgaagatttcccatactgttctctgtatgcatttttccttttttcctcacgccctaatctatacccacacatactatccctctaggtgcagctcagaattcctaaacctggtataattggaggcatggctgcagacctaaaagttcggtacatctttacagttgtatttcatctgtttaaggcagaaagaataaattttcattccaaagcagttagcttgcttagcagcattaatttaaaatgaagaaatgcacatcctaatctctggcactgaagcagaaaattagttttggtttagaaatttggtgaagaataagttcaatttttatgggctgttttgcatcctggtgagatctaatgaggtctgtacttgtgactacctaataggctgacatgtttcctcctttaattttatctgagacttggtgtcaatgattttttggtttcttaattcaaaaaggcaaactagccaaggggtatttactacttatattgccttatatcacagtgtgccctttctagttccctagaagagataacgaatgggtttgtgtgtttagggaggtaactggtttttagtggaacactggcattatcaatcccactcttagtgttaaaaagagaatgcccgagctacccctctccccaccattttaatcagcaatttttaaatgttttcaaatattatagaaatatgcaggctgatgccaggtgcggtggcatggggctcacacctgtaatcccagcactttgggaggccgaggcaggccaatcacttgaggtcaggagttcgagaccagcttgtgcaacatggcgaaacctcacctctaataaaaatacaaaaattaaccgagcatggtggtgcgcgcttgtagtcctagctacttaggaggctgaggcaagagaatcgcttgaacctgggagggggaggttgcagggagctcagatcgtgccactgcactccagcctgggtgacagagcaagaacctgtctcaaaaaaaaaaataaaataaaataaaataaaataaaataaaataaaaagttaaaaaaaaaatgcaaggtgagtgcagtggctcatgtctgtaatcctagcactttaggaggctgagataagatgggaggatcgcttgagcccagaagtttgagaccagactgggcaacaaagcaacacgctcatctggaaaggaaggaaggaaggaaggaaggagggaaggaaggaaggaaaaaaaatttcaaacatacacaaaagttgagagaattgtgtaattgaccccaatgtaccatcacccagcttcaataattatcgatacttttaggcaggtttctaccagaaaatatgtcctggaaactttaattcttgatctgtgttcagattttgcctttcaaatgtttcattattggggctttggacatattgcacctgtattaaaagaaggatttgagtgaggaatttagtgcttcatagtcaatagtcaatgagtctccttttggctcgcctccttcttagggaaaggaactggttgtagggtgttaggcagaatttgggtgtatctgttgtggctcagagatgtttctcatagaactgatcactgtcccaatatccacgcaaaagaccaaattaaaagcgaggagaaatacctaatgtaaatgacaagttaatgggtgcagcacaccaacatggcgcatgtatacatatgtaacaaacctgcacgttgtgcacatgtaccctagaacttaaagtataataataataataataataataataataataataaagcgagggtgggtatctagcctattcttatcctgcctcatggtgttttctaaatatttacagaaagaaaatttacagagtagtttcctggtcaaactctaatgagtatctcagtactttcccctccacttctcacgtcttctttggggacgggtcgtcaagtctttgagtttctagttattgctattgactggtttataacctcctctttcacccagatcgtcaagggccgtttgcaaagcactcccaagtagagcctcttggagaaggagaaactgctatcacgcaaaaaaaaagccttgagctcgctggctccgctgcctcgaaaagccagagtccggaggcagtttgatgcggacactattccccaaccttcttcccctccttgtcgtctctattgccctcttggcagctcctgggatacaagagggtgcaggacagacttcaacccgcagcaggatccagcgcggaaagctctgcagcaggatccagcgcggaaagccccccgcagcacttctttcggggggctcctgtttccttaagcctagaaggtgtggtcgctcacgttcaccgtcccgcctctcgccgcctccgctcggcagctccacgctgagtcccgccctctccgccggagaggtgcgccggggtcagagcgccgggacccgacgcgcggctcccaaagggcggcaggaagagcccagctgggctcagccacagttatcagcaatctgcgggcagaggatgtggaggttaagatctgggcagcctcagggcgttgtcctagaaaacaccgtttaaggagagaagtgttagtgtctcggggcgtctcccaggctccgccctgcgcccgcagccagcgtggtggtcgagaccccagcccgctgctactggagacagcacctctcgcgcccgggcgggcggcctcgtctctgcacccctaggcggcgctgcgctcctcaacacccggccggctccgctttcccagacggctgcccagcctccagcctagcaagcccggctcccagctggccagccccggcaatgccggcgttcgggaggcgcaacgtcggcggtcgctgagtatccagcccgcagcagtgacggccggcaggagcgtgctcttccccgcggctcgtgctctccaggagtccggagcatggtcctgggtcaccgttggtgtagcgtgttggtggaacgtggacgcctagagggaggatggtgggctgtggggtggcagttttatgtttgtgggtttcctgcggcgctgcagcgggacagctcgagtactcagtgccggaggagacggagcggggcgtagccgtaggcaatctctccgcggacttgaggctgccagcggccgctatgtcctcgcggaactttcgcttcctttccagccaccgcgagctctacttcggggtggatctacccagcggcaatttggtggtcagagagccggcggaccgcgaacagctgtgcagggccaaagctgcctgcgtcttgacctacgacctggtgctcgaggacccgctggagctgcacaagattcggattcacgtcctggacaccaatgacaactcacctctctttcctgccggcgacgtgcagctgcacatccccgagttcctgacgcccggagcccgctttactctcccgaatgcccaagatgacgacgagggaagcaatgggatactaagctacagcctaagccccagtcagcactttcgcctggacatgggatcgcgggttgacggcagcgaatacccggagttggtgttggagaaagcactggatcgcgaacagcgcgccacccacctgctggtgcttacagctcgggacggcgggctacctgcccgctcaggagacgcacaagtcaccatcattgtggtggacacaaatgacaacgcgcctgtatttgagcgctccgtataccgcaccaaggttccagagactgcacccaatgggactgtgttattccgagttcaagccttggatccagatgaagggtccaatggggaagtccagtactccctaagcaacagcacgcaagcagagctgcgacaccgctttcacgtgcaccctaaaagtggggaggtgcaagtagctgcttcactaggtccgcctgaaacgctcttggaggcatacattgaggcgagggacg

SEQ ID NO: 10489 - DNA, 6000 bp, Homo sapiens
tcaagcttaatggcactttttaaaagataggaaattgggttctctagtcacatctgtaagttatttcagtgccttggaagatcatttatctggccacagataattgacttacttacatcagttttttttttttttgagatggagtctcgctctgttgcccaggctggagtgcagtggcatgatctcggctcactgcaacctccgcctcctgggttcacgccattgtcctgcctcagcttcccgagtagctgggactacaggcacccaccaccatgcctggctaatttttttgtattttttagtagagacggggtttcaccatgttagccaggatggtctcgatctcctaaccttggcctcggcctcccaaagtgctgggattacaggcgtgagccaccacacccggccacttatatcacttttatgcttcctatctccttattgatcttgaggttcaagtttcacttaaccattttcttcaatgaaaaataattttataatttaaaaaacctcaacctttaatattctatgattcttgttaggccatctcaattgagaatactgataaagaagtaaaactccccccaatactggctagtttgattttatctgttaatattacgcaatctgccccaaacctgtctctccctttttattgttacttatccaaagatggcttgaatctcttatggcttgaatctctttgtttattctaagcaattttcagacacctcagccaactatcaataatatattagttttttagaactaaaaatgtagaggatctccccctaaaagccaattgttaatgccaaatatttgactgatatatttcttctggaggaagggagatgtgaaaaaatttagccatcaagttatgtgaaaactttttcatcttcccatccactggatgttttatctgtaaataatgctataatcatattggaaagtattttccttctggggatgcatgaagatcaggaatcctattcgtttttaacaagatggaatttttaaaaactactttggacaactctaaacatcagagatgaccatttgtctcttttttattatataacttgtgctcggtttgtagagcaacataaatacatgaattaaaaaatgaaaactagctccttccctatttgacagatacttctcaacctcctctccataagatatgctctatccctatataggaaatttttctgtagcagcttgagtttactaaaaataagatctgaagaaaatgaagcaattaacatttattgagagtctataagggtttctacattgtgaaggagacagaaatataagacatggctcctgctttcaggttgcttataattaaagagataatattaaattatttggatgaatttaaaaatgacacatgccatcttacagatatgctgtagactgtgaaaatgaaaaaaaaaacctcgtgtttagagtagacactgtttgatggattaggtaggttttcatctggactttgaaatgtatgtaagattttataaggaggagagaaaataagaagctgtttgtattagaattacacagataaatttgtaaatttagttcttttcaaagaacattaattgagcacctctgtgccaagctccctactggatgctgtagattacagcatgtttaggaactaacttcatactctgttgctaaagtatttctgtgttttctaaaaaggtaaatctcttgtgaggaaacaaatctcttgaaggggttctcataacagaagtcccatttacttcatgatataaaaaggggctgttttctggttttgttctcaaaatgtaggatatagttctagacgtaattgggaaagcttaactttgttgcatacgcatcttccctatcatggttgatttcctatatggcatagttaaatgtgtttatccgtgtttgatatctaaagggccatgctacatatagactgccaactaaggttttatctgatgataataaattgttgtatttcatgacgacagcaacaacaacaataatgtacttaactagtcactgtgcaaattgctttacatacattttctcatgtaatcataataataaccgtatgagttttgcttactattgttttccttaattaaaatgagtaaagtgaagcttaggctaagtaacatgtccatagccaaacagttagtcactggcaggagtgtgactgactccaaagtctatattcctaattactgtgttctactttttaatagagagctcttgaaggtccaaggaaaggaatgcataatggtgtggtcaaggcattagtgttaatatttgtagaaagggtaattaacaacagtctgagcaatcacattctaacaactagtaaggttggcaggagcctcagtataatggtgtgaggaacgaaatcattatagtgccaaatagagtataccatctctttagtacaatgtctttcaaaatgaggctgattgtgttggctttatatttgactccttaataattaaggcagtaaattctagctggagctaaatacctacaaggcctaaaacagcataatggacaacctggcaggtgtccttgctggaagatgacaagagtgctgaaaggagagtcctggtttttctcccaagacatgacatttgggggcttccattaaaaaattaccaagcctctgccactgtaatctcttccttaagtgcctatgattttttcacagtcacaggtctatgcctggtcaatacccagtggccaggtctctgagctgcgtgcagagatggcagcgacttggagggctgggaggagataaggggaggaaagatcacttttcatgacaacttacaacttgattccacttataagccatttattttcagaaacaagtaatgggtgaggacacaggccaggtccacaatttgtgcacttgagagattaaggcctccgagatcaaattaccacagcaaactgagacagaattattgtagggatgtttggggaggatgcagagagaagaggaagaagccagagacccaagaaaggagacaggaatagattttgatgaaaattgcttcctactctgtacccttgaggaaacaaagaggacaaataagaagcagcagtgataggaggctgggcgcttctctggaataacactggctaggtagtggagcattgatagtgagtgtgcttggttggtggaacgaagggatgtgctagttcaggcctttgaattctgggtgtcaggatcacaaccttggctcctttaactgtccgctctaggagggaagcatgccaaatgtcaggtctcactctgactttgttccagtccatagctagaaaatgacccatagaggaagatctacagatgacagaatactgggagatgaagagaaaggacgttttagtgagtgctttttttgcacatgaggcaatagatttcaaattcctgtggaagaaatgtgagaacctgggaagagtgaatattcagaactgagcagcagaggcaatgacacagcatggaaagatttcctctgatccttctaccttctcttttactgaagtgaatttgttgtctctgtgttgcctctatagcagtacaagaggaaacttggggacacagaagaacagaagtctaaggagtcttatatttaaggaagataagctgcagtcattgaaattgctggttattgtaagataaatcccagactcccacattttgcttaatgacagcagatttttttttttttttaactgcaaagcattaatggaatccaaattccagcctggcttaggagatcaacagtaacgctcttgatttaatggttttgcagactcttgaagacattgtcatccattaaagaaaaaattttaaattactcttgaaagaaaatgtcttgggtgataaatgtaaaagatttgaagcaagattagaaaaagcttgagagaagaatctctttaaaaattttaccagattttccccattgtcgccaaaatgggtcaaataatagatttgcctacagcttcatggagactatttttttaaacagagcattttaaacatttaaatattggttatttgccaaggcacacactgaaaataagggccacttggccgagagcagaattgagtcttggatcccaggatgctggttttaggcttgctcccggaaagagggcagcatttgccatccccctccttttgccctaggagttgagcactttctgcagtacttaagagtgtccagggaagatgtgggagtcaggtgaatagttcccatcgccagtaaccccagagcgcctccccctgcgttgtttccttttaatgttagatccgccgcctgggtgcccatacttagctaaggcccctcagtttattttcctgaattgcgcttggagatcttttcctggggagctgatagccagacttctaggggcttgactgcttttcccagactaatctccttaaagacccgttaagcaggggagagacggtggagactggatgaactggacagtgggggtagggagaaagggagtggccgtgttcctgcggtccgctgggatccggcaggtccagggtgaaggagatggggctggagaggctgagcagtccgggttcgctgtccgccacttcggcgcggaatcagagcaggacttgctgagccctcctaccgctccctttccccctccccctctgtcttcccttctgtttccttttccctccccctggagctgtagcggcagcagcagcaggaagccgagccgggttgagcgactcggaggcgagcggaggagctggaatatggggagtcagcgaggacggtggggccaggagcccttgggagggcctacggagggagcggccccaggcgctttctagagcgtgagcggtgggggagcaggcgcagggtggcacgagcggaggcggggcccgggcgtggggcacggctggggaagctgccgcctccggccctgcccggctgcctccgccgcggccagtggctatggagcaggcgggcaccagacctgcggcgacagagcatccacggctccggcggcccatgccctggctgctgctactgcctctcctgctgctgttgctgctgctgctacctggccctgcggcctcccagctgcgatactctgtgccagaggagcaggcacccggcgcgctcgtgggcaacgtggctcgcgcgctggggcttgagctgcggcgcttggggccgggttgcttgcgcatcaaccatctgggtgcgcccagtccgcgctacctggagctggacctgacgagtggagcgctcttcgtcaacgagcgcattgatcgggaggcgctgtgtgagcagcggcctcgctgcctgctcagcttggaagtgctggcgcacaaccccgtggcggtgagcgccgttgaggtggaaatattggacatcaacgacaactcaccgcgtttcccgcggcccaactaccagcttcaggtaagcgaatcggtggcgcctggagcgcgctttcacatagagagtgcgcaggaccccgacgtgggcgccaactcagtacagacctacgagctcagccccagcgagcacttcgagctggaccttaagcccctgcaggagaacagtaaagtgcttgagctggtgctgcgtaagggcctagaccgggagcaggcagccttgcaccacctggttctcacagccgtggatgggggcatcccagcccgctcgggtacggcacagatctctgtgcgtgtcctggacactaacgacaactctcctgcctttgaccagtccacttatcgcgtccagctacgggaggactcacccccaggcacattggtggtgaagctgaatgcctcagacccggatgagggctccaatggtgagctcaggtactccttgagcagctacacgtcggaccgggagaggcagctcttcagcatagatgccagtaccggggaagtgcgagtaattggggggctggattatgaggaagcctcctcctaccagatct

SEQ ID NO: 10490 - DNA, 6000 bp, Homo sapiens
atgtttaaggtggcttacagtggaagaaatttgtgaaagcaaattattaaaaaatctgcttaaggtcaaagtaaaagatcaagagaaaggtgggagtcattatttcaaaaatcaagcctaggctgagtgaaaatcccaatacttaccttcctgtaagtcaatatagaagtatgaaaaaataacaataaaaggaaattctctataccatttcttcaagagagaaaaaatagcctcttcctgctacaaaatcaaggaagatttgattactgatgattgtgtaaaggttgagaaatatactgggcagcacgttttatagcagttttgcaaaacccacggaaatatccttgatgtagacatcattgtatttggtagtcattcagtcaagggcataatgttaaattttatttcctatgtttgcttctgaagttacttaaatattaaatgaatatatttttgtttgtcaaactttcaaacatacatgaatgtccccttgtgaagacattctatgagaaattaatataatttgctagttaagtttccagagatttgagttgatacagagttgttgcttagagtattgtaaaaaataggctgtaaacatgttctgtaacttttaatatattatcgtactcagccttttggcaagaatcagaaaaaaataatcttagcatcacgttgccaagaaaatgtcccagttcctcaaaatatgagacaaactttgcaggattataaaattggaaaaaatagatcagaaaatcacaaaataatttctctttccaattcacattactgtgtccccaaagcttcatttgctaacagtattaatggccaggcttaggattgcctttacatacattcaatatttctttatttagttttctaggttagttgagtgtattaacctgaaggtgaatcacaaataatagtgaattactattaaaccaaaaataaatgggcgtaggagtacaaaatttgaaaagtaatttttatgaaaaggtaattctagaatggaggaaaaaatgattgtggagtggtattgtcacttagtgtttattttaatgtaaatatgaatggatttcccattggtagttaaagttcttgctccattccaaatcttcatatagttaacacaactttcaacaggtttatctttcttcacaagatttcatccacaaactagtaaggtatcatttgagggaccttagagacttgtggtcagtgaaggatgcaaatagatgaaaatgagaaatagtttatattgctagccactaccgatattcctctgagaatgctggaggatttcacttttctgttattttgaggtagcacgattgtgtaatttcctttggccaatgaaatgtgaatggtgtgtcacttccaagcagaattatgtaactgccagtgaaagactcttctgctatcttttcctgttacagcaattacataagcactggttgatactgagacaccataaagtcaaagcaatccaggatgctgagccaacatgtggagaaaagctgtcataggaagtccccaataactacaaaggactctgcagcagcaagaaataaaattatgtttattttagaggaaaaactgaatgttaactcacaacagcatatgtattgaggtcccactgccattaagctaatatgaaccagataaattttaagaggggggcattttttttacaacaggaaatacaactgtaggagaacattattgttgacactttttactaagacatctgaccgttaagcagattagataacttgaattccatggaaaaaatctactgtgttttgatttctttttcttaaatataaaaggtagcagaagaaaaataataaactgaaatttaaaatgtcatagatattccttcttttttcttgcttagcatccactccccttgttgtttttttcttctggggtcttctagtagttttgtgaaagactaggttgaaggttttgcaagaatgagtgcttggacatgtaaacgttaagggatatacagttccatagataggtgcaaagggtataattttagcaatgggtactatattaatttccttgggctgatgcaacaaattaccacagacttggtggcttgaaataacagaaatttattttcttacagagtctctgtaagaataaatttcttctctcttatggaggccagaagtccaaaatcagcgtgtttcctgggccgcatttcttctgaagactttaggggaaatttttttcttggatcttccagcttctggtagctcttggcattgcttggcttgtggcagcataactccagttcctgcctctgtcttcacatttccttctttcctgtgttactatatgccttctctttttctgtcttttataaggggcaaccatcattggatttatggccttctgtaatctaggatgatctcatatcaagatcctcatctttgttacatctgcaaagacctttattccaaataaggtcacttatttaaacctcagaaaagtgatgtcttttggggtatctttgacccaaaacaggtaccaagagatatcaagtgcagtgggaggaaggatatttgctgagcatggcttcttaatctcttttccccgttgtgggggaaatgtacttgcatatctggcaatagtattctatctccgggggaagggggaaatattccatattctcagaaatcctaaataacagcacaaaatgcctcttatacccccacatatgtcattctgaatatccggtataattaattaccttatatgattgcagaaattgtctcaagcaagccatgtttcctgaagctagcatctggattctaggtataattccttctatgtgtcaacagtggtcaatgttggctatagattaaataataattactgggtatcatacatatgcaattgctttgcaactacataatgctgtaacgagcagttctgaagctatctgccatctgtttaagctccaggagaatttgggtacatgccatgacctccacttttcagttcacataaaaaccaacctcccacttttcagttcacataatttaggtggagctgatttcatttcctggcttcaagaatgagcaagtggacccatgtctagccaatgtgagaaaaatcacaattattgactaaaggaaatttacatcatccaaactgggctgtaggaagtaatatccaggatttttgctggactattagaaaagagcactttctggtaagagtcatcaaactggtaatttttagtctagaaagctactttggccattttgccagcagatgggaaaagtctatctgagaagaagttcagcaggggaaaaggaattataaatgtggagattattttccttatggaattatggaagggtgtagacccagctctgtctgaaaccagtaattaattacccatttccatgtatgagtcagtacaggattctctggtttatttttgcttaaatcggttaacttgggatttactgttagagtatgattaacataaatacacatttccatagatggtacaaatgagtatcttaagatactgtacatgagggaaaaaaattgttattggaaaaaaagctagcttttcttaacaagagctttgcttttctcttacggacattgcaaattttgcaattaattttacttctctctttgctctaggaagctgaaaacaaaattggtgacatggttagagtaactgaaggtgaccctttattatggattttgtatgctatcccactccttgattcattttatttcatcctcatcttatctttattctattttcatttttttactgtgaagggatcagctaaaaattaacaaaagaagatattctcaagtaattaacacaaaaaaagagatcgattgtattgttcttgcataaaagtctaaatgtaatggaaaaggaatattctaaagtaatagtacattatccaaatgagaaacaaataaattattaatttcaaaacatttgcaaacaattcaaaaatcaaaattaaatcacaaaacaacagtatatatacacatatattttcaatggactaaaatacctttgattactatgttcttcatttgaagaaatagtgaaaaatgctaatatatccaaaagaattgaaagcagggtctcaaagaaatatatgcacacccatgttcatggcagcactgttcacaacagtcaagaaatggaagcaactcaaatgtccacgaatacttgaatgaataaacaaaacgtggtgtatacatatgttggactattattcagccttaaaaaggaaagaagtcctgtcacatgttacaatatggatgaaccttgaggaaccatccacggatgcttgaatgaataaacaaaacgtggtgtatacatacgatggactagtattcagccttaaaaaggaaataaatcttgtcacatgctacaacatggatgaaccttgaggacattgtgctaagtgaaataggccagtcacaaaaagacaaatactttacgagtccacttacacgaaatatctaaagtagtgaaattcatagaaatagaaaataggactgtggttaccagagactggagtgacggtgaaaagcggagttgttgtctaatgggtatagagtttctgttttccaagatgaaaaatttgtaacaatgtgaatatacttaacattactgaaatgtacatttaatcatagttaatatggtaattttaaatattatgttgtgtgttttttaaccagagtaaaaaagggtaaaaaggtaatatattttagggcttaaaatagttatttttttccaagatgaaagctatgagtaaacttaaaccagaaaatcgactagttttaaatctacagaataaacagtagagccttccttttagccacatgatgtcgctgtccaccatagagtgttctctaggaaggaaaatacccagagcccctttgttacttcagagaagcggaggaataagagaagcagcaggactttaacagagactagaatatttaaatttttgcaaaacatgctcttctaatttgatcaaaacattgaggattggtaatggcgtcttctatcagaaggggccgaggggcctggacacggctgctctcgcttctgctcctcgcagcctgggaggtggggagcggccagctccgctactccgtccccgaggaggccaaacacggcaccttcgtgggccgcatcgcgcaggacctggggctggagctggaggagctggtgccgcgcctgttccgggtggcgtccaaaagacacggggaccttctggaggtaaatctgcagaatggcattttgtttgtgaattctcggatcgaccgggaggagctgtgcgggcggagcgcggaatgtagcatccacgtggaggtgatcgtggacaggccgctgcaggttttccatgtggaagtggaggtgaaggacattaacgacaacccgccaatatttccaatgacagtaaagactatccggtttcccgaatcaaggctgcttgattctcggtttcctctagagggagcatctgatgcagatataggagtaaatgctcttctctcctacaagctcagctccagtgagtttttcttcctagatatacaggcaaatgatgaactaagcgaatctttgtctctcgtgctggggaaatcgctggacagagaggaaactgctgaggttaatttgttactggtggctactgatgggggcaaacctgagctcacgggcaccgttcaaatacttattaaggtattagatgtaaatgacaatgaaccaacttttgcccaatcagtttacaaagtaaaattgttagagaatacggcaaatgggaccttagtggttaagttaaacgcttctgatgcagatgaaggaccgaacagcgagattgtgtattcactcggtagtgatgtgtcctccactatacagactaagtttaccatagatcccatctcaggggaaatcagaactaagggaaaattagattatgaagaagc

SEQ ID NO: 10491 - DNA, 6000 bp, Homo sapiens
gccctggaccgcgagagcgtgtcagcctatgagctggtggtgaccgcacgggacgggggctcgccttcactgtgggccaccaccagcgtgtccatcgaggtggccgacgtgaacgacaacgcgccggcgttcgcacagcctgagtacacagtattcgtgaaggagaacaacccgccgggctgccacatcttcacggtgtcagcgtgggatgcggacgcgcaggagaacgcgctggtgtcctactcgctggtggagcggcgggtgggcgagcgcgcgttgtcgagctacgtttcggtgcacgcggagagcggcaaggtgtacgcgctgcagccgctggaccacgaggaagtggagctgctgcagttccaggtgagcgcgcgggatgcgggcgtgccgcctctgggcagcaacgtgacgctgcaggtgttcgtgctggacgagaacgacaacgcgccggcactgttggcgcctagggctggcaccgctgctggcgcagtgagtgagctggtgccgtggtcggtgggtgcagggcacgtggtggcgaaggtgcgcgcagtggacgctgactcaggctacaacgcgtggctttcgtacgagcttcagctgggtactggcagcgctcgcatcccgttccgcgtggggctatacacgggtgagatcagcacgacacgtgccctagacgaggctgactcccctcgacaccgcctactcgtgctggtgaaggaccacggcgaaccagcgttgacagccacggccaccgtgttagtgtcgttggtggaaagtggccaggcacccaaggcctcgtcgcgggcgtgggtgggcgccgcgggctcagaggctacgctggtggatgtcaacgtgtacctgatcatcgccatctgcgcggtatccagcctgttggtgctcacggtgctgctgtacactgcgctgcggtgctcggtgccacccaccgagggtgcgcgcgcgccaggaaagcccacgctggtgtgctccagcgccgtggggagctggtcttactcgcagcagaggcggcagagggtgtgctctggggaggacccccccaagacggacctcatggccttcagccctagcttatctcaaggtccagactccgcagaagagaaacagctctcagaatcagaatacgtaggaaaggtgagtcttttactttttcttgccaattctaaaattgttctttttaaaaaattctatatgatttctactagttatttagattcatagttcttcatttattttatatcatcctaccgtgcgattttgaatatgaattagagatcaatttattgcatttactgaacaatttatttaaacaatctacataactgttttcttatttttacattttggcacttccatcattaagtcataagtaatagaccatgaaacactgaaaaacacctcagcaaaatttgtaaattaaacatttcccataaatattttctctcttaaaaattgaaaatcacaatcggaagaaattaaagaatttgattatataatacgtattttcaactgacactgtctatccaatctgtcggatagtgtttggaataacctatatcctggacatttcttagattgttctttggatcaacaatgcccttgtctatgcaatagttaataagctacattttttttttgtttgtttgtttttgttgagacagtcttgctctgtcacctaggctggagtgcagtggtgtgatctcagctcactataacctctgccacccgggttcaagtgattgtcttgcctcagcctccttagtaactgggattacaggcgcccaccaccacgcccggctattttcttttttaaattttttatttttagtagagacggggttggtctcaactaaatgttggccaggctggtctcaaactcctggcctcaagtgatccaccctcctaggcctcccaaagtgctgggattacaggagtgagccactgcacctggtctttttatttgtatttgaaagcagcctgagtggatattttaacaccagaatttccaaaagtatgtagcacaggttgttacaacaaaatgacagcacttaggaataactgctaatcttaagtatgttttttataagtaaaataacccattatttggtataaagatttcacactgataacatttttgagttatcaggcaaaaatagagagtattgagaaaagagaccctctcaattttgtttaatttgaaaatattaacatttaaaaatcacactggggtttttcaggtggtgggactttttcttcatttaagtggagactacccagtctttatgttaatggttgataaatcatcctttcagtatcattatcattaggccaatgtgtgcaggcctcccactgcagagattgactacttttttctggcatctaattctatgcgtgggaatacattttccattaatgtgagctcactcaattttacctggaagcatccatattcctaatgaaattggaatttttccaaaagatgaggcctggtcttggatgactacattttcacttgaaacatttattttgggtaattataacactgaactcgacaagtaaatgttacacttggaaagaacttttttagcttttccaaccaaaggcagatgtattgcaataaaataactgtcttaaacggtcctctactatttagttcttagttatttgctgtttattctaaatatatgtgcatattgataaatcatagaaataacttccactagtgatcttacctttagccatttcatagttaggtcagaatatccatttccaagtaatacttgaccactatgtttctaccataggtaaatgataagcttctaaaattatattcacatatatccaaatctccaggagtcacaatctgttgctctataagttttttcaaaacattcttatttacattttttcttggttgtctaagtgacatctaggtggtagtagaaattattcactgatactttatctacaaaatggctcaatcttctaaactcatagttcctttaatattacctttatctcttaataatcagtatggagtctactctgctataaattctcatgtgacattccattttgcaattagtataactcttaaaggtactgaaaagtgcagtattacaataagttgtcaaaggcatctcattactatgaagtccatgaagtttaaaaattttaaatttatctcttattttcaaactagctaccatctttaaaaattcagcaaagtggtaactggaatattaatagctataattatttcttaggtccatgcttttcagaaataatgcttaaatgtttacttacttcttcataatatagcacaatataatcatttagaaattatgtaagtttgatattaacaaatatcattaacttacatttttatttatcttgcttgaaaaagttaattcaaaatattaatttatttattcatgaaaacaacaattgataatttatcctattctaaatatgaatgataaaatctgagtaagttgcagtcctggcttccatttcatgaatacacaggaaacaaaagctgaaatgaaaacttttcccctaaatatttaaatcacatgtttgatttcatttttaaatggtctgggtataagcaaaaatttgtacattattttatttctctaaatttgacctctttccataaattttctttgccccacttccaaatgcggcgagaattcatgcttctcattgaattcacagatatctttagaatgttttattgcttagtgttaaatatgttgagtaaatactggcttatgttcctaggttacttttctcccttcactgtttagttaaataatcaattctttcaagtaacaacttttaaaaaaactggaatctagaaattcatcaggagtggagatcatcaaaaacgtaattactttatattgttaacattttagtatatacaggtaaattcaaatacataaagagtgtggaaaaattaaacctaatatattcttaattgatgtgatgtgagtgtaacaaatatacaaatcacattcccacaataggaaacaaatttcctgtttgaatttctctgtaaaggaccgacttctgaaatctttatgtaagttacagtcaagacagttgatgaggctatagttcttgaaaaaggggcatgggagggaattacagacattctacaaatttaaaaaaccataaatgtacatattttaagaaattaacagttgctgtaataacataaaagtagatatatgtatgttttaatatatacagcacacacacacttttaaatacttcaacatctcaatgttttgatgatcataaatctgaaaggatctgatttttctataaaatgtaacttgggtggtaaagaggttaatggtaagttgtcttgaatcagattgaaatcccatcgtaccaagagataatatcgttttacttaacctctatgtgtttataaaaagcgaataatattaaaacttatttcagaggattgtgataatttaacgggataattccattaagacaaatagaaaagtggctgtcacatgggaaatatttccaatagatgtccactgttaaaacaggaatcacaatattttagtgtatgtcatgaattagcacaattgatagtgaattagtataaaagttctaaggaaatatttagataaaatataaggactttgaggagtgaccgaaggatattacaattgaaactagaaattttgggaaagttcaaacgacatacaaggaaaagaagatacgtttacatatttaatacttacacgtttagccacatgatgtcgctgtccaccacaaggtctttctccacaaaagaaataacagcgtgcattacgtattcagatactgctttgcttcatcctctctaaaatttaacaccgaggagtttaagaaatgaagataaggaactcgaattatttttaaactttggatcaatgtaaaggcaatctaatatttggaaaatacttgcaatgttgttctcctggcgagaagatcctggagcccagtgcctgctgctttctcttctgctcctcgcagcctcggaggtggggagcggccagctccactactccgtctctgaggaggccaagcatggcaccttcgtgggccgcatcgcgcaggacctggggctggagctggcggagctggtgccgcgcctgttccgggtggcgtccaaaagacacggggaccttctggaggtaaatctgcagaatggcattttgtttgtgaattctcggatagaccgcgaggaactgtgcgggcggagcgcggagtgcagcatccacctggaggtgatcgtggacaggccgctgcaggttttccatgtggaggtggaagtgaaggacattaatgacaacgcgccagtttttccaatggctgtaaagaatctgtttatttccgaatcccgacagcctggctctcggttttcgctagagggcgcatcagatgcagatatcggaacaaattcgttgttgacttacagtcttgattccactgaatattttaccttggacgttaaaagaaatgatgaggaaattaaatcccttggactcgtgttgaaaaaaaatttaaatcgagaggacactcctaagcattatttactaataacagcaattgatggtgggaaaccagagctcactggcacgactcaactaaagatcactgttttagatgtaaacgacaacgccccagcgtttgagaggacgatctataaagtcagattactcgaaaatgcaccaaatggtaccctagtggtgaccgttaacgccaccgatttggatgaaggagtaaataaggatatcgcgtattctttcaatacggacatgtcagcagatattctgtcaaaattccatttagatccagtcaatggacaaatcagtgtaaagggtaacatagatttcgaggaaagtaagtcatatgaaatccaggtagaagccacggataaaggaaatcccccaatgtcagatcact

SEQ ID NO: 10492 - DNA, 6000 bp, Homo sapiens
aggaaagtaagtcatatgaaatccaggtagaagccacggataaaggaaatcccccaatgtcagatcactgcacagttctactcgaaattgtggacatcaatgataatgtacctgagttagttattcaatcactatctttacctgtattagaagactctccacttagcacagtcatcgctctgatcagcgtgtccgaccgcgactcaggagtcaatggacaggtcacctgctcgctgacgccccacgtccccttcaagctggtgtccaccttcaagaattactactcattggtgctggacagccctctggaccgcgagagcgtgtcggcctatgagctggtggtgactgctcgggacgggggctcgccttcactgtgggccacggccagcgtgtccgtggaggtggccgacgtgaacgacaatgcgccggcattctcgcagtccgagtacacggtgttcgtgaaggagaacaacccgccgggctgccacatcttcacggtgtctgcgcgggacgcggacgcgcaggagaacgccctggtgtcctactcgctggtggaacggcgggtgggggagcgcgcgctgtcgagctacgtgtcggtacacgcggagagcggcaaggtgtacgcgctgcagccgctggaccacgaggagctagagctgctgcagttccaggtgagtgcgcgcgatgcgggcgtgccgcctctgggcagcaacgtgacgctgcaggtgttcgtgctggacgagaacgacaacgcgccggcactgctgatgcctcgggtgggtggcatcggtggcgcagtgagcgagctggtgccgcggtcagtgggtgcgggccacgtggtagcgaaggtgcgcgcagtggatgcagactcaggctacaacgcgtggctttcgtatgagctgcagcctgggaccggcggtgcgcgcatcccgtttcgcgtggggctgtacacgggagagatcagcacgacccgtgccctggacgaggtggacgccccgcgccatcgcctactggtgctggtgaaggaccacggtgaaccctcattgaccgccacggccactgtgctggtgtcgctggtggagagtggccaggcacccaaggcctcgtcccaggcgtccgctggcgccacgggcccggaagctgcactggtggatgtcaacgtgtacttgatcgtcgccatctgcgcggtgtccagtctgttggtgctcacactgctgctatatactgctctgcggtgctccgcgccgccaaccgaaggcgactgtgggccgggcaagcccacgctggtgtgctccagcgcggtggggagctggtcatactcgcagcagaggcagcagagggtgtgctctggagaggggttgcccaagaccgacctcatggcttttagccctagccttcctccttgtccaattagccgggatagagaggagaaacaggatgtggacgttgatctctcagccaaagtgagtaatttttatttattctttccaaaatgtctttgtttttcattcctcaatgtttccactcctctggaaatacattaatagttaagtatgaattatgtgattcataattagacttttccagttttgtggttttgtggttaaaacggtaagatttttgttgctaatttttgaaccaaatcagcagtaagttatgatatccacacttgtaattttgttttgttattaggtgcagtagtagaattattttattgctaaatgcctgggtataagacaaatattttttcttagatgaattgcattatttagagaatctgacttcgacttgttttatacttatccctatacaatgcttcttcaatatcttttgccacttttcatttggacttcctactacctgttagtacaaatgttacttgctcattttatgagttcacctaatgcttataactccctattgattatgcttttccaccttcagtttcaaaaattagatcattacacctgttgtcttttatggaacctcttttattctcttattcacttgtttggagtctcaatccttattttttacttgaatatgattcattttaggccttgtgctctaatttggcaataccgtttattgtttcttgatttcccagttgggaaaaaaatcgagaataacaattgcatttagaattgcatctttgttcatctttagtttatcactactttatttaatactactttaataatactactgtattatatgttaaaatttattactaataactaaaatatcaatatgaagtgaaaatttaatagttgtatagtatatttatatattcattttaaaagaatgttttaaatcttgttaaaaataattttcaatctgaacaatatcttgaaaataattatggtatctaattttaaaactatccctactagcaaaactttttattcattagtgtcttttgcataccatactaaggatgctaatatgaaataagtttgataagccaatgttataatgttattactggttaacttctctgaatagcatcctgcctattaatgtgtgccatgcaataagtagaaaactccaaataaccagaaccaaatgaaattgaaggtagacttttttctaatcactacccctacatatttggttatctcctctagcaattagttggactcccatttaagtttccctaccactggagagaaatagtaaccaactgaaacctggttaatactcattgacagtgtgggaggtctaacacgtaaaatagatatttttcttgactcctctccttcccctcacttccattttctttatttccttttttggcactatcctttgttgctcccttgtccatgaagtagtagccatagtgtgtccatctcaggtcagtattttaaaaatttagttctgttatcagcttcttgaatataatagagtcagccaaagtacttgtcttcccagatatggaacttcaatcttcaaatccagcttgcctcttgaaactattgtctaacaagactcttggcaaagacattttgaagactttggaattttcacttcacagatgtactgatgctatgccaaataaatattgaatagctaccaaataaacattgttttctattctgctgcattccccatctgtacattaaaatacctggtaaatgaaaatattacaaatgaaatgggtgaaaatggaattcttcctccttttttccaatgtgcttgatgtcaatgatcattttgtaaaaatatagtttgggtccccacatagtgaaagtactctggtttctgtttgattcagaaatttggtgggttttttgttgttgttttggtttttgtgtgtgtgtgtttgtgtgagtgtagttcttcaatagagagggagcgtaaagctattttcactagattgattttttgtttagacaaacaggatgaaaataactttatggatataggaggcaaggaaagtttttaaatggctaccattatgtctttatatattaaatttctttatgtaagaaaatgtattgtggtttatttattgggaagtcttcattccccattaatacccaggatgattcaaagatcatgattaccaagaattagaataaaaattaagctaaaacccaagttttcaacattgaacttgaaatacatcttaattggggaaatgtctagagactttttttgtatctttagaaaatcatagaggctattgaaacaccacattttcccaactagatatgcgatcaccttaaattaatgcattttattaggcaatggaaggaagcaaacattttctgcagggtaaatatttaggaaatattaggtaagtccctctgagctattaaacaattaagatacaactattccctttaaaatatatattccaaaaaaggacacacatactcaaatgcttataagagataaattaatgtaataaatggcccacgcgattccaccctggtgctgcagtttgtaaaagaagaaaaaatacctgttcaattggtttgatcatgacattcttcatgggtcagggaagttttaagtggttataaaatggggtaaattggctttagaagagtttagaaatgatgtggattacttatagacaggacaaaatgaacatgcttgtttattaaaaaaagctattggaagcaggaaatattcagtttggctaaaatatataagcactataggagaaaatagaagcttaggcacattacatactggagaacaagcaagtacttataaactgtaagagtcaaaatgagaataccagcgtttctcatgggagcaaatgagttccaatgaataaaattatttggaatgcttttccatgcaagctatttgctataacttcctgcttccttgcactttcagccctgacatgactcaaggaagacatctaattaaatgctgatggtctttgatccttttataaaacatctgcaaatttccctgtcaatagcttgttcttggcaccagaagttccctagagaccagtcccctcaagtcaacaacaccagaaatactagggtgaagagggtgttatcattaataaaaaaaaaccctggaattcttgggaacacaggaatctgtaatgaatttttctaatcaacagtttacagttacatgtttacaaagtgtatagttaggtctctgtaatacttaaaacctgtgttgaaaaaattatttctactgaagtaaaagttgcccctatggcgaaactaaggaccacactcaatcaatcagtggtacaatgtgtaccacagtagtacaaaatgtattcctattctccgaaacgactgaaataataaataaaaccaagtagtttacagtagagtgtgtgggggtttccacaattgctacttacggtttggagccacatgatgtcgctctttaccacaaaatacatgagagaaggaggaagaagggaaaattccttctattcttactggaaggaaccatatacactctttggagtctgaaatatggaggatgcagctgcacttgactgaccgattaaaagatttcccttgactttgagaaacgatatttaatcagaacaaaatactgtgcactaaagatggagttttcctggggaagcggccaggaatcccggcgtctgctgctcttacttcttctcctcgcagcctgggaggcagggaacggtcagctccactactcggtctccgaggaggccaaacacggcaccttcgtgggccgcatcgcgcaggacctgggactggagctggcggagctggtgccgcgcctgttccgggtggcgtccaagggccgcggaggccttctggaggtaaatctgcagaatggcattttgtttgtgaattctcggatcgaccgggaggagctgtgccggcggagcgcggagtgcagcatccacctggaggtgatcgtagacaggccgctgcaggttttccatgtggacgtggaggtgagggacattaacgataacccgccggtgttcccagcaacacaaaagaacctgtccatcgcggaatccaggccgcttgactctcggtttccactagagggcgcctcggatgcagatatcggggagaacgccctgctcacttacagactgagcccaaatgaatacttttctctggaaaaaccacctgatgacgagctggtaaaaggtcttgggcttatattacggaaatctttagacagagaagaagctccggagatttttttagtgctcacagccactgatggaggcaaacccgagttgactggcaccgttcagttactcatcacagtactggatgccaatgacaatgccccagcttttgacagaaccatttataaggtgagattactagaaaatgttcctaatggaacattggtaattaaacttaacgcctcagatttagacgaaggattgaatggggacattgtttattcattctcaaatgatatttcgccaaatgtgaaatccaagtttcacatagatccaattactggacaaattattgtaaagggatatattgactttgaagaaagcaa

SEQ ID NO: 10493 - DNA, 6000 bp, Homo sapiens
ttagagggatctgccagcttttttttttaagatgctctaatctttttccctctgtggtgtctgtgtgctgtactgtgggccctctggagcagcagtattcactcagctcttttaggttctgagaagccctcagttatagattctgctgaatcctatcagtgcctggagtcaagtgagacagaaacttggactgcccactaaaattcaggaactttggatgcattttactctctctttccctcatgagagagagagtgctgagctgagtttctctctgtgtgctgtatcacaggtcctgaggagcatcagcccgccacccagctctttattattctgagctgccctcaggattttagaatatgccaggttccatcagtgctctgagatatgcaagacagctcccctgaaaagtcagaacactgaatgcatgctttactttctctttcccttctcagggagaagacaggagctgggaatttccccctgtttgaatggaactgtgctgctggatgggactatagggaaagtgccccagaaaagtgcccagctagttttacacttgcttggagcccaggaccctcttaactggtttcggcacttatcaccatgggaattggtccttgtattgttgttgagttggtatacctgtggagggtctggggattcctataacagcatcttgctgatgtcactacctctgttatctttttaagctatatatgcttttacaaattattttattgatttcctcttttgttgattataacacacatccttgacttattacctcaattaaatcaataattttaataattccaggcaacgctaagaccttgaatcattataccatttacttgtaccctactttttgttactgatatgcctttcaattatttatatgttctagacacacagtacattattatcattgttttgttaacacctatatatgtttctttctgggatcattttccttctgaagaaattaacatttcctttagtgtggcctgctggtaaagaaacctttacgtttttatatatctggaaatgtcttaattttactatcacttttgagaaacagttttgggtattgaatgaaagttatttttgccagcacttttaagatgacattccatggtcttcttttgagatgatggctgtcaagtttattgttcaattagtgtgtctttttttctgtctagctactttgtatacttactctgtttttcacttttaacagctttactatcatgtgcccagtgttaatttgctttgtttttaatctcgcttgcagttttcaaagcttcttatatctgtgggttgataatattttatcagtttaagagaagatttagcagtatgccttcaaatacggcttctacttcatattttctcttatattcttctgtgactataagtacatgtatgttaaatcttttcaccatattccttgtcttttatgtgccatttctgtttttaaatcactttttctctttgtttcataatccatgttttattctgacccatcttttactttaggaattttatcttgttattctaggccactgtcaaagtcattgattgaattcttaacttgaatcgtggcatttttccattttagaattttattttcctttttaaaaatatatttctaacttgggtactggctaatgtcaaaagaaactttcctcccacaaagttttcactcacttgatcttggattttaaaatcagatataacctgagagattatcatttttctccatttaataatgaatcaggccaggcatggtggctcatgcctataatcccaacacctgtgtgggccatgacaggaggattgcttgagcccaggagttcaagatgagcctgagcaatatagggagactccatctttacaaaaaatgaaaaaaattagctagatgtggtggtgcacacctgtggtcccagctacttgggaggctgaagttggaggatggcttgagcctgaggctgcaatgaactttgactgtaccactgcactccagcctcggtcagagtgagactctttgtcacccagttgtatagaatcaactataggtagaggcataaaaaagatgcctgagattgcatctcttgaatttagcttcattgtccctttctattaagtgagattatttgacatgaacattgatattcactatctcagggatatgttagaactattctcatattttctatccacagaggatatataatatggatattttagcacattcccttatagggcagttataccttcctctgtgactcattatacaggcagcgctaagatgtgtattatatgctcatggtatcctttcttactatccttataatagaataaattaatttttatacagaattaatttttgaagaatcaaatgacatatgtgcataaattatttatacatttttatacaattgcttcaacatttcctcttctctgcaatctggtatatctatataatttctatagataagagaagaaaaatatagcttattaaaattttattctgggttttgtaaggaataaaggacatttgtacccttatgaagattaaattttcttgtgttagtatatttctaaaggcttttagtgaattaaatggagacactttaatatactacacagttttaaatctaaatttttttctcaaggaagaacttctgtttacacaatgatgcttaaacatgactgaaatatctaaaggagaggttaactggatcagtcaagaaaataatctgtaacatttgattgaagaaaatagcttagaagaagattttttaaaatgttcttttcctgtggagtctcccatgaaattcagattggataatctatagttactgagaaaggaatattcaaaataagagttgatcactgtagcacaaatgcaagtgataatttaaaaagtaaatataatttaacagatatgaaagtgaatcaaaagtcaagagtcttgtttcctcctgaaatatctatataagtacatgagatattttttccagactgagaggagcatgtgaactgatattgttgatgactttttctccattgagtatatcttttaaaatactcagtatttatcataatactctgcagattacaatgtacacattgttaatactacattgttaatttgccttttaaatacttaatatttacttttttcaaaggttatctttgtgtattttgtataaaattctactataatttattccatagctttgtagttttacattatttactgttatataatagaaagtggctaacatcagctaatgctgttttctaaatatttattatcattttcttatgtttttaaccattgtgtattaaaatatttcaaaattatcagtatgaaaactattaggcaaatagtctgggaaattgatttgtgtttcaacgatccaaatattagtgaaaagtcatgataatagagatagtaaaaatcttataagggaactggtaaatatatctttaaagattgtatcagaaacaattctatgacaatatcttgtttctttacaagtttgaattccagaaatcaagtgaatttcctctgactttgcattttctggtaatttcttttttcttatcaagctatattttaaatgtaaaagtatccaacaatagaattgctaatctcttggtccctcttgtcttcacaggtaagggatattttgtaatatttaaggaattttatggagtatatatacaagcagaatgttagctatttcttcaatagaaaacttggtgatattttcttttgcccatatttattaagtgaagtttactaaattttctaggtcgtgttcaaatcataccatccagtaaacagttgggagattaaaaagtaattaaactaatataaagatagcctggttaataaaatgatattcttttcaacatgattatatttactggaacctaaacattttgtgaaatagtatgtcatatagacaatattaggattttgacttgttatgtaagtacaaaggtatgtattttacaatttttaataattgctttatcagtaatagcaacttgaagaaatgctatctagatgcttctaatttgaaaatagtgcaaagacgatttaccaaagtcgttctattatgcttttgatttctagaaagctgaaatatccccattacagtttttgagtcaatacaaaaagtagataggtgttatagataaagaaataggttttcatcgatttgaaaattagaactccgagaagaaactcaggtaagaatgccattaaaatagttttagttgtttttgaaaataacatcaacaaaatgtcactattaaacagtgaaattggaataaaaatttgttttatgagtaacacggagatagcatacaaacattccattgactaatacagaaaaaactcaaaagttttaattagatatgtttaaatagagatgagaaaagtcaaaactttaactcttaaaagttatttttatcagtttggaaatatataaactcctccctatataaaatacaccagcacaaatttctctagtaaggattggggtttcatgactttagatgtatttttctgtaatattttaatgacgcacttatattgacgcattttaagatagagtttaatgatatattttgactagagataagtgatttaaagaataagaatcatgtcattgaaagtgagaatacttgagaaatattgacgaatataagctaaataaagcaaaacaaaataaaacacttaccctttcatccacatgatgtcgctggacaccggaaggtttttctcccttcccagcctcaaaggaatacagtgagtagattttccttagacagaaaggaaaagaaccttccatttttggctgtgccaagaagctcagaaaggcgataatataaaaaatatatagttaattgggaattgaatttacaaaatacattgtgtggtgatgcaatagaaagctcataattggaacgagattgagatggtatattcccggagaggaagtctgggatcccggctcctgctgctctggcttctccttgcctactggaaggcagggagcggccagctccactactcgatcccggaggaagccaaacacggaaccttcgttggccgcatcgcgcaggacctagggctggagctggcggagctggtgccgcgcctgttccgggtggcgtccaagggccgcggggaccttctggaggtaaatctgcagaatggcattttgtttgtgaattctcggatcgaccgggaggagctgtgccggcggagggcggagtgcagcatccacctggaggtgatcgtggacaggccgctgcaggttttccatgtggaggtggcagtgaaggacatcaatgacaatccgcccaggttctccagacaagaacaaagattattcattttagagtcaagaatgccagattcgcggtttccgctagagggcgcgtcggatttggatattggagcaaatgcacaattgagatacaggttaaatccaaacgaatattttgacttagatgttaaaacaaatgaagaagaaacgaactttttagagctggttttgaggaaatccttagatagagaagaaacacaagaacaccgtttattagtgattgcaactgatggaggaaaacccgaactaacaggtacagttcagttgttgatcaatgtattggatgctaatgataacgccccagaatttgataaatccatttataatgtcagattgttggaaaatgcaccaagtgggacattagttattaaactgaacgcctcagatgcagatgagggcatcaataaggaaatagtgtatttctttagtaatcttgttcttgacgatgtaaagtccaaatttataattaattctaatactggtgaaataaaagttaacggggaactggattatgaagactataactcatatgaaattaatattgatgccatggataaaagtacattcccattatcaggacactgta

SEQ ID NO: 10494 - DNA, 6000 bp, Homo sapiens
cgtgtctgtggaagtggccgacgtgaacgacaacgctccggcgttcgcgcagccccagtataccgtgttcgtgaaggagaacaacccgccaggctgccacatcttcacggtgtctgcacgggacgcggacgcgcaggagaacgccctggtgtcctactcgctggtggagcggcgggtgggcgagcgcccgctgtcgagttacgtttcggtgcacgcggagagcggcaaggtgtacgcgctgcagccgctggaccacgaggaagtggagctgctgcagttccaggtgagcgcgcgcgacgcgggcgtgccgcctctgggcagcaacgtgacgctgcaggtgttcgtgctggacgagaacgacaacgcgccggcgctgctggtgcctcgagtgggtggcaccggcggcgcagtgagcgagctggtgccgaggtcagtgggtgcgggccacgtggtggcgaaggtgcgcgcagtggaccctgattcgggctacaacgcttggctttcgtatgagctgcagccagcgcctggcagtgcgcgcatcccgttccgcgtggggctgtacacaggcgagatcagcacaacacgctctctggatgagaccgaagcaccgcgccaccgccttctggtgctggtgaaggaccatggagagcccccgctgacagccacagccacagtgctggtgtcgctggtggaaagtggccaggcgccgaaggcctcatcgcgggcgtcggcgggcgctgtgggtcccgaggctgccctggtggatgtcaacgtgtacctgatcatcgccatctgtgcggtgtccagcctgctggtgctcacgctgctgctgtacaccgcgctgcggtgctcggcgcagcccaccgaggccgtgtgcacacggggcaagcccactctgttgtgctccagcgcggtggggagctggtcgtactcgcagcagaggagacagagggtgtgctctggggaagctccacccaaaacagacctcatggccttcagtccaagccttcctcagggtcccacctctacagacaacgtgagttttctaatattaacatccatctttccctcccaattttcaaatattaaatgtcacattcacccactttttttgtatttaaaaattatgtcttagtacacaaatattgtggtacacaattattgcactaattcatgtattatatgctttttatgaggcttttctgctggggtaatagattcatcagctttctgtgatattaagtgtttttaaaataatattttatattagcatttgaattttgcatctctaaaaatgtaggataataattgtaagacatagtttggagtcattctcaaagtttcagtttatgactacatgaaaatttattttattttattgttattttttagagaccctttgttgcttagtctgcagtgatctgatcatagctcaccgaagcctgaaactcctgggctcaagtgatcctcctatctcagccgcccaagtagctggactacatgcacatgctaattaaagttttttttttttttttttttttattttctgtagagataggggtcttgctactttgcccaggctggtcttgaactcctggtttgaagccatgctcccgtctcagcctcccgaagtactaagattacaggattgagcaagagtgcctggcctataaaaatgttttaacaccacccttccaattttgcctttttgtttctattgaatttaaattaattattattttattacactaatttagtttgttttcaattgtatttttgcagcatatggtttatttcaactttgcctaagcagttcacctgtatacccatgatgaatttgataattgtaatttaaaaattatatttttcattttattgattttttgaataggaaacacatatacatggtttactgttctaaaggtgcaaaagaatacagttaaattttccctttcacctccttcatgaagccaaaacattctctggtatccttctagagatttttttcatatacaaataaacttccctacccccttaaaaaacatatgagtattgattttaatcttgcttttttcatttactaatgtatcttgatgatcatgaattatcattactgaagtagatttgtttttcttttatctggatctatggtgttccattgtgtaggtatgtgattggttatttttcccttaacattaacatttagtggaacaatgatttaattttctggaaatttgcatatttttcaatatatctaatatatattagatatataaatatctaaaatatctaatatatatctaatatattatatattttatataatatatataataaatatataataataatatatatcagatattttgatacagaattttgctcttgttgcccaaacgagtgcaatggtacaatcttggcctcccaggttcaagcgattctcctgccttatcttcccaagtagctgggattacaggcatgtgcccacacctggctaattttttgtatttactagagacggggtttcaccatgttggtcatggtggtctcgaactcctaatctcaggtgatttacccgcctcggcctcccaaagtgctgggattgcaggcatgagccatcgcgcctggcctaaattattatattgatgaggagtaactgtgaatctcctcagttgtgcaaattctactatattttggttgggaaattttactgcttgttgttacttttagattaaaaaaataaatataccatgatacaaactcccctcttgagttgtttacaaagagttgtttattaaagctgtatgtttgagactacgctagacaggtgtcctctccatctgaaataatgagaaccatttgtctactcttttgaggggaaaagtatggatttataggtagtaaatagtccacactttacatgataaaatgtgaattccctatttctgttgctttgcctgtttcttttattctcatatgcattcaattttataagtacccttctatcatgctatttatatattcctaatatcctgagctactttgaggaagtcctagaaattgagaaatagtttttgtcattctataaatctaaagttaacaatggtcacattttaaaaaatcaagttttgtgatataaactatttatatatctctttatatatcaagtctttatgtatattttgtgcagcttgtcttttttataggaacctcttgttttggggattgtttttggttaagaaattgaaccctttgtttgcccaaaataactgcaatagaaagtcagtgataagaactactaaatagatccaggttaattattttaagatagaatttcacatggaagaaaaggctttgtgtcacaatcatctgtgaggcattttactgtatatcagaattttggagtaaggtgaagatgatcatgtcatttgaaaagtcttattggtgactctatttttctcctttgaaggaggggtttaatcacttcaaatggataacattaaggttaaattaagggcgaagttgatatttggccctgacttttatatgaaggtaacatttttgcaagtaaattgtagacgtaattaaaaaaacccagctaaaacaaaggtggtattgagaaagaggaagagcaagtggtctatattgtcagaaaaataagattcatattggagagtaattgaaaataacctgcaaaaagttgattacctaacatgtgattacatattaggttactagaagtttctcaagtgtcttgcaatttctaggtttagtaaaattcaatgaaagctgtactcataaagataaatatgatagcatgtgaaagacagatggacttaggtggatgtggaataaggcaagccagggaaaaggagtaatttaaaaagtaatataggtgacatgggaaatgctcatgtcattaaaaatatgaatttaaaaatttgaatttggggattattaataattgctcatgccttgctatttaacaaactattttctaggagtcagcatgtataggtgaaagtgacaattagaaacatagaaagaagggatgcagatatggatttgtaaatacctcaataaaagtcttattcaaaacttggaagtgagtgagaacaattaaaggaaaggatatgggacagggttgaagttgagagagaaaaacgagatcatttaggaacagctgaagaatcaaaaacagcaaagcacaatgggtagaaattccactagaatttgaagtggtgaagtatatgaaaagaaaatattttaagcaagaatcctaatataagctgcagataaattaaatgtgataaagaatatgctctagaattttatcttccatcattacacagaagaaccttaagagcatctgatatttattgaacaaagaaagcatggacttcaataatctataaggctttaaaaattcaaccaaaatttgataattttaagttacattttttccctagagcactatataatagcatgtcctaggaaagacagatgtgggcaagtttcttttctaccaagagtgtagaatagtttacatttctgatttaaaaagcagttccgttaacacttaaatttgctgaactggttgatattaatgttgcaaatattggtagaaaagttgtttagctgtgaataattagatcccttactttaaattaataaaagaagtcgggataacactgaccgtgcaaattacaaacgtgaggagggtttactataaaagtagagaaaagaagatactgttttaaaaatatatggtatagcactgttacgtgaattgatttcttaccttttggagccgcatgatgtcgctgtctaccatgaagttatagctagccaacattcaaatttcttctattactgcatcattccctgactgttgaatgatggcggacgcagaagaaatggattaataaattccggaacatacagtattttatctttatgcggaagatcttctaatggaaataaaaccagaggtatttgacatggtgtttaccccggaggatagattgggaaagcaatgtctgctcctcccgcttctgctcctcgcagcctggaaggtggggagcggccagctccactactccgtacccgaggaggccaaacacggcaccttcgtgggccggatcgcgcaggacctggggctggagctggcggagctggtgccgcgcctgttcaggatggcctccaaagaccgcgaggaccttctggaggtaaatctgcagaatggcattttgtttgtgaattctcggatcgaccgcgaggagctgtgcgggcggagcgcggagtgcagcatccacctggaggtgatcgtggacaggccgctgcaggttttccatgtggacgtggaggtgagggacattaacgacaacccgcccttgttcccggtagaggaacaaagagtgctgatttacgaatctaggctgccagattctgtgtttccactggagggcgcgtccgatgcagatgttggctcaaattccatcttaacctataaactcagttctagcgaatacttcgggctagatgtgaaaataaacagtgatgacaataaacaaattgggctcttattaaagaaatccttggacagagaggaagctcctgcacacaacttattcctgacagccacagatgggggcaaacctgagctcacaggcactgttcagctgctggtcacagtgctggatgtgaatgataatgctcccactttcgaacagtctgaatacgaagtaagaatattcgaaaatgcagacaacggaacaacagttatcagactgaatgcttctgatcgggatgaaggagcgaatggggcaatttcatattcttttaatagccttgttgcagccatggttattgaccactttagcatagatcgaaatacgggagaaatagtgattcggggtaatttggattttgaacaagaaaacttatacaaaatcctcattgacgccacggacaaaggccatcctcccatggcgggtcatt

SEQ ID NO: 10495 - DNA, 6000 bp, Homo sapiens
ctcgccttcgctgtgggccaccgccagcttgtctgtggaggtggccgacatgaatgacaatgctccggcgttcgcgcagcccgagtacacagtgttcgtgaaggagaacaacccgccgggctgccacatcttcacggtgtctgcgcgagacgcggacgcgcaggagaacgcgctggtgtcctactcgctggtggagcggcgggtgggcgagcgcgcgttgtcgagctacatttcggtgcacgcggagagcggcaaggtgtacgcgctgcagccgctggaccacgaggagctagagctgctgcagtttcaggtgagcgcgcgcgacgcgggcgtgccgcctctgggcagcaacgtgacgctgcaggtgttcgtgctggacgagaacgacaacgcgccggcgctgctggcgcctcgggtgggtggtactggtggtgcagtgagcgagctggtgccgcggtcactgggtgcaggccaagtggtggcgaaggtgcgcgcagttgacgccgactcaggctacaacgcgtggctttcgtatgagctgcagcccccggcaagcagcgctcgcttcccgtttcgcgtggggctgtacacgggcgagatcagcaccactcgtgtcctggacgaagcggactctccgcgccaccggctgctggtgctggtgaaagaccacggtgagccggcgctgacagcgacggccacggttctggtgtcgctggtggagagtggccaggctccaaaggcgtcatcacgggcgtcggtgggcgccgcgggcccagaggcggcgctggtggatgtcaacgtgtacctgatcatcgccatctgcgcggtatccagcctgctggtcctcacgctactgctgtacacagcgctgcggtgctcggcgccacccaccgagggcgcgtgcacggcggacaagcccacgctggtgtgctccagcgcagtggggagctggtcgtactcgcagcagaggcggcagagggtgtgctccggggagggcccacccaagatggatctcatggcctttagccccagcctttcaccttgtcctattatgatgggtaaggcggagaatcaggatttaaatgaagatcatgatgccaaagtaagtgaattttcataattaacagttaatttttattttaaatttataattgttttcctcatatttgtcttctatatttctgtttttaatttttaattaattttacaaaattacatattttcattttattgtgtttcttattttaatctctttgcttctttaatattcataatttaagtgaaattagaaatcactgtccacaatctgcacctcagaatttttgtcttcaaaccaaaatattcttggatatgtcgttttctgttgcattttaattcagaatcatagtagcatttttttctgattaattatatgggattttcatttgtttgcctttgagctttaggataatttttttacatatactcttttttgatcatatattgaaatttgagcaccagtgtatcacttatgtttttacactttccatttcaatgtttttctgtcgacacttttattaagctaacgctttgattttatccattttgtgtaagaactctgatcatcatagtttttatctgtggttcccttttcagacttgtgattccgggaggcaatagtgttcatttattgtcccccttttaaaccattgaggaataaaggacaaaaacaatagttatcagcctgaatacttctggttgttatggttattgatttatttactaccgatctaaataatggaaaaatagtgattcaacagaatttagaccttgtgatcaagtaaatttatatgaaaactgcattcctctggcattgcggctctcttatttctgtttgaatttcacttgatggtcttctcttcatggagtctaaatctatttctttgtattagtgttttcattgtttctacacagtaatttaaactattcactattttgtatgtgtgtgtgtgtgtgtgacagggtcttgctctgtcacccatgctggagtacagtggtgcaataatggctcactgcaccctcgaatgcctgggctcaagtgattctctcacctcagcctctggagttactacacacgagcaccaccatgccccccaccttttttttttttttttttttttttaagagatggggtttctccatgttgcccaggctggtctcaaactactgggtgcaagtgatctgcccaccttggcctcccaaagtactaagattataggtgtgagccactatgcttggctagtcattatttctttgaatgaaaagcagcaaaaagtagtgattaagtgtgagttttggtgttatcctcccttgcctaaatttcatcgctaccaattttgttttgtggatggattgtttcacctctatttcagtttcttctgtaaagttggaatgataaacactagtttcaatgatagaattgtcataaagctttagtaagttgatattgtaaggcgcttataactgtgtttgccaaatagcaagtgcttaaaaaatttgctactagttttccgaagaggaaaagaaaaactttatgtcattttatgctaggaaactctcattacggattccatattgttttcattttacgtaaagattgaatttttgttattcatagtgaggccataattaccaatttaatctgagatgtctctaacattttaaatgccatgttctacattaaaagcaatttaaaatgtgtgtttcaaagttgaaaattgaattaagacttggacagtggaaaagttttatgaattcaaaagacatttaacctgctgagtcctcagtgatttcctggagttggttttgactttttgtgttgtccatgttcccaggaaatattagactacattaagcatgaatggtgtatttgcccacatttaaaagttgcttaagggccattagaggactgagttgtggtttgtgtttcctaatgtgagcattttccattcttgaaatggcagaaactggtagtggtattttctgttttctaaaagaagtacatgataatttttaagcgtgtaattaatattgcactaaaatttaaaaaaactaactctacatacttaagagtggcagaattgtctctgattatactgaagatcaccatttgtgtagctaatgatatctaacagcctcaaaacagcatactttcttaggaagtagagaactatagcgttgctagtgagtaaatgttttttaaaaagttcctaggagggtctttaagagtatcacactgtgcctgctgagaatcatcgaattaacaagacctggcttcaaatttaatagataaataaaggtaagtatcctacataaatacgatgatagtaaaagcaagaatattgtaagaggtgctagaaaggtacatcatagtgttattggaattggaaaaaaatctttgcctttttcccttgttgaaggagaccgtgaagagtcatgatgttttactggttataaaatggaaagagttttccctgggagaatatggagactaacaggtattcatgagaagagagtaacttaagtgagtatacagaaaattccaaatgtacctagaaatgaggaatagtccactttgggtaaagcacatggttcccataagagagagtgtgatataaagcaagaaaagtaatatgagaaaaaccttttgtataactttgagtactagacgagtaattttgacactcttcaaagtcatttgaaagctgtcaaaaagtgtgaagcaatacgaataaaaagtattaacggaagatgactgcaaggattaaatgaaggagaatgaaataggaatggacaggttacacaataagaagctactgcaatacaccaggagagcagcaattataaaaacttatttaggaaagcatctgaatacagacataattattttacatgccattgggaacattggagtgaaacattccagaaaacgaacacagtaaggtagatccaaaaaggatgaaatacctcaagacttgatcaaagggctgctgtatgtgagatggctgagcactgaaatttatctaataaaataaacttacattttaaaagaaataatacaaatcatatttgagattgtaaaaataggcatatattcataacacacaagtgttcgaaaggatagaatgaggaaacaaatataaaatgatgaactcctgaaacagtatatatagattctgctaaagcaaaaaattcagaatacttcctcctcaaaaagttcacatgatacaaattcttccccttcaaagattccccaaaccttctcttattttgttttcccaagagaagtgtctggatagttgctaatgtttcttgcctcctaaaaagaaaacacacacacacacaccgctttctaagtttctctttcatcaatcagtagattcttgagatcctgggtccctaaaagagtacaggatttttcttaacaagcgatactgaatcaagaatatgaagtttcctgggatctagatcaaaggaatttaaacttgcagttgtttaaattcatgttgtcacttaggtttctatctttatttaaaactgtgtgaaaaaaaagtttttctaaggcatgaggaagctacagttctggtaacactgagtattcaaaagccatcagtcgcctaagaatgcttctaacaatcatgagaaatgctattttaacctttaacaacaatgaagaaaaaaattcagagtttgaaataaaacttttcatctgattaatagtttgtaatggtttgtaattcttacttacatgatggccacatgatgtcgctctttaccgcaaattctttcgtaatcagcaaaaggaagtcattccttttcgcactggaaagacgctccactctctttcactctttggatgcacaacaatggccacacatcgagattgaaatgaagggataaaaacattcctataaattcgaaggcaagttttgctgactagaaaaacaagccaataatttgaaatggtgtgcccgaatggatacgacccagggggccgacatctactgctgtttattataattctagcagcttgggaggcagggagaggccagctccactactcggtccccgaggaggctaaacatggcaacttcgtgggccgcatcgcgcaggacctggggctggagctggcggagctggtgccgcgcctgttccgggcggtgtgcaaattccgtggggatcttctggaggtaaatctgcagaatggcattttgtttgtgaattctcggatcgaccgcgaggagctgtgcgggcggagcgcggagtgcagcatccacctggaggtgatcgtggaaaggccgctgcaggttttccatgtggacgtggaggtgaaggacattaacgacaaccctccggtgttcccagcgacacaaaggaatctgttcatcgcggaatccaggccgcttgactctcggtttccactagagggcgcgtccgatgcagatatcggggagaacgccctgctcacttacagactgagccccaatgagtatttcttcctggacgtgccaaccagcaaccagcaggtaaaacctcttggacttgtattacggaaacttttagacagagaagaaactccggagcttcatttattgctcacggccaccgatggaggcaaacccgagctgactggcaccgttcaattactcatcacggtactggacaacaatgacaatgccccagtgttcgacagaaccctgtatacggtgaaattaccagaaaacgtttctatcggaacgctggtgattcaccccaatgcctcagatttagacgaaggcttgaatggggatattatttactccttctccagtgatgtttctccagatataaaatccaagttccacatggaccccttaagtggggcaatcacagtgataggacatatggattttgaagaaagtagagcacacaagatcccagtcgaggctgtcgataaaggcttcccacccctggctggtcatt

SEQ ID NO: 10496 - DNA, 6000 bp, Homo sapiens
cttctggtgcttgtgaaggaccacggggagccctcgctgacagccacagccaccgtgctggtgtcgctggtggaaagcggccaggcaccaaaggcgtcgtcgcgggcatcgttgggcattgcaggcccagagaccgagctggtggatgtcaacgtgtacctgatcatcgccatctgcgcggtgtccagtctgttggtgcttaccctgctgctgtacacggcgttgcggtgctcagcgccgtcctctgagggcgcatgtagtttggtaaagcccactctggtgtgctccagcgcggtggggagctggtcattctcccagcagaggcggcagagggtgtgctctggggagggcccacccaagacagacctcatggccttcagtcccagccttcctcagggtccatcctctacagacaatgtgagtcataaataatcttgtttccaacaattttaaaacaattagttcaattggtctccttaaattttctttcataatttcttttttagttgatagctttatgtataattattattttttaatgttatgctgtatttgcactaattatttggaagtacgtttaatatacacttttgttttgggatgcgtaatactatagatcaaaatctatggtttatgttggctactctccatttttggaggaggactttgctaactggagcaatggattcacctttcttctatagtgtatttacaaaatcaaatatttacatttccatattttgataatcaatacctataaatgttatagtaaacaaatttaatatatatgttacctaatattttattctatgtattgtcctcattttataaaatatagctgtgtcaaaatcatctgttcaattttgcctttttatctttagtctagaacttgaattttaagcatttcttttacatctatttatcttctttttatcatatttgtgtagcactgacttctttttaacttactttgttgagatgtatttgccatgttcatgaagaattaatatgaacaatttaaaatagtttaaatggcagtttaatagtattttttattttgttccttgtttgtataagaaatatattcacattcaaaatttcaaagagtgaaatctagtacgtagtaaaaaatctccttgcctcctcaaaccccaaaccatttactttacctttctgaatttctgaagcagtttactttttttgtatattcccaagattattattgccaaattatataaatatatttacaatcaccaaattgtaaatcgccaatatatatattttataatttgccccttccttccttccttcctttctttctttctttcttcctttttctttcattctttttcttttttctttcttctttcaagacacgctctcactccatcacccaggctgctgaaatgcagtggtgggattatagcccactgcaacctgaaagtcctgggctcacaggatcctcccatctcagcctctggagtagctgggaatacagtttgcatgtcattgtgcctggctaattttattttatttttgtagagacagggtggagtcttgtttcccaggctggtcttgaactcctggcttcaagcgatcctcctaccttggcctcccaaagtattgggattacagacacgaacaaccacacccagcctgcctttcatctttccttttttttaaaaaaagaagtgattacagtagaaacctacctttctgcactttttggttttccactttaagttatatatatatagtgtgtgtgtgtgtgtgtgtgtgtgtgtgtgtgtgtgtgtgtgtgtgtgtgtgtttgacagagttttactctgtcgccctctctggagtgcagtggtgcaatctcagctcactgcaaaatccgcctctctggtacaagcagttctcatgcctcagtctcccaagtagctgggattaaagacgccaacaaccaagccatgctaatttttttttttttttgtatttttagtagaaacagagtttcaccatgttgccccggctggtctcgaaatctgggactcaagtgatctgactgcctcagcctcccaatgtgctgggattacaggagtgagccaccgcatccggcctaaattatatattgggttttgtggcatattatttcattagcgcttattccttgtttttgattatttgctttcttatttttaaaagtatttgcatcttattttcttttatggatatatcatgatttattcatccagtactgtattagggacattaatgaaacaataaccgaattgtctagacttttaaaaattttttacaaataatttggttggtcaaaaaaatgatagttaacggggcatggtggcacacacctttaaccccaacatttcgggaggccgaggcaggaggattgcttcagtctagtagtttgagaccagcttgtgcatcttttgtagagactttgtaaaattagctatgcatggtgatgcatgtctgtagtttcagctactcaagaaactgaggtgggaggatcacttaagccagggaggtccaagctgcagttatcatgccactgaactccagcctaggtgacagagcaataccttgcctcaaaaataaaataaaatgaaataataaaataaaataaaataaaaacccagaactgacaattttcactgttcctaatattctaatatactttagtaaattattttaggatatgttactgttttcttttcaacgtgaataaggatagaggtatgcaaagtcaaaaacctgtctgataatcaatagaattatttaccattaagccataatatgtcattcacataagcagaccaagtttgctgctcttgttgaaagatattcagttttgtggaaaaatctataaatatctttgaccttcaaagatgtaactgtaatctgtttttattgctttgcttttatgcttacatgcatgtatatttaaaaccttcctagcatattattaaagttttaaatatcctatttatattgggaaatacctgaagttgataggggatcctccttagccacctaagctgtattcatcaattattatgatgatgatgatgattattatttttgagacagggtctcactctgtagcccagactgcagtgcagtggcacaatctgggcttactgcaatctctgcctcctgggctcaagtgatcttcctacctcagcctctcaagttgctgggactataggcacacaccaccatgcccaactaatttttgtattttttgtagagatggggtcttaccatgttgcccaggctggtctcaaactcctgagatatcgagaaatactattttctttacaaattgtttgctactatttagagtcaactacagagatttttttgggtaaataatgtgatgacaaatttaaatcatttcacagaaaatacccttatttgcctttcctatttaacctacgtttttggtaagaattttgtagaaatttggaggagctcttaattgcctactatgaaggcattcatgatgaatccatggagaatttacttttgaggtggactttgaaagatgaatagaattttgacagaaaaagatgaagtaatagaagaaaaaccttgaacaaagagtgtgccaagaaggagacaacatattttctgtaaaatatgactcctattggaaagtggttagccttagcactgagaagattggctcatggtcacgtagcgtatctcccagatggaagtctaatgtcttgacaattagtcaatagaaagataaacttgttgaagattttagtgaaatcgagtgaaagctgtactaataaggacagaaattatcacacgtgaaaggagagatgggatgtatacaaattttaaatatggtaggcaaaggaaaagaagtcataaaaatacatatgagtaaatgtggagaatcactatgctataaaaattgtgattttttaatgatttgggttttgggtgattattgattagatattcttttaactttggtcgactcattttctaggcaatgttagggtatacaggtaaaaatgtcaggtagaaaatgaaaatagggggttgcagatatggagttaagaatacttcaaataataggctagtttaaagccgtggaaatagaaacgttaaataaaaagttggggaaaaaagtttaaaggcataattctggtaaatactcactttttggagcagaagaaagatgaagaactaacaagccaatgatggcaatactgctagagtttggcatgtcagagaaatcataaaggaaaatgttttaagtgagaggctgaatttaacaagctatagagatatagagaaatagtgtaaagaatatgcacatacatttttattactttagtaaataaaacggttcaggcaatttgacatttattgaataaagaaaagcaaaaatttaacaataagaacacaagaagataaaatgtagaaaagttagaattatatgctcacctcagagtaatatataccagtgtttctggtgaccaaataaatattaatgcatttcttccacacgaaactatggaggacagtttacatttctgatatccatgacatacaggtcatacttaaatttattattaattgatacgatatttgaaatattgggaagaaattcctttccttatgaagaagaaatccctagctgaaactaatgtaaggagccagacagtatgaatgcctctgcaattgataaagttaaggatttactattaaattatgataaagaaatagaaagtgcatagaagaacccagatattgcggaagtaattcatgtaatcattaccttttgaagccacatgatgtcgctgtctaccaagaagttctggttggtcaatgttcaaagtcttttctctgacagcatctgtctctaaaggccgaacaacgggagatgcagcggaattggattaaaagactctgaaagtacagtcgttcatctttatattaagataatattttctgataggaaacgactatttaacatggattatcactggcgaggagagctgggatcctggcgactactactcttgcttctgctcctcgcagcctggaaggtggggagcggccagctccactactccgtccccgaggaggccaaacacggcaccttcgtgggccggatcgcgcaggacctggggctggagctggcggagctggtgccgcgcctgttccgggtggcgtccaaaagacaccgggaccttctggaggtaagtctgcagaatggcattttgtttgtgaattctcggatcgaccgcgaggagctgtgcgggcggagcgcggagtgcagcatccacctggaggtgatcgtggacaggccgctgcaggttttccatgtggacgtggaggtgaaggatgttaatgacaacccgccagtgttccgggtaaaagaccaaaagctgtttgtttcagaatccagaatgccagactctcggtttccgctagagggcgcgtccgatgcagatgttggagctaactccgtgttaacctacaggcttagctctcatgattacttcatgctagatgtgaattcaaagaacgatgagaataaactggttgagctcgtattaagaaaatccttggacagagaggacgctcctgcgcaccacttattcctgacagccacagatgggggcaaacctgagctcacaggcactgttcagctgctggtcacagtgctggatgtgaatgataatgctcccactttcgaacagtctgaatacgaagtaagaatattcgaaaacgcagacaacggaacaacagttatcaaactgaatgcttctgatccggatgaaggagccaatggggcaatttcatattcttttaatagccttgttgaaactatggttattgaccactttagcatagatcgaaatacgggagaaatagtgattcggggtaatttggattttgaacaagaaaacttatacaaaatcctcattgacgccacggacaaaggccatcctcccatggcgggtcatt

SEQ ID NO: 10497 - DNA, 6000 bp, Homo sapiens
agatatgattttccctcctgtggttggccagttctcagaataaactgttaagtgggagatgttctgctttttagagcttgctcaagttttggggccagctaaagttcagggacctgtggggagaagagaagccttattaaagtttagttaaggtaagccaatgggtaagtcataagtgattacaaacactcttgtaactcttccaaaactctgaaatattttgaaataagatttttgaagtttaaaagttagtactaagatacagttttgaaatgaatttttgttctcccaaaacttcatgatatcctactaactgtgggttgtccctcttcccaacatgtaggttttgatcctgactttacaagctacgacgctgtagatttagtctgtgggttcccaattttaccttcaccagaaagtatacaggcttaaaaaaaaaaaaaaaactgccaccatgtttaaaggtcctaacattttccaaggaaaaagaaaatattttggattttaattccatctagcagatattaataaatcgcctggggctaaccaaacagattaagattcagaggaactgaattgaaaagcagcatttctgtgcctggcttatttcacttaacataacgtccttcatgttcatccatgttgtgacaaattgcaggatttccttctttgtgaaggctgaagaatattccattatgtacatatactacattttctttattcatttacccaccgatgggcacttaggctgattccatatctcagctattgtgagtaatattgcaatgaacatgggagtgctgatatctcttcaacatactgatttcatttcctttgaaaatatccccagtagtgggattgctggattctatggtagatctatttttaattttttgaggaccttctatactgtttttcataatggtgtgacctcatttatacgtggaatcttaaaaagttgacctcatagaactagagagtagaatggtggttgccaggggctgggatgaggaaggagaggttggagagccaaaaggatacaaaatttcagttaggagaaataagttcaaaagatctattattcaacatggtggctatagttaataacaatgtaccatattcttgaaaaatgcccaagacatggatggtaaatattctcaccacaaaaataataactacgtgaggtaatatatatgttaattagctgaatttagtcattctacaatataaatatgctacaaaatactatgttgtctatgattaattttatctgtcagttaaaaataaactaacaaaaaaaaagaaaataaaaaaagaaaagcagcattgcttaaacttcacctcataagaattttttttgttttgagacagatactgactctgtcacccaggctggagtgcagtggtacagtcatagctcactgtaacctcaagttcctgacctcaagcaatgctctcccctcaagtaactgggactacaggctttgtcaccatgccttatttatgtatgtatgtatgtagagacaagggtcttgctatgttacccaggctggtctcaaactcctggcctcaagtgatcttcctgcctcagcctcctaaagtactaggatcacaagcatgagccaccacacccagccaagaatgtatttgttaacttacaatttttttgatgaattattttgaaattgattgtattaagacttcctaggatgtcagaagcttctgcataatttgtgaatcactaaataaatatttccttttaaaaaaaacctccccaatagcctttttgatgatgctaaataacattagtgggtagtatactccattttttttttctatcgaaattgctcaaggctattctctgtttatgtatattgactaagcataaacatcttttttaatatattcaggactcatagaacataaagaagtaatagaaattaatagaaaaaaaggtaaacaatgcaatgttaaaaaaaggcaagagaactgaacaaaaacttcccaaaaaatgatattccaatgactacaaatatattaaatagtgtctacttcatcaataattaatgagaaatgcaaattaatcagtgaaatgtaaacacagtcactcaccagaatggtcaaaattttaaaagactagtaattctaagtgttggaaataatttgagcaactagaagttgcactgctgatgagagtgtaaatcagtacaactttttttttttttggatggcgtctcactctgtggctcaggctggagtgcaatggcgcgatctctgctcactgcaacctccatctcctgggttgaagtgattctcctgcctcagcctcctgagtagctgggataacaggcacgcacaaccatccctggctaatttttgtattttcagtagagacggggtttcaccatgttggtcaggctcatcttgaactcctgacctcataattggtctgcctcggcctctcaaagtgttgggattacaggcgtgagccaccacgcccagccagtacaacttcttagaaagcagtttggtgacatcacgtaaagctgaaaagaacatatcctatgatatcaatgctacttctatgtatatattcccccccaaaatatgtgtatacatgtgcacaaagtgacacgtacaatgatatgctatgagcagcagaataataaaataggtaaatgcattttgctgcattcatactgaaaaagacaaaagcagtccacgagagctaggagctggcctgacactcacagctaggacatagtgatcttctgttgaacaaaaaatgatttcataggacaccagtatcagacaaggccataccatgactatgatggagcaagaggaaaatgagagcacaccataagtgtgtctaaatacagacaaaaaagagtattgtccaatccacaaaaatgcccaaacatctttctgtcctggctagtattagtcacttcagcttacttaccaatcacagagttagcctcacccctttcctctcaccttctacataagaattatcaatatactcatcatagagttaactccacttatgatgacatccaatccagagcactctgcttcaaacctcccccaaatcatctaacacaagaccaaatatatgttctttctaacaccgtttcactgagatgctccatgactctctatggtgtacagcttcccttgttataataagtcagtaaatataactttgttcaactacaggtgtgtgtctgatggtctctagctaaaggacattgacaatatattggtattttatacggtaatggaaataaatgaactagagctaaagataacaccaatcttacattgagctaaaaaatgagggaaagaaacaaaattcaaaggattacctactgtacactttacttgatacatagttttgttttatttctactcatactcaagtaagatatatagttttcaaaagaggcaaaactaaactgtttaaggatgcacacttaagccaggtgttaaaataactgacagagattgagagattcattaattccctcatgtcaggatgtaattaatgttctgtacactttctactttcattctttttttcctattggaaaatatagttagatttccgttaagtggccataattttatagcacctgggacataaagtattgagcacaaatgagaaatcaaatgttttaggtaatgagcatgagacagcatcagaagacaagttctagttcttacactgccatgagtagctgtatgaattgggcaagtgacttcatcacttcgggccttagtttcttcatctgtttttttttttttttaaagtggagagtgggtgagaaggagactggatctcatctttctgaaatgtcttattaaacattctattatcctatgatcataaaggaaactcaacaaatatctcctatatttctattaggtcattttcaatatgtgtaagcaatcttattttatttgctttaaaatccaaaaccaaatatttatcttcatttgatttattcattatattatctgggaagcagagtagtgtactgattaagagcatagacttcggagtcagacaaaattaaattgagttttatttctaacatttgctaggtaggggaccttgacataacctctcccatctcactttctttgtctttttttttttttaataatgtctactccatatagttgttgcaagtattaaattaaataatgcatgtaaatcacttgtcatagtctcagtacatggaaatcatatccaataaatactactgccattataatcataagtgacaagccagctgctccctttgtgcacgtgtatacagatatttggaggggggcggagcgaatacgtagaagtagcatgatagcgtagtgcaaatcaagaggtcagttggcttagtcccctgtcagtgtacttactggacctcaagtttctgaaggagaatgtctgttcccattccttttcctactgaccacttcctccacattctctagctccctgcctcatatatttggcttgggcttcggaagactctgcaggatccttgtgcttctttcttggtctctggatggaccgcagagtgtgcagatgtagcttaaacttgttgctgttcgcccacagcttcagtggctccagacagctagcagatagaatgacttcagcttgaacgactaatctcattggcttctcaattcccaaggactttttttcctgaaagggaattaacaggtgagtctgttgttgctttggcaacaaactttcaacctctacctaactctccggaatgagaacatatctattaatacattcgctagactggggagttgagtcgctcaatgcaaattttctttcaagtgcaaaacagcttaatgggctcggctagcctttggtggtgctgcagttagaggctagtgaagcggagagcagctgttgcagtaacctgttgcagaaaagtgaaagtatatccgcaacagttggctctgattgcagagagcgcgcttgtgagaactgatggcgggtacgcgcagaaaatctttgcaaaacaggcaagtgggatctcttctcatttttctgtgcatatctgtgggggatgcgacaactatccgctattcagtggcagaggaaatggagagcggctcgtttgtggccaacgtagctaaggacctaggactggaggtagggaagctggctgcgcgcggggcgcggctggtttccgagggcaacaaaatgcatttccggctccaccgcaagacgggagatttgtttgtgaaggagaaactggatcgggagtcactttgtggcaaagccgacccttgtgttctgcactttgaagtagtcctggtggagccgctgcagtccttccgggccgaggtcagggtatttgatatcaatgacaatgccccagttttcctaaacaaggagccgcttttaaagattccggagagcacccctttgggttcacgttttcctctgcagagcgcccaggatctggacgtgggccttaacggtctccagaactacaccctgagtgccaatgggtatttccacctgcacacccgcttctgcagccacgggcctaaatatgctgagctggtgctgaacaaacccctggaccgagaggagcagcctgaagtcaacttgacaattacggcggtggacggcgggtccccgcctaagtctggcacagctcacatccacgtggtggttctggatgtcaacgaccacgtgccccagttctcgcgactggtgtacagagcccaggtatcagagaacagccccaatggctctttggtggccacggtgactgccgtggacctagacgagggcaccaacaaagcgataacttactctttagctcaaaacccagaagcaattctcaagacgtttcagattgaccctcaaaatggagaagttcgactaagaggacccctcgattttgaagccattgaaacatacgacattgacattcaagctacagatggtggaggcctctc

SEQ ID NO: 10498 - DNA, 6000 bp, Homo sapiens
atttttagtagagacagggtttcaccgtgttagctaggatggtctcgatctcctgacctcgtgatccacctgccttggcctcccaaagtgctgggattacaggcataagccacagcacccagtccatattttcttttaaagtaaaatttcaatagtgatcttagtgaaaattcaatcatctaccagattacctaaacctgatttaagttttaacctattttaatcataaaaaaaagtctgagatttttggaagaggtcatacctctgtctctctcatctctatttccatctatatctgtctatctagctttatctgcagtcctggtcaagatttttattttcaaggggacagattgtcctaatagactctgatggttctccttaaacaaaattgggcaagattcttgtgcaggtatcattttaaaaaccttttcttgcttatttgtactgtgggaagagaataaacaacaccatttcccctttttgagttatatttatttcttgtttcatttgcttgtttgtttgttgttgttgttgttgtttgagacagggtgtcgctctgtctcccaagctggagtgcagtggtgtgatctcggcttactgcaacctctgcctccagggcacaagtgacgctaacaccccagccccctatgtagctgggactatgggcgtgagccaccacacctggctgattttttttttttttttttggtagacatggggctttgccacattgcaggctggtcttcaaaactcctggactcaagcaatccacccatcttggactcccaaagtgctgggattacaggtgtgagccaccacgtgtagccgacctttattttgaaatcttgtttgcttgagcttcatgaaatgtatgtcttgatagattatggggaaacttatttgtatcctcaataaggtaaaagtaaattagttgaatatgcccccaattttcacactagattagggtaataaactatgccagaacactcccttcttgtcctagaatatttctcttatattttctgcagaatcttagtgttagatcactgaaaacccctccttcttctgccatcttatggctgagtaagtaaagccagcttgtgggcagaaggcattgaaaggctgaagatccctctctattgaaagagggatactagtggggataatatctccatatcatttggcattatctttgataggaaaatggtcatgtaaatccctttgactaccctttctcctaattcttgtaattttcatctcatggcagtcaaaagatcaaatcaccctttagtccaaaaaagagagaggcaagcttaattatgacagatactcaaacaatgtgttcttatttagtttttgaatggctgtacttttgtaataagactgtaatgacttgctttcatttttggtatgtttttgaaaatatttttctattcctgtatatgaaattatttgtgtaacattttaatatgttagattttattaaatgaatcttcaaaattatgaaagtgactcctaggataatgtctctgcttgtgcagcatatgaaaagtaaagcgaaacctaagaaattaaacctactgtaataacataatttttaaattatgcaatagattcccctcattataatataaataattactatatgtaaacatatttcattcagacttataaatatgctataaattataatctaatatatatgattccttattaaaggagattaagaaaataagagcatttgtaaagaaggaaggtgtattctcatcaaggtttaagaaaataaatgatttaaaatagcatagcggatataatgcatttaaagctggaaacctatatacgaatataaaatattggtgttggttatataatctttgaaaaagagaaacttacttctatttctaggtgtgttaatagcattgaaatgaaagatgggtaaaaccttctgaattgtgaggacacatgacaacatgagaggttttaaaatttttttcacaataaaacctaatgtgttcttggttattgtatcctctgaaatatcttagatattaagttttctattctccagcttgtgagaagagattatgttattttcttcatattacctattttcctctcctttatgttatcccaaattaaccataactgctttagttcagaaaacctgtccaaaggaaatagccatatacctggttaaatataaaatttcgagtaacctaccagttataatttgcctgtatgatataactgatcttcactacatctatttcggaccctaatcaggttttgcagattatataaaaagctgtttttaaagacttggaccttgggtgttattcacctcaatgaatttgtttaatgctcaatgtcaatgaattaacatattttgaattattataacatccatataaaagtaataatcatggaaagcaaaaaataatatcaacaggtagagataggcatttgttttctaaatgttaagaaaaggaacctgtgattatcctttttttagccagttacaagatgataaatgagagctttttaaaatattatgctattgttacatttaataaatcatccagtccagttttctgaaaatacaggggatagaagaacaggttaaatgataccatgaggaaacaatcaaatttggaatgtaggacatcctacaaaacaactagtctggacacttcagaaatctaatgtcattaaagatgggggagtattctagagtaaatagatctaatagccaaatacaattatcaaagttggttgaaaaagtttctaagacattccttataacaaatagttaaaaaagtaagtgcatttgtcaaaggaacttgagtgagtgtgaattcttatcaaaattgaggaaaagataatggaaagacagtgaaatttgattggggctggattttagataactgtagaatttttttaaattttcttaggtatgatagaaccattatgattatatgagataatattataattatgtgatacctgctgaaatatttagaggtgaaatatgatgtctgcaagttactttcatataagtcatcagaaaagcgggtgtgtgtacagaataagatagaacaaatatggtaaaatataaacaattgttaagtttggatggaggttagagttgtagtttatgtatagttcttttaactgttctatatatttaatttttttcttcatcccccaattttttaacccaatggatcttttagagacacatcctaatatttattattattattattattttgagatggagtctcgctttgtcaccaggcttggagtgcaatggcatgatctcagctcactgcaatctccgcctcccgggttcaagtgattctcctgcctcaccctcccaagtagctgggattacaggcacccatcaccatgcctggctcattttttttgtatttttagtagagatggggtttcaccaggttggccaggatggtcttgatctcttgacctcgtgatctgcctgcctcggcctcccaaagtaaaattattttttaaagcagccttagagtttacagaaaattgagcaaatagtacaaacagttcccctcacataccgattttctcccactcaaagtttccctgttatcaaaatcttgcattactgtggtacatttgttacaattgatgagccaatactggtaaattattaactaaatttcatagtttagtgttcactctttgtgttgtatagttctgtggattttgacaacggcataatgtcatgtatctaccattgtagtatcgtaaagtaccccatgtttaacctcttcatccccctccctcttcttcctagctatcacttgtcttttaaatgtctctataatttggcctttttcagagtatcatgtaatttgaattatacagtatcattgccttttcagactggattctttcactgagaaatatgcatttaagtttccttcatgtcattctgtggcttgataacttctttatattaacattaaaaaagaaacaaaaagacaaaattaaaaaacctaacaacaaacaatgacatatataccctgtttggaagcagattgaagaaaccatcactgaaaagacatttttaaagataattggggaaactggaatatttactggctatttaatattatgaaattgctctttgctagatgtggtaattgaattgaggttatgttgaaagttctcctaggcattagaaaggaaaataatattgatacatttacaataaggaaatatctggctgctcttggagagtttcatgaggctcagacacatcaaagttcaggaaaatgtgaagtgggagcagtgcaaagaaagaaatatgagtaaggagactatttcagtgcccattaaaatactcttatttggattctgtgcttttcctgggtctctgtttttcagctgggtttgagtgtgatgatggtaatctaaccaccactgagttgcacacatgcccaaactctgaataaaaatagaactttcttagtctaagccttctttccgaagcatgctaggactgagatcactcccttccaggttctgaaatttattttttccagtttgaaaaaaaaaaaaaagcttggatttgtgagggaagtgaagatttatttattcttgccctgtctctatgggtgcaatgaagagcctttcgaaacgccaataagacttcggtacactgagagacactacttgaaaatactcaatttcgattgccatcagcctgaaagaaagcactgggattttcttaaagtttaggagaaaataaatactcggaagagacgcggggtggcgctgcagccttagaagtagcagaaacaaagcacccagccgacgctccttacccagatactcagctaaagaagcagcaagcaggaagaggaggctttctaaggcggtcgctccgggaaatccgggccctaggattgtccactcatcccagtatcagcgagatacggggagatagagttagcgacaacgtgagccagagctggagcacgtttggtgagagaccagaaagcaatggaggccggagaggggaaggagcgcgttccgaaacaaaggcaagtcctgatattctttgttttgctgggcatagctcaggctagttgccagcctaggcactattcagtggccgaggaaacggagagtggctcctttgtggccaatttgttaaaagacctggggctggagataggagaacttgctgtgaggggggccagggtcgtttccaaaggaaaaaaaatgcatttgcagttcgataggcagaccggggatttgttgttaaatgagaaattggaccgggaggagctgtgcggccccacagagccctgtgtcctacctttccaggtgttactagaaaatcccttgcagttttttcaggcggagctacggattagggacgtaaatgatcattccccagttttcctagacaaagaaatacttttgaaaattccagaaagtatcactcctggaactactttcttaatagaacgtgcccaggacttggatgtaggaaccaacagtctccaaaattacacaatcagtcccaatttccactttcatcttaatttacaagacagtctcgatggcataatattaccacagctggtgctgaacagagccctggatcgcgaggagcagcctgagatcaggttaaccctcacagcgctagatggcgggagtccacccaggtccggcacggccctggtacggattgaagttgtggacatcaatgacaacgtcccagagtttgcaaagctgctctatgaggtgcagatcccggaggacagccccgttggatcccaggttgccatcgtctctgccagggatttagacattggaactaatggagaaatatcttatgcattttcccaagcatctgaagacattcgcaaaacgtttcgattaagtgcaaaatcgggagaactgcttttaagacagaaactggatttcgaatccatccagacatacaca

SEQ ID NO: 10499 - DNA, 6000 bp, Homo sapiens
ctgaagacattcgcaaaacgtttcgattaagtgcaaaatcgggagaactgcttttaagacagaaactggatttcgaatccatccagacatacacagtaaatattcaggcgacagatggtgggggcctatctggaacttgtgtggtatttgtccaagtgatggatttgaatgacaatcctccggaactaactatgtcgacacttatcaatcagatcccagaaaacttgcaggacaccctcattgctgtattcagcgtttcagatcctgactccggagacaacggaaggatggtgtgctccatccaagatgatcttccttttttcttgaaaccttctgttgagaacttttacactctggtgataagcacggccctggaccgggagaccagatccgaatacaacatcaccatcaccgtcaccgacttcgggacacccaggctgaaaaccgagcacaacataaccgtgctggtctccgacgtcaatgacaacgcccccgccttcacccaaacctcctacaccctgttcgtccgcgagaacaacagccccgccctgcacatcggcagcgtcagcgccacagacagagactcgggcaccaacgcccaggtcacctactcgctgctgccgccccaggacccgcacctgcccctcgcctccctggtctccatcaacgcggacaacggccacctgttcgctctccagtcgctggactacgaggccctgcaggcgttcgagttccgcgtgggcgccgcagaccgcggctccccggcgttgagcagcgaggcgctggtgcgcgtgctggtgctggacgccaacgacaactcgcccttcgtgctgtacccgctgcagaacggctccgcgccctgcaccgagctggtgccccgggcggccgagccgggctacctggtgaccaaggtggtggcggtggacggcgactcgggccagaacgcctggctgtcgtaccagctgctcaaggccacggagcccgggctgttcggcgtgtgggcgcacaatggcgaggtgcgcaccgccaggctgctgagggagcgcgacgctgccaagcagaggctggtggtgctggtcaaggacaatggcgagcctccgcgctcggccaccgccacgctgcacgtgctcctggtggacggcttctcccagccctacctgctgctcccggaggcggcaccggcccaggcccaggccgacttgctcaccgtctacctggtggtggcgttggcctcggtgtcttcgctcttcctcttctcggtgctcctgttcgtggcggtgcggctgtgcaggaggagcagggcggcctcggtgggtcgctgctcggtgcccgagggcccctttccagggcagatggtggacgtgagcggcaccgggaccctgtcccagagctaccagtacgaggtgtgtctgactggaggctccgggacaaatgagttcaagttcctgaagccaattatccccaacttcgttgctcagggtgcagagagggttagcgaggcaaatcccagtttcaggaagagctttgaattcacttaagtgttaataaggatctactgaggctagtctcgtttaatttgtggaaagtccttttttactgctttgcccattggaggtgtctccttttattagaaagtaaccatcttattccaattctatgcatgttactggtatttataaatgtatgagtttttttgcggtataataaatgtaaattttctttgtattctaattgttggttagtttcattgcaatttaattgcatttaaagtgtaaaagtaaattttgtattttcagaaatctttaagttagagcatcttttccagacctcacagtctatggtcctagataattttgaagtcctacatttgaaaatatttgttatcattacatgagttatattttccagcccagaatatttgtgttttttatatcctcttaggctagtgtaaattctatcctgtgaattcacattggctaaccctttaaataggtatatttatgaataatatagcaagcaccgtccttacgtttttcaatatatgtaatttttttttttttttgagatggagttttgcacttgttgctcaggctgtagtggagtgcaatggcgcaatctcggctcgccgcaacctctgcctcccgggttcaagcgattctcctgcctcagcctcccaagtagctgggattacaggcatgcatcattatgcccggctaattttgtatttttagtagagacagggtgtctccatgttggtcaggttggtcttgaactcctgaccttaggtgatctgcccacctcagcctcccaaagtgctgggattacaggcgtgagccaccgccccccagtccaatatgtatacttctttcaagtgttgacatatgaaaagtattagtctttagagattgtaagaattttaactgttggattctacaaggcactaacatcataagtgctctaataaatttttgtcaaaagtcaatcattaatattcaaaaatgtagataaataatacatgtctagcaattttcaaaggcatgctaattcatcatgctttctctttcaaatagtttttttaagagccctctgcttattccagtccccccctttaaaatcttttaaaattattaataacctattaactttgagcacttcattaaaatccaaaaaatttgagggagtacatgtctttgtcctttacctttagaaccctcaaacatagcttggtattgctgtttttaaaattttctggagcatttaggattcacttagaaacaagcctttagggagaaaaatttatctagcaccactcactctatttttttgcactgactacttctatttttccccctttcatttccctagacttttcaatgcttttttataaaggtgcttgagttctgtttctcaacagctccctcatttattgaatgattcacacagtcactggaatattataggctcttaataaaatttttgaatgattgaaagagagaaaagtattttacctgtgatatattgatatttaaataaactagaacacttaaaggaaaacattttgctggaatcaaatactctttggtgtacaatgaattataattttgttattaattgaattggttaccattgtttgaacatgcagttatcattctgttgtcgctttccttcaacatatttttactttttctcttaatgcttaaattgagcctcctttcctgtccactggcttaaggaatacagatggcttttaattttattacttaaatttccttccatagttccctaaatgactcacccaactgttttcatttcttgcagtttactttctgatccatacattaaaacaaatcttaattcttaatgttactcagtctatctttatatttttatatcatttttacatacatttgaatgagctatcctattaaaattttaatattaactttgaaggtcttgttttgagattagcaatggtgtagagcgctgtgttggtatcaaaagtctctgatcaaccaactcattacctgtaggattttggatgagtcacaaagtttcttttcttctacccaaatgatagcaggtatttgaatagcttgcagttatactcaatataaagacataaaagtgaaattgctgttatttttagtatcactagtattaagagcaaacattcttgataattgtgtagaagtacaaaagcggctacattgaacacatatttgcactgttttatttctgtaccaacaaccttgcaatggcttccttttgttcttagaataataaaatccaagcgcccattatttggccttggtttaccttttcagccttcctttccacttactcttgagacattaagttttgtattcactgtacttcattcattatctattaatagctatgctttgctctctcagggccttcacacattctacagtcttagcctggcacacttctcctatttcatgtttcagattaaatggtgcaccttgggggaaactttcttaatcactctccattaagttaggtccccgtattgcatactttcagtgcactcagtaccttttctatgtagcacttttcacactgtttaaacatctgtttaaagactgtacacccactagatggaaaattgttgtaagatatacagacattgtcttgttaccaccacttgcctaacttctacaaactcaacaattatctgtggaaataaactaatacagatgaaatgaataattgtaaatttgctctgaaataagaagagaaagcactttaagtgttccttgagcatgataatctggaagaaattaggtatttgtagtcctctggatccatctctgacatgatatattttcttttttaccaccttgcaggaggtgtcttttccttgtatttttctggtatatgcaattcgggctcatttcacaaagtttaggaaaaaaagaaaaacataaataggatagtgaagcatgctatcatctagagcaaaaatcttttgaagtttgtgtgtaattattacaaaaggggaggggtaaactagtatgtgtacacttccgttaaatcgtgtaaatgaggactctaccaggaagaatcgctgctcgtagataaaagtgcattttatttccctagattgcatttatttaattcatataacatgagaaactcctccagtagcgtcaactagggttgataagaataatcgataaagcaaaataaaaacaccttctccaagattttgtaactgcaagcgaacgcatggtggcgctgttgactaagaaggcgaattaaaccacaggcattgtgcatgctcggtgacgcacggatccagtgtggtaaaccagcggttgagagcccaggcagatttttgagccagcaagtctgagcctctggaaaggcttattcactaggccgtctacaaaggttgtggggcaaaagactgtttcccagctctgtctgaggttcagcttggcgacattccctggaagagcgtgacggaaagtgcaatggaggcgggaggagagcgatttcttagacaaaggcaagtcttgcttctctttgtttttctgggagggtctctggctgggtccgagtcaagacgctattctgtggctgaggaaaaagagaagggctttttaatagccaacctagcaaaggatctgggactaagggtagaggaactggccgcgaggggggcccaagttgtgtccaaagggaacaaacagcattttcagctcagtcatcagacaggtgatttgctcctgaatgagaaattggaccgggaggagctatgcggccccacagaaccatgcatactacattttcagatattactgcaaaaccctttgcaattcgttacaaacgagctccgtatcatagatgtaaatgaccattctccggtattctttgaaaatgaaatgcatctgaaaatcctagaaagcactctgccaggaacagtaattcctttgggaaatgctgaggacttggatgtgggaagaaacagcctccaaaactacactatcactccgaattcccacttccacgtactcactcgcagtcgtagggacggaaggaagtacccggaactagtactggataaagcgctcgatcgggaggagcagccggaactcagcttaacgctcaccgcgctggacggcggctctccccctcggtctgggacagcccagataaacatccaggtcttagatataaacgacaatgcaccagaatttgcacagccgctctatgaggttgcagttctagagaatacccccgttaactctgtcattgtcactgtctcggcttctgacttagatacaggaagttttgggacaatatcatatgcattttttcatgcttctgaagaaattcgcaaaacttttcagctaaatccaattactggtgatatgcaactggtcaaatatttgaattttgaagcgattaatagttatgaagtcgacatcgaggccaaggatggcggaggcctatccggaaagtctacagtca

SEQ ID NO: 10500 - DNA, 6000 bp, Homo sapiens
agcattttggaaggccaaggtggaaggaatgcttgaggccaggagttcaagaccaggatgatcaacataacaagaccccatctctacaaattttttttaattagctgaatatggtggcttgcacctgtaatcccagctactcaggaggccaaggcatgaagattgcttgagcccaggagctcgaggctgcagtgagctatgatggtgtcactgcactccaggggcctgtgtgaccttgtctcaagaaaaaaagatttaaaaagggatttgaggccgggcgcggtggctcacgcttgtaatcccagcactttgggaggccgaggtgggcagatcacgaggtcaggagatcgagaccatcctggctaacacggtgaaaccccgtctctactaaaaatacaaaaaaaatagccgggcgtgatggtgggcgcctgtagtcccagctactcgggaggctgaggcaggagaatggcgtgaacccgggaggcggagcttgcagtgagccgagattgcgccactgcactcccgcctggtccacagagcgagactccgtctcaaaaaaaaaaaaaaaaagggatttgaatatacctagtcctaaagttaaaaatgttaaattcatactattttgaatagtctattttaaaaatgaaagagtatttttaaaacttcaccatgacttgaggatggttttgttcttactttgaaaggggagaatagaggaaaattaaacattaatttttgagagaaagagataaatttgactattatttctttaaatcatatttccaatagcactatttcaaaatgttaagctctcaataataaatggttactatcaatggtttgtggaatttattagaaattcttataaaaggaatgatctcctggaatgttctattaaatgggtacaatagatacatcagctgaccatttgaatgaaatagctgtaaagcaaacaatagtgctcagtggtgaaagcaaagtaaattttacattagctaactttccaaacttaaacctataagatatttttaaagtcacactcactgaaatgtacatgtaggaaggggatacttgaataattagagtttgacttgagaaatttgtgatggaatctaagataatttctaataattttttctagaataaaaatagcatttataagtttaatatatcaaaatactcaaatatgtgatatataacttagaatatatctttacaatcagaaagtgtgggcttttcaactttgttcctcttttcccaagattgtattctgggtacctcgcattttcatgtgaattttacggtcactttaccaatttctgcaaaaaagccaactgaaattttgatagggattgcactaaatctgtagagcaatttggagcataccaatattttaacaatcttaagtcttccaatccatgaacacttttcatttacttagatcttctttaatttctttcaatgatgttttgtagtgctcagtgttcagttctcccacttcttttgttaaatttattcctaagcattttattccttttgatgatatctattataaattccattgctttcttgatttcatttttgatttgttcaatgctactgtatagaaatacaattgatttctgtatagtgatcttgtattctgcaagcttgctgaactcatttatttattttagtagtttttggttttatttttttgagaaagagtctcactctgtcacccaggctggagtgcagtggcacagtcatggctcactgaagcctcaatctcccaggctcaagcaatcctcccacctcagcctcccaagtagctgggactacaggtgcatgccaccacctctggataattttttttttttttttgtagagacaggatcttgctatgttgctcaggctggtctcaaactcctgacctcaagtgatcctcctgcttggcctccaaaagtgctgggattacaggcatgagctgccatgcccagcctcaaatttctttaaaatgatttttatctttcttcaacgataaggttcttgcctatattttaccagagagcaactagtttcctgcgtatccctctattttatctttctttgtatatttaaaatgaaaaaaattaaatatcatgcttcagatctggcaaccaattatgtaaatagtcatatgaatccttcagaatggataacacagcttttctgactggtgtgaaatagttttcaggtgctcattctttacttcattagcttatcttatatcattagcttatcctccattcaggtataacagatcttttttttctgataaatatggcagtttagggaaataaactatggcataatatgctaggccattcttctaggccacgcttcttgattgtaaccttaaaccctttatcagaacctaaacaacttttcaaaagatctatacatatttttatccaatgtttaaggctatgagtaattcattatgtcactcttcatttttttcacctgataatgatctcgacaaaaatgttgagtattagttttccttccaatgtgtaagttgtataaacatctctctttactggtaactaactatctctaaagggagacaagtaatttttaagtttctaataataattgaaaatttgaatataaatatatttcacctatgataaccatgtacccaaggcaaggctgaagttgggatctaaattatctgaaaagttgttcacctctccagctctgcttaggtatagaaaagaatggtttctggagtcacatagtaacagtttaaatcctggctctgccgtttcacatgctgtatgactttggacagattatttaaactctgtgtgccacaattcttcgtctttaaaatgtggctaataagactgcccacctcatagggttgttggggtgataaaatgagtcaacatacgcaaaatgcttagaaaaatatctggtgtatagtggatatatatgttaatgttattgagatttcatttacttttggattgcaaaaggaactgaaaagacccaattcttactctatgtcaacatgtaggaataagtaaacaaaatatggtttgaattttgtcctgaatgcattaacttgaatctaactaaaacctggttactatattagaaacaattttctctttgatttgcccaggagatttgttttccagttatgtctaaaataatactctttctttttattcttttcagtatatatttttattgtttttcatttaatagtgatgcatagtgtatcttttctgatttactttaaatgtgaaagaaaattctaagatgttaatattattattactgccattgatatatcccttataggaattaattaatagaaatagaatcaaagtaaatttagttatataatgcttagcatgtattatattctcaaaattctgtattcagtttcagacatgttcaaggctgaatatatgatctgacaataatctgcttatatagataaaaacatcatttgagtggattaatttattaattcaactggtatttactaaataaaatccatgtatctttcacaatttttactaatactttctatcactatcagaatctgaaatctcagatttcatgctttaaaaagaattaatttaacatgaattataaattataattacttatatgaattggataactaaataaaataacaagatatttaaggggagaaaatcttatatgtggcaagataagtggtgctccattcagtgtattaattgcaaccaataaattggttaactgtgtctcagtggtaccattctttcttattgtttgagagtaatcacagtagctacacactgtggtgggatccattttatacacaagtctctttacttcaccatatctgagtagagacagcctaagtcaccctttggtcacagaataaaatattttaaatcagtgcttcttgttttccccaaaattagctggtcaaggaatatgatatctgggatacaaaaggtgagtgtggtaacaggcaaactcattgtaaaatatagattacatctatcttgctaaataagctcagcttaaagcctttatcttcacaaaattctgtgactgttactcacttttgtcttgacattatcctcataatagtcacatagaataatcaagtcctgttaccctctgagcttcagttttagtttccttatcttttatttcctctttagttctaagaatctgtgattctaatactatttgccttactcctaggttcaatgtaggttcacactataaattacttgatacaaaacaagatacctgtctattcacctgtattactatttgcacattaaagtaggaaaatagaacctttcgtttcaaaggtagtcgcgctttagaccatgtatagagaacatcttaaacttttgcatcatcacaaagtcctcacattcttagaaaagaacatttataactactaagaattgaattgaaagtgtataaaaatttgtctcctgtggctggattatgtaaagaagaaatggagttctttgaagtttcactgataagcgtgtggggagtctgagatatcttcttgatttgtgctcatgattattctggttcgtgcactgtaattaaataaccttttaaattatgcagtttaatgtaacaaagtttgtaaaaattctatgctcttaaaaatggcttttattttaaaacttcccaaatacgttgtcttgaagttgttaatttctcaatcaagacgcagggtggcgctgcaggctaagttgtgaataatgagccctaaaaagctcgcgcgtattcttctgtgtcgctagacgcaatcaaaaacacacggaagaagcgttacaagcagtgcaggtttaccaacggcttggggcagcgatatactaaacaaatttaatattaaaagcaactgtgtgacgattcctccaagcaagaaattggaattgaatgtctcaagtctcgttgcggttgctgaggggattggatatagggacctggactccaacatgaagaagctagggagaattcatccaaacaggcaagtgttggcctttattttgatggtgttcttgtctcaggttcgcctcgagcctattcgttattctgtgttggaggaaacagagagcggctcctttgtagcccatctggccaaggatctgggcctgggaattggggaactggcctcccggtcagcccgggtgctgtctgacgatgacaagcagcgtttgcagctggatcgtcagactggagatttgcttctgagggagaaactagaccgggaagagctctgtggtcctattgaaccgtgtgtactgcatttccaagtgttcctggaaatgccggtgcaattttttcaaggagaattattgatccaggacataaatgatcactctccaatattccctgaaagggaagtgctcttgaaaatactagaaaatagccagccgggtactctatttccgttgctaatagctgaggatttggatgtgggcagcaatggtcttcaaaaatacacaatcagccccaattctcattttcacattctcactcgaaatcatagtgagggcaagaaatacccagatttggtgcaggacaaaccactggatcgagaggagcagcctgagttcagcttaaccctcgtggcgctggatggtgggtcaccacctaggtctggcacggtcatggttcgaatcctgatcatggacatcaatgacaatgctcctgagtttgtgcacactccatatggggtgcaggtcctggaaaacagccccctagactctccaattgttagggtcttagctagagatatagatgctggaaacttcgggagtgtttcttatggcttattccaagcatcagatgaaattaaacaaactttctcaataaatgaagtcacgggagaaatactgttgaaaaaaaaattggatttcgaaaaaattaaatcttaccatgtagaaattgaggccacagatggaggaggcctttctggaaaaggcactgtagtca

SEQ ID NO: 10501 - DNA, 6000 bp, Homo sapiens
aactacttagagtatgttctttgaccacagtggaattaagccagaaataaaaatataataaatctccaaatattttaaaatcaaattgcataatccatgagtcaaaaagaaatcacaacagaaatttccaaatattttgaacggggaaaaattaacacctggcgtatcaaaacagtacttagagggaaatttaaaatcttaaatgcacatgttagaaaagaaaggctaaaaatcaataatctaagctttcatctcaagaagctagaaaaagaacagcaaatcaaatgcaaataaagatggaagacaattttatacacacacacataggcagaaacaaaataaatgacaaatatacaacagaggaaatcagtgaagcaaaaagttggtttctacaatgattaaaatttaaaactcttagactaatcaagaaaaaaagagggaaaacaccaactgccaatatcaggataaaaaaaacacaactaccaacctacagacatttaaaaaataaaaaagaaatattatgaacaattttatgccaataaacttgacaatttatgtaaaacagaaaccatcctttaaaaacacaattttccgaaactgaaacaggacgaaattaagatctgattagtcatatctattatattaattaaagttgttcattaaaaaccttcccactctaattcacagcagtgaattctcccaaatacttatgtcaaaattatcactaatttgtacaaactccttcagagagtagaaaaatagacattttccaaatcatttgggtgccagcataaatctgaataggttataacattcaaacctgaataggatattataagaaaagaaaattactattcttttttataaatatgtatggaaaattcatttttaaaaatattagcaaataaaattttaaaatgtataaaagaaaaataataattggaaaatggagtttattttaggaatacagaggcagtttaatatttgaaaattgatcattgtaatttaccatattaaaagataaagaacaaaacatgattatttcaatggatacagaaaaaagtcatgtgataaaattcaacacacagtagtggtaaaattattagcaaactaaaatcaaagggaactttcagagtgactttaaaaacctacaggaaacatcattaacaataaattttcaaaaattttcccctggagatcaagaatgaaacaaggatacctgtcttttcttctccaatttagtattctatcacaggtcctaaacagcggaataaagcaaagaaggaataaaaggcactatgattcgaagggaagaaataaaaatgtctttttaagtggacatacttgtataccttgcaagccatgaagaatctacaggctactggaattaataaatgaagttaacaatgccactggatacaaggtcaacatacaaacatgagttctatttctatttagcaacaaaaaaagtgaaaaatttaaacattatgcacaataatttcaaaaatagcagctatttataaacaaatctagttgaatatgtataagacttctacattgaaaactaaaatatgagaaaaattaaagaagatctaaataattacaggaatatacaatgttcactaattggaagactcaatgttgggaatatgtcagttatctcttagtcaatctatagattcaataaaatcttaaacaaaattccagcagctttctttgtgaaaattaatgagccgagcattaagtttatttgaaaatacaaaaacagtaataaccaaaggaaccctgatgaaaaggaaccaaactagagataccacaccaaagtcacaatccgcagaataaagagttaataagctggacttcattaaaattaaaactttctgctctgcaaaagatactatgaagagaatgaaaagacaagacataaactaggagaaaatatttgcaaaaggcatatctgataaaggactgttattcaaaatatacaaagaacgactaaaactcagcaacaagaacccaatttaaaaataaggcaaagaccttaagagacacccaccaaagaaggtatacaggtggcaaataaacatatgaaaagatgctccatatcatatgttaacagggaaatgcaaattaaaataacagtgaaatatgactacacacctattagaatgaccaaacttcaggacactgacagtgccaaatgctggtaatgagagcaaaaggagctctcattcattgctggtgggaatgcaaaatggtacagacactttggaagacagtttggcagtttgatacaaaacaaaatatactcttaccatgttatctagcactcatgttccttagtatttgcccaaaggagttgaaaatttatgttcacacaaaaacttgcacagagacgtttatagcagttcattcataattgccaaaacgtggaagcaaccaagatgtcgtttagtaggtgaatagataaacaaactgcagttcattcaacccatagaatactattcagcatcaaaaagaaatgacctaacaacccatgaaaagacattgaggaaatctaaatggatattactaagtgaaagaagccaatctgaaaagactacatactgtgtgatttcaactacatggtgctctagaaaaagcaaaactgtggagacagtaaaaaaatccacttgcattgggttctaggggagggagggaggtataaataagtggagcacaggggatttttagagcagtgaaactactttgtatgatattataaaggtgaatacacataattttaaatttgtccaaagccatagaatatacagcaccaagaatgggccctaatgtaaactatggactccaggttataatgacgtgccaatgtagattcatcagctgtagcaaatgaaccactctggtggaggatgttgataatgggtgaggctgtgcttgtgtggggacaggggcatatatgaaatctctgtactttactctcatttttgctgtgaaccaaaaaccattctaaaaatttagtctacttttaaaaaactggagaacttacttctcagataacaaaactcatgataaagctataataattaacacaatgagttattgtaggataaacaagattgaataaaacatcttcagagctatggttacctaatttataacaaagatgacatttcaaaaacaatggaaaatggattgtcttttaaatagatggtgcaaaggtttaaagcattcagatacttacattttaaaccttttgactccaaactcattcacttgaaaagttaatttcaggttgattatagctttaaatatgaaaaatggaataattaatctttcaaaatacatcatacaagaatattttcatgaccttggagtatgtgaacatttaaatagaacacaaaaaaatgctaatcatacatgaaacttattgacaaatctgactaaaggtaagaaattttattcatcaaagacacataatagacttgaaataaaaaccatagagtgggaaaagatatttgcaatacatatatcttaaaaaggacttatgcccagaatatatgagaaacttctgcagatcaataagcaaacaggcaaatgcctccccccaaaaaagtaaaaaggtttgcataagcccttcacaagattgtatcctaatggctgataaacatgaaaatgtgctcaaattgtttaatcatcagggaaaatgctaactaaaattacaatatcatatcaccatacactaaccagagtggtttaaaatggaaaagatagcatcaaatgttgacaagaatgtggagcaactggaactctcatactttgctggtattagtacgactacttgagaaaactttctcattatctgctaaagcaaaatatatgtgcacatcttaatgcatagcaatccaactcctttgaatatattcaacataaacacatatatgtggtcaccaaaagactagtacaaggatgtttataccagtactaccccaaagagcttaaacctggaaaacaatgttcatcaactggagaatgaataaataaatcatagtatattcatacaacagaatgatataaagcaatgagaataaaacaaataagaacaagatgccacagatcaatttgctgaacataatattgaggagaagaagccagacacacgagagtaacaatctataactccatttgtataaagttaaaaaaaaaaaaagcaaaaaaaacctatgacaacagaagtcaggacagtgcttatcttttggggagagggtggtaaccagacaatagcaggtggggacttgggtttgggtagtatttttaatctaggttctacttacaggagtgtgttcactttgcgaaaattcattgagttatacacctatgatttgtgccattttctgggtgttattggtgtttacttcaaagtgaaagtaatttttcttaaactttaaatttctatagatattcctgatcacttatttaatataatcaaataagaaacaccaaacaaagtgtatttgtgtactcaagggtacttttatggagattaatatataattttagtttttttctcaaaagtattttctcactgaaaattaactccacaacatttatttagaactttcagcaactaagagctggagataccatcgggagagcttatgtgacaaaagggtatggatacacgtcagttagaatttaggatgaaatggcaaatactatatgcaatagtaaattaggacgcctggtggcgctgcaggctaagagtgtggatagtgggctctgcggataactcagacgccattaagctggggaatccaaactctaaaagaaggacgcattttaggtaagatctagtggctagatcttcagggtgggcttcgttcttgtggaaatcagtcaagaaagatcggattcgcggttatttatgcaaatcatctgggtggattgtgtacggagttaaactgcgccttctggaccgggtctgaacaatggagactgcgctagcaaaaacgccacagaaaaggcaagttatgtttcttgctatattgttgcttttgtgggaggctggctctgaggcagttaggtattccataccagaagaaacagaaagtggctattctgtggccaacctggcaaaagacctgggtcttggggtgggggaactggccactcggggcgcgcgaatgcattacaaaggaaacaaagagctcttgcagcttgatataaagaccggcaatttgcttctatatgaaaaactagaccgggaggtgatgtgcggggcgacagaaccctgtatattgcatttccagctcttactagaaaatccagtgcagttttttcaaactgatctgcagctcacagatataaatgaccatgccccagagttcccagagaaggaaatgctcctaaaaatcccagagagcacccagccagggactgtgtttcccttaaaaatagcccaggactttgacataggtagcaacactgttcagaactacacaatcagcccaaattcacactttcatgttgctacgcataatcgcggagatggcagaaaatacccagagctggtgctggacaaagcgctggaccgggaggagcggcctgagctcagcttaacactcactgcactggacggtggggctccgcccaggtccgggaccaccacaattcgcattgtcgtcttggataataatgacaacgcccccgaatttttacaatcattctatgaggtacaggtgcccgagaacagcccccttaactccttagttgtcgttgtctccgctcgagatttagatgcaggagcatatgggagtgtagcctatgctctattccaaggcgatgaagttactcaaccatttgtaatagacgagaaaacagcagaaattcgcctgaaaagggcattggatttcgaggcaactccatattataacgtggaaattgtagccacagatggtgggggcctttcaggaaaatgcactgtggctatagaagtggtgg

SEQ ID NO: 10502 - DNA, 6000 bp, Homo sapiens
acaacccactacagctaaatcaaaacagaattctaaaaaaatgttccaataacccacaggaagttagaaaaatgaaaacagagagacaaacaaaaaaacagagaaaacaaacaggaaacaaaaaatggcagagttaatctctactaatcaataattatgttaatgtaaatggtttgagcacatcaattaaaacaaacattgggagaatgggtttaaaaaatcatgacccaactatatgtctcaaaattaatttcaaatataatgatatatgcagtttgaaagtaaaaagacaaaaatgcatacaattattaatgtaaaaataaagcaggagctgggtgcagtggctcatgcctgtaatcccagcactttgggaggctgaggcaggaggatcacctaaggtcaggagtttgagaccagcctggccaacatggtgaaaccccatctctactaaaaatacaaaattagctgctgtggtgatgggcgcctgtaatcccagctactccggaggctgaggcgggagaattgcttgaacctgggaggtggaggttgctgtgagccgagatcataccattgcactccagcctgggagacaagagcaaaactctgtctcaaaaataaataaataaataaaaataagaataaataaataactgaatagataaattaattaataaagcaggagtagccataatgtcatataaagtagacatgagagcaaagaaaagcatcagagacagcatgggacatatcagagacatagtgggatattatatagtgataaaagaagaaaacatagcaatcccaaatgtatatatacaaaactgcaaaatgtatgaagcaaaaactgacagaaggagaaatagagaaatccacaattaattacaattggagacttcaatgaccttcaacaactgatagaccaacaagacagaaaatcagcagagatatagaagaactcaataacaccatcaactaacagcatctgattaatatttataaaacactccaataccagaatacaccagaacactccaataccagaatacaccagaataaaaaatactagaatacaccagaataaaaaatactagaatacaccagaataaacaataccagaatacacattattttcaaatgctcacagaacctgtataagataaccacaacctcagccgtaaaactgacctcaaccaaattaatagtgaaatcgtacagagtgggttctctacgcacaatgaaattaaactaaaaatgaataatggaaagataagaggaaaaccttcaagtgcacggatatgtagcaacatacttctaaataatctatgaatcaaaaagaatatctcaagggaaatttaaaaatacattgacctgaattgaaagtgaaaatacaacacatcaaattttgtgagacatagctaacacagtgcagagaggaaaattttatagcactaaatatgtacattagaaaagaggaaaattctcaaactggtcacccaccagtttatcagtttcaagcttctacctcgagaatctagaaaaagatgaggaaaataaacccaaagcattcagaaataaggaaataacaaagataatagaagaaatcaagaaaattcaaagcaaatagagaaagcaataaagaaacaaagaactggttctttgaaaaacattttaaaaaatgacaaacctctagcaatactgacaaaaagtcttacccaatcatttcagatttcaaatgtgatttagtatcaaatcctttatattttcaacttccttgcaacatatctcctgttaattgagtttctttaagtgattgcttatatatcatctctaacttttccctgtattactatgtttttctttctatataactaaagaagagttttaagagattcaatttgtccttgaaggtcttttcctttctcttttgataaacttgaataattttttaaaattataatgggattaactgaaacataaaatggaaatcagcttgatcagctatgtagtacaggtacaggttgggcatccctaatccaaaaatccaaaaataggaactgctccaaaacccaaaactttttgagccaacctgatgccacaagtagaaaattccacacataagtacgtaatgcaaactttgtttcatgcacaaaattgtttaaaaatattaagcaaaattaccttcagcctatttgtataagatgtatatgaaacttaaatgaatttcatgtttagacttggttttcattaccaagatatcccggtatgtacatgcaaatattctaatatctaaaaaatctgaaatctgaaacacttctggtctcaagcattttggacaagggctgttcaacctgtcattacaggctaactaaataaaattaattttaacatactttacaatgttcagtcagttgaaatactatttcagcttgctggtaacagtccagctaaattaatctatcacttcactttagcatacatgagcataaagaatatggggcatggtgctttttcacattgtctacttttccatcatgtgtccagatgagaccaaggttttgctccccagttaacaaaactgagcttcaaaatatgattaagatgatttccagtgaatgatgaaaatgttccgtatcttgaaaaaagtgtgagttacacacatgaatccatttgttaaaatggtacagttaagattggtgcatttcaatttctgtaaacattgccttaagaaaagaactatacaaaagtaatcattaagcgggaagcagagaatggagagaaaggtatagacaaaacaagacaacagaatgttgtgaaactgattgtgtacagaggcttattctgtttactttgtatatgttagaatttttccataataaaaattttaagttaatgagtccttgtgagaacatgtttacgaatgcaaacttaattcaactctactctagtcaatcaaatcaaagcaaaagagggcaacacagagaaacattctcctgaaacaatctaacgtaatccattttctataaaaaggcagtttcttgatagacccaactgatatctttttggggtactttgagctattatcctctttctatataactaccaatgttatcaaagacatttcaaggatctaaatggagtttgacaaatactgtactgctgataaatttgctctgacgtaaaaaaataattcaacaacctatattcgaggatgcctggtggtgcttcagagaaacagagtgaataaaagactttgtggatgccgttaagctggaatcagaactcagaatgctcaccgaaagaaggaagcatttaagattgagcaggaaataatggccttgtttcagcaaagagatgacaccagtccaatatgtttattattgttggtttatttcataatttcattttgttacattctcaaggaacagtgtgttcccagtagcatctatcaagtgaaccctggaggctggtcacattcataatcttttgtttttctggctacatagaggtgattttgaactacaagatcatctcagctattcagagtttagattttatttagccttatttgttttgcctagcatttatgtatttgaaaatatcttgatttttaatcttctatcaccttggcccttacctgaagtgaactttgtttgaactcaattgatttcacctctcaataaatatgaaattaatctgaaatgaattgaattgtttggcatattttacctcttctatgtgcactaatctatttcacacattttcagtttgtttagagatacatgttccaatgtatctgagtagaaactagtgagatgggaatggatatagccataatattccatcattgaattccatggcattcactcaaatgtaactcacctgttttaacagtaccttaatttggcctgtatttattggacttggtgttctttttgctgtgagaagacggtgaaggtgattcttgaatgtttgttttctgtgttgcatcatgtttgtacaacacggtaatatatttggaccttgattaaataatgtaagaggggaatttgatcaaaaaataaaatgcacaagactgttaaaacaatgtctaattctatccatgcaaaaatggagtagaatcctaaaatgcttatgacaactacttgattgcttctagtccctcttttaaatactttaatttacttagatacatgtatcatacgtacttcttggcctcagttttcctcctaatagcctaattgttctttttactgtgcaggcataactatataacaaagtaggttttttttttcatgccatttatgagtcatataatttagataatttattgtttattttaccattattgttgctaacaaacttcgttgttttgcattgtttgttgggacaattaaatagtgtacctcttggactaatagattaaatagttcatcagagataaattgcactgctgaagcatcaaaggagaaagactgaagtgtagaatctgcacttcaatctttctccttaattagcaccaccagggaatttgattcaagttctagaggggagtgaacccaggaattggcttaaaaacaaaaacatacacacaaaaaaaccaacgctcgcaagcaattatttatgcatgcggtccacgcactcagtttgagaaacactgactcgacttaaaagtctttataatgctcagatttctgaaatgctattgacctgaaaacatctcatgaagttattagtttgaacgcgtggtggcggtacaagctaagagagtgaatgaaagctctgcagactcggtggactccgtttcatccagaagccaagtaaaaatacagaccacgtttacagctaaagctgagatagatgtgtccgggaaggcagtcgtcgccagacaagttgtaagaacgaatttaaaaatctctgcaaagacatccgagagggtcgacggtagatgtggtgattgggagctgaaaaggatttttcttccgtattcagacataatagacatgatgcaaactaaagtacagaacaagaaaaggcaagtggctttcttcattttattgatgctttggggagaggtgggttctgaatcgattcagtattccgtattggaggagacagaaagtggcacgtttgtggccaacttgacaaaggacctgggactgagggtgggggagctggcttcgcggggcgctcgggttgttttcaaagggaacagacaacatttgcagtttgatccacagacccatgatttactgctaaatgaaaaactggaccgggaggagctgtgtggctccactgagccgtgtgtgctacctttccaagtgttactggaaaaccccttgcagttttttcaggcttccttgcgagtcagagatataaatgaccacgccccggaattccctgccagagaaatgctcctgaaaatatcagaaattactatgccaggaaagatatttcctttgaaaatggcacacgatttagacaccggcagcaacggccttcagaggtacacaatcagctccaaccctcacttccacgttctcacccgcaatcgcagcgaaggcaggaagttcccggagctggtgctagacaaaccgttggaccgcgaggagcagccccaactcaggctaacgctgatcgcgctggatggcgggtctccgccccggtcagggacctccgagattcagatccaggttttggacatcaatgacaacgtccccgagtttgctcaggagctctatgaagcacaagtccctgagaacaaccccctcggctctctggttattaccgtctcagccagagatttagatgcaggatcgtttgggaaggtatcttacgccctgtttcaagtcgatgacgtcaaccaacccttcgaaataaacgcaatcacaggagaaattcggctgagaaaggctttggattttgaggaaattcagtcttatgacgtggatgttgaggctacagatggtggaggcctatcaggaaaatgctctttagtcgtca

SEQ ID NO: 10503 - DNA, 6000 bp, Homo sapiens
attgatatagaacatagatctataagttatatagaatataattctagctgatataagaagtttctttaataaagtgatatttaaggtaagagtataagggtaaatagagaaaaatgtaagacttacatgcatattttagaaatcaaggtttattgagaaaaaagggacaaagtaaatgactcaagaatcaaaacaagaatttttaaaaataaggaaaataagaggaatgaattaaaaatataaaagcaaaaattgattaaatagaataaaaccacataatatttgaccaattaaacaaaaagtgatttctttgaaaaagccaaggatattttaggttctatatataattgatgtaggagacatgcacctttcatttggctccctctaaaaatgcactaagaaaacatgaacatatattttcagaaacataaacttaataaggatgaagagaataatgtagaagacaacagggaaaactcttagaagctggaaaacagatgaatgatttagtagacctgacaaatcaactaccagtcatgaagtgggaagagctgagaatcgatcctgttcagactgtgggactagaataaattctgtttagatggtgggacatatagaggcatctgaaatgtcaatcctagttcctcatgccaaataagaaggattgtgttaaagattcctgtaaagcagttaaatctctagcagttagatcacatttccccattccagtcactgagtaacctacctacccccttgaccctaacataagtctggagttttattttctgaagagcgcaaaaaggagggttattatatgagaggttctgccaacaaaatggaggtcatgggtaatatgggtagcaaaagtaagtaaccatctaaatattgaattctggttgattgttaaaatgctgtgatagtcatttgaaccaatcacaaatattttggttctccccttcttggacatatggtagaatttcaattctatttctgtttaaaattatgtgtagccatgtaatttcctttggctaataaaatgtgagaagtgacatatatccattctgggctgaagtttttggaggcacggtttaacacattttcttttcccactacagtgatcacggaagtatatgtgaagatggaatctccacaagtttagatccttgactgactgctgtgaggagggccccaggctgaactatataggatatatagtataagaaagaaatcaactttctttcttttttttttttttttttttgagacggagtctcgctccgtccaggctggagtgcagtggcacgatctcggctcactgcaagctccacctccccggttcacaccattctccggcctcagcctcccaagtagctgggactacaggcgcccgccaccacacctggctagttttttgtatttttagtagagacgggatttcactgtgttagccaggatggaagaaatcaactttcattgtgttaagctgttgagatttgggcaagttgtttggtattgaaacataatttagcctatcctgatgcaaaactgtactcctcttcacccacttaatccttcacctttttcaatctatatcttttccttttggataggggatttcaaagagtgtggtaatctggccagtccaaccggaaagacctaatcacactgacactgaggtttccccatccatcagtgctcccagttcactttagaatgaaaaatcaaggtggacaagaattatcaaactactcagagccatcactcagctctgtagtctcccaaactaaattaagaacaaacacgtgaagaaagtttctgaaaaggcatacagaagttaaagaaaagcaaagagtaaaaaggtaacttggagaaaatggaaagtctgcagcaagaagaaaacttggtggaaaagcgattattaatatcatcagatgaaaaaagaagttattgcatctaagaaataagcccaaaagagagctctttaaatagaagagacaagtctaggaaaatactaacctaataaagaaataaaaatctcaatataagggctcgaagataaagttcagaaaatgttctagaaaatactgcaaaaatattttacaatggcaagtaggagagaaaaaaaataaagaaattagagaaccataccagaagtctaacatctgaattacagaaattctaaaaatgaaatgggagttggattataaatgaaatagtttaaagagatttctaagagcaggagaaaattagttttctagatgaaatgtctcatcaattatactgtgcaatggatggaaaataaccccaaaccaaaacatacaattgtttaattttaaagtgcttgggacaatgaaaaaacactataacaaaaaataaaaatataggtcacatatggaagataagaaataagattagctttagacttctttgcaaacagattggtttggaaagctcattgacaaaacaaaaattcagaagaaaaattattttcaacctaaaactctatatttagtcaaactactaatcaagtttgagggtagaataaagacatcttagtacatttaagatcacaaaaacatttaactctgaaacacccttctccgaaaactactggaaggtatctatcaaaatgagaacctaattcaagacaggagaagacagaagaaacagaaactagaagatccaaaacaggacagaagtgaaatgaatctccaggtgatgctgaaggatgatccaaggatgacaactgagcataatgaacaactagtccagtaaggagctgtttgactcaagagacagagattttgaaggatatcattagcaatcctcttaacattgtatcatcttttcaatcatatgaacctattggaggatgtgttctagtaatgccatagagtaaactgaaaaagggcaagttataaaatcccagaaatagcaaacacatccagaataaaaggcaaagaattccaagaatgacagcaaagaaaaaaatccagaatgatagctgtgcagtaggcacagaaagcaaccacccaatttaaagaaaaattgaagtctcaggaggaatggaaatgactatggggaaaattgcactgacaggcaattgtatctgtgggatgaataagtgatagggataaaaaaaatcaagtaaatgaaaaggcaagataattattaaaatcacaaaaaaattgaaaaagaaaacataattaatacacaataatgttcccaatatatggtaagtaaaagaaaatctaaaatacctaaaatgtaatctaacataataaacagtcaattgataatttctaaaattaattaatcaaaatatatcagaaaacagattagtgactgaagagataactaaaagagttttaaaatggctacctcttagaaggggaactaagaaaagtgaggaggaaaagggcagaacaagcctcttagtgctatttaattttggaccaaggtcatatattattttgaaaaaaatgcatttcaaaatatcagtaaagtagagctcttgcaagtctcaccaagaataaaaaggagttaaaatgctaaacatcactaataaaaatagggatacaattaaaggtaaataacgcaatgaaaacaattccaagaaatttgcaaactagataaaatgattttcaaaataaaatgcaagttacttaaaaatacaaaacctgaacagattaataaccaaaggtaaaatgtaaatggtagtcactgatctactgcaagtgaagtcaccaaacccaaccagtttaaaagacaagctggaattaagcatgtagaaacatataataatataattattaaaactattgtataaaatagataaaaagctccctaacacattctatgatgccagtataatagtttaataccaaggccataaaaggcaaacacgcactaggtaaacaacattaactagaaaaatcctaaaaccatgttgacacatcatatctatctgtgcactaaaacaataatacattatggttaaatgtcatttatatcaataactcagtaatttagaaactaaagaataaatgtattatttcaacagctatcaaaaatcacttcaaaatatgaaagaataaaaagaaaactttattgattcaaaaaaggaatatttaccccaaattgagatcaaccatcatagttgaagatgaaatgctagaagcacttccacaaatgcaagattgaccaacttgctactactaattttaagagtattcattggacattggagattctagtcactgaaattatagaggaacaataatttcttatgtaatacttaaatcaggtgaaggatgaaggttgggtttgggggaggcataaagtgttccaagaaatatcacaggtaaagagttaagacctggaaagtggaataattgtttaattcacaagaaattgggaaaagggtcaattattctgccatattcacattattattgttaaatactttacaaataaataaaatgtccccaaccaatatttgttgacttcaaggaggaggtttcattttctcatatatatttttactatccatttttaaaataggagattttcttaggatttcggtggggagtcagagtttagtttcatgctcctagatttaagaagactataaattaattcttctacgaatccagattatcacaggggaaaacgacatcagctattacttactagcattactgtgaccatttgaggataaagatggaatgaaacagcaaagataccggggacaaatcattcttgttgcagaattccttcaatccgccatctttttgttctagtcttgataacgggaataacatccacaaaacgcaaggtggcgctgctggctaaaaagagagagagaaaaataatttcacaaagaaaggatgttacagattccagagcaaagaggcaatctgaagagaaaagcataggaaaggaaacagtggtaataggaattggggtaaaatgaggatccttccccacaaacattgctattattcagctcatttcaaaggattccgctgctgccatttgtgagagccgctggaggctgagtgaaagtcattttgaaagactgatccaaagaagaatggaggccagagtggagcgtgctgtgcagaaaaggcaagtcttatttctttgtgtatttctgggaatgtcttgggctggcgccgaaccgcttcggtattttgtggcggaggaaaccgagagaggcacctttcttaccaacttggcaaaagacctagggttaggggtaggggaactgagagcccggggaactagaattgtttcagaccagaacatgcaaattttactgctcagttcgcttactggtgatctacttctaaatgagaaattggaccgagaggaactgtgtggccccagagagccctgtgtgctgcctttccagttgttattggaaaaaccttttcagattttccgtgctgaactatgggtcagagacatcaatgatcacgctccagtatttctagacagagagatttccttgaaaatattagaaagtaccactccaggggcggcatttctcctagagagtgcacaggattcagatgttggaaccaacagcctgagtaactacaccatcagccccaatgcctatttccatattaatgtccatgatagcggggaggggaatatctatcccgaattggtgctgaatcaagtgctggatcgggaagagataccagagttcagtttaaccctcaccgctttagacggcggctctcctccaagatcagggaccgccctcgtgcgcattctggttctagacgtaaatgacaacgcccctgattttgtgcggtcgctctacaaggtgcaggtgcccgaaaatagccccgttggttccatggttgtctccgtgtcagccagagatttagataccggaagtaatggggaaatagcctatgcattttcttacgccactgaaagaattctcaaaacgtttcaaatcaatccaacatctggcagtcttca

SEQ ID NO: 10504 - DNA, 6000 bp, Homo sapiens
tttgtggcggaggaaaccgagagaggcacctttcttaccaacttggcaaaagacctagggttaggggtaggggaactgagagcccggggaactagaattgtttcagaccagaacatgcaaattttactgctcagttcgcttactggtgatctacttctaaatgagaaattggaccgagaggaactgtgtggccccagagagccctgtgtgctgcctttccagttgttattggaaaaaccttttcagattttccgtgctgaactatgggtcagagacatcaatgatcacgctccagtatttctagacagagagatttccttgaaaatattagaaagtaccactccaggggcggcatttctcctagagagtgcacaggattcagatgttggaaccaacagcctgagtaactacaccatcagccccaatgcctatttccatattaatgtccatgatagcggggaggggaatatctatcccgaattggtgctgaatcaagtgctggatcgggaagagataccagagttcagtttaaccctcaccgctttagacggcggctctcctccaagatcagggaccgccctcgtgcgcattctggttctagacgtaaatgacaacgcccctgattttgtgcggtcgctctacaaggtgcaggtgcccgaaaatagccccgttggttccatggttgtctccgtgtcagccagagatttagataccggaagtaatggggaaatagcctatgcattttcttacgccactgaaagaattctcaaaacgtttcaaatcaatccaacatctggcagtcttcatcttaaagcgcaattggactatgaggcaattcaaacttacacattaactattcaggccaaagacggcggcgggctttctggaaaatgcactgtagtggttgatgtaacagatataaacgataatcgacccgagctgctcctgtcttcacttactagcccaattgcagaaaactcacccgagacagtcgtggctgtttttaggattagagacagagattccgggaacaatggaaagacagtgtgctccatccaggacgatgtccccttcatcctgaagccatctgtcgaaaacttctatactctggtaacagagaaacctttggatcgagagaggaacactgagtacaacatcaccatcaccgtcaccgacttggggacacccaggctgaaaaccgagcacaacataaccgtgctggtctccgacgtcaatgacaacgctcccgccttcacccaaacctcctacaccctgtttgtccgtgagaacaacagccccgccctgcccatcggcagtgtcagcgccacagacagagactcgggcaccaacgcccaggtcatctactccctgctgccgtcccaggacccgcacctgcccctcgcctccctggtctccatcaacgcggacaacggccacctgtttgccctcaggtccctggactacgaggccctgcaggcgttcgagttccgcgtgggcgccacagaccgcggctcccccgcgctgagcagcgaggcgctggtgcgcgtgctggtgctggacgccaacgacaactcgcccttcgtgctgtacccgctgcagaacagctccgcgccctgcaccgagccgttgccccgggcggccgagccgggctacctggtgaccaaggtggtggcggtggacggcgactcgggccagaacgcctggctgtcgtaccagctgctcaaggccacggagcccgggctattcggcgtgtgggcgcacaatggcgaggtgcgtaccgccaggctgctgagcgagcgcgacgcagccaagcagaggctggtggtgctggtcaaggacaatggcgagcctccgcgctcggccaccgccacgctgcacgtgctcctggtggacggcttctcccagccctacctgcggctcccggaggcggccccggaccaggccaactcgctcaccgtctacctggtggtggcgttggcctcggtgtcttcgctcttcctcctctcggtgctcctgttcgtggcggtgcggctgtgcaggaggagcagggcggccccggtgggtcgctgctcggtgcctgagggcccctttccacgacatctggtggacttgagcggcaccgggaccctatcccagagctaccagtatgaggtgtgcctgactggaggctccgggacaaatgagttcaagtttctgaaaccaattatccccaacctgctaccccagagcacaggcagggaagtggaagaaaatcgcccatttcagaataatttgggtttctgataaagaatgtaaactaaatccgcgtctgtgaatacgtttctgattaggaacttattgcgaggttcccttaagggagtgtctttacatcatttcaaatatgtactcttgaagtcaagcaataaatttctatacataaaataggatcctgatttagtatcaagaacccttcacaaagcatgaaatgtatatgtgtaatgttttatgtcaaacaattatgcttaatatacagtctattaaatgtaagtcttgtttgagatattttaaattgctttccattgttttcaatctctactgagacttcctgagttgattagaaagctgtatgagtgtacctaccctagtctcagaagcatagactgtagagtatctttttaagcatttttaaaaaatgcttttaatgcatcatacactattttaacacttttaatctgagaagaagcatatgaggcatggtattttaggaatgaacaaatagatggtcttagagattcagtaagttcactaagttccactaactaataagtgacaaaactgagcatccatcccagatctgtctgactctgggtcagtgaccctgctccgattccatactgttttctgtcattagatatcacctggcaagtttctgcctaattaaggagaagtcttttatcatatttatactgctgtccaatcttttctatatttagaaataataatgtacatatttatctatggttttattttcttatacaccaaaagtcctgcttttctgggtcaattttcaactattattactaatgctctgatctgtccaaactcaagcggaaaacaaaattgaaagggcaacctgtgccttctcctttcttcagaacatatgactttcatttcccagaaaaaagattaatggtcctgagtaggaatattacataattttgattgcatcattagttaattattttcttcatattgtagattttctgcagtcacccatacttaacatttgtaatacattttcctgatttgaaagtttgtttttaaaagttttctattaattatagtgcactattgaatcaggaaaatttaagaaaaagaatagttagttttaaatgcataatatcaaagagaatcatagatgatcattaaatttttagaaattctcggaagttaaggagaagcactgttttttataaaaatttacaactgatttttatttttaaaatatctagataatttttgcatggttgcattctgaaaatattataaactagtgctggtaactctaataaaggtagtattactatatatcactggtgggatagaatctagaggcaaaaaaacctcacagcagtaaaatcttaaaatgctttcatggtcttagggtaaaattatctaatttctccaacaaataaatagcatgaaaaacaggaggagagaagtctacagtaggaaagatcttacgagatctaccaatcaaacgtaatgtgtggatcttgtctggatcttcattcaaacatcagcaatgactttgaaacacttggaagagtttgaatatagatgggtattaagtaatattaactgaattttttaggtataataatggcattgtacttaagggtatttttagagtcacttaaagttattatgcatttaaagaaatgtacaatgaagtatttgtgggtgaaaattcagtttgtctggaacgtaaagatgttggagggatagcgtcaagaattatggcaagacattgataatagttgatgctagtactgagtaattgcaggttaattttactcctctccttttatgagatatgaaaaatatcaaaataaaagctttttaaaattgatgctattagaagagaaatagaggtaacaaaaaaggacacgcttccccagaaataaaatcaccactgctgttacacattttgtctctatttagacaagctctccagcctttccctgtttaccttcactgtttgacataacttctctacctgagatagtcatgttcctgtactattctaccatgtaattttgaggtgtttttctagttatagcaatggatttatgcagagtcacctacctggtggtatcaaattgccatataccgggtacatagtttatttttaagcttaatctctctttgaatcagtttcctcatgtgtaaggtggggaaatcacaacagccctatgtggtaggtgctattattatcctcattttacagatgaggaaattaaagcagagagattaaataatttgttcgaggttcacagctactaattattcctatggttcatggaaataaaactataaagatctaaatgttgcccatgttaactactattatatttgaaattctttttgccaagctagactgttacctaaatatttcctttttgcccaaaactcagttagcattgttgaaagactaacgcaatttctccttcgggcagttgtctgctcagtaacgtccggcgatattaaccgtggtgttgtaactttacatagtcccagggtacatacaggcagagttgggaatattacatctattatcatcccacaaaatgtaagatcctgtgaggacccgtggtggcgctgcaggataagaaggcacaaaccagaaccgcagctgcagctccattaaccggcaaaaagcagcagaacctggaagtccacggggagcttggatgccaaagggaggacggctgggtcctctggagaggactactcactggcatatttctgaggtatctgtagaaaaccacagcctcagatactggggactttacagtcccacagaaccgtcctcccaggaagctgaattcagcaagaacaatggaggccagcgggaagctcatttgcagacaaaggcaagtccttttttcctttctccttttgggcttatctctggcgggcgcggcggaacctagaagctattctgtggtggaggaaactgagggcagctcctttgtcaccaatttagcaaaggacctgggtctggagcagagggaattctccaggcggggggttagggttgtttccagagggaacaaactacatttgcagctcaatcaggagaccgcggatttgttgctaaatgagaaattggaccgtgaggatctgtgcggtcacacagagccctgtgtgctacgtttccaagtgttgctagagagtcccttcgagttttttcaagctgagctgcaagtaatagacataaacgaccactctccagtatttctggacaaacaaatgttggtgaaagtatcagagagcagtcctcctgggactgcgtttcctctgaagaatgctgaagacttagatataggccaaaacaatattgagaactatataatcagccccaactcctattttcgggtcctcacccgcaaacgcagtgatggcaggaaatacccagagctggtgctggacaaagcgctggaccgagaggaagaagctgagctcaggttaacactcacagcactggatggtggctctccgcccagatctggcactgctcaggtctacattgaagttgtcgatgtcaatgataatgcccctgaatttgagcagcctttctatagggtgcagatctctgaggacagtccaataagcttcctggttgtgaaggtctctgccacggatgtagacacaggagtcaacggagagatttcctattcacttttccaagcttcagatgagataagcaaaacttttaaggtcgatttcttgacagga

SEQ ID NO: 10505 - DNA, 6000 bp, Homo sapiens
ggaaataaaactataaagatctaaatgttgcccatgttaactactattatatttgaaattctttttgccaagctagactgttacctaaatatttcctttttgcccaaaactcagttagcattgttgaaagactaacgcaatttctccttcgggcagttgtctgctcagtaacgtccggcgatattaaccgtggtgttgtaactttacatagtcccagggtacatacaggcagagttgggaatattacatctattatcatcccacaaaatgtaagatcctgtgaggacccgtggtggcgctgcaggataagaaggcacaaaccagaaccgcagctgcagctccattaaccggcaaaaagcagcagaacctggaagtccacggggagcttggatgccaaagggaggacggctgggtcctctggagaggactactcactggcatatttctgaggtatctgtagaaaaccacagcctcagatactggggactttacagtcccacagaaccgtcctcccaggaagctgaattcagcaagaacaatggaggccagcgggaagctcatttgcagacaaaggcaagtccttttttcctttctccttttgggcttatctctggcgggcgcggcggaacctagaagctattctgtggtggaggaaactgagggcagctcctttgtcaccaatttagcaaaggacctgggtctggagcagagggaattctccaggcggggggttagggttgtttccagagggaacaaactacatttgcagctcaatcaggagaccgcggatttgttgctaaatgagaaattggaccgtgaggatctgtgcggtcacacagagccctgtgtgctacgtttccaagtgttgctagagagtcccttcgagttttttcaagctgagctgcaagtaatagacataaacgaccactctccagtatttctggacaaacaaatgttggtgaaagtatcagagagcagtcctcctgggactgcgtttcctctgaagaatgctgaagacttagatataggccaaaacaatattgagaactatataatcagccccaactcctattttcgggtcctcacccgcaaacgcagtgatggcaggaaatacccagagctggtgctggacaaagcgctggaccgagaggaagaagctgagctcaggttaacactcacagcactggatggtggctctccgcccagatctggcactgctcaggtctacattgaagttgtcgatgtcaatgataatgcccctgaatttgagcagcctttctatagggtgcagatctctgaggacagtccaataagcttcctggttgtgaaggtctctgccacggatgtagacacaggagtcaacggagagatttcctattcacttttccaagcttcagatgagataagcaaaacttttaaggtcgatttcttgacaggagaaattcgactaaagaaacaacttgatttcgaaaaatttcagtcctatgaagtcaatatcgaggcgagagatgctggaggcttttctggaaaatgcaccgttctgattcaagtgatagatgtgaacgaccatgccccagaagttaccatgtctgcatttaccagcccaatacctgagaatgcgcctgaaactgtggttgcacttttcagtgtttcagaccttgattcaggagaaaatgggaaaataagttgctccattcaggaggatctacccttcctcctgaaatcttctgtggggaacttttacaccctactaacagagacaccactagacagagaaagcagagccgagtacaacgtcactatcaccgtcactgacttagggacacccaggctgacaacacatctcaatatgaccgtgctggtgtcggacgtcaatgacaacgcccccgccttcacccaaacctcctacaccctgttcgtccgcgagaacaacagccccgccctgcacatcggcagcgtcagcgccacagacagagactcgggcaccaacgcccaggtcacctactcgctgctgccgccccaggatccgcacctgcccctcgcctccctggtctccatcaacacagacaacggccacctgttcgccctcaggtcgctggactacgaggccctgcaggcgttcgagttccgggtgggcgcttcagaccgcggctccccggctttgagcagcgaggcgctggtgcgcgtgctggtgctggacgccaacgacaactcgcccttcgtgctgtacccgctgcagaatggctccgcgccctgcaccgagctggtgccccgggcggccgagccgggctacctggtgaccaaggtggtggcggtggacggcgactcgggccagaacgcctggctgtcgtaccagctgctcaaggccacggagcccgggctgttcggtgtgtgggcgcacaatggcgaggtgcgcaccgccaggctgctgagcgagcgcgacgcggccaagcagaggctggtggtgctggtcaaggacaatggcgagcctccgtgctcggccaccgccacgctgcacttgctcctggtggacggcttctcccagccctacctgccgcttccggaggctgccccagcccagggccaggccgactctctcaccgtctacctggtggtggcgttggcctcggtgtcttcgctcttcctcttctcggtgctcctgttcgtggcggtgctgctgtgtaggaggagcagggcggcctcggtgggtcgctgctcagtgcctgagggcccctttccagggcatctggtggacgtgaggggcaccgggagcctgtctcagaactatcagtacgaggtgtgcctggcaggaggctcagggacgaatgagttccagttcctgaaaccagtattacctaatattcagggccattcttttgggccagaaatggaacaaaactctaactttaggaatggctttggtttcagccttcagttaaagtaattgatttcatattatatattttaatttttatgatcaattcaaaggaatggttttctgtcaacttagcataaattttaaattacactacatttgcccatagtatttgtcttgttttcactgttttaaaaaatgatatctcatcttctcttcattagtatatccagtggactctaatcataattctttaacagtgcaatttttgttaaaatgtacatagtaaaatgcacagatctgaagtgaagaaattaatgtaactgatctttttaagcctttattttttgatttctaatctaggtaaaatttagttaaaagtggtgtagagaatgttttacatttattgccttttaaatgtttccccaagtcctaagggagttgacatattatccccttttttaaatatgagaaaactgaggcttagaaaggtaacttggctgtgagctgtggctcacacctgtaatcataacactttgagaggctgaggcaagctgaaccctttgagctcagtagttcaagaccagcctgggcaatggggcaaaacactgacactaacaaaaatacaaaaattagccaggtgtgattgcgaacctgtagtcccagctactcaggaggctgaggtaagaggatcccctgagcccaggagacagagactacagtgagccaagattgtgccattgcactccaggctgggtgacagagtgagacctcattcccccccacaaaaaacgattaactttcttataattctgaaataataaaggtaaaaatttaaaatataatctaagtctagccaatatgctatatggtcaggcattaactgatagcattgtttttctaactaaggaagtgaaatttatgttattcctactcctactccatgaactaaactctcatgtgaaaatataagttttagtttatagtttgtttatactactctgcacaaatatacccatgttcttatcaaagctctaagtatgctgggacagatactacaaatgaactttatgatgagcgaattaacctgatttatagtcctgtactttctctacgtgccatatccattattaaagaaatgagtctaagtaggaagtagagttaacctatagtttcatttcttgaatttcttattctctttcttcagtctttttcagttaacctacacacacacacacacacacacacacacacacacacatatgtttataagtgggatgggagaacgggtacggtgataattaaaagaggtaaggtttctcttgagatgaaaatgttctaaaattgtgatggcggatgcacacctctgaatatattaaaagccattgaaatgaaaaaagggtggggggaatccaaaagtgtagcagacccaaccttgagatttgcttgtttgggaatgaattttccaataacttgaaagttgtaaaaactcacacttctcagggttaggtgtcagaaagaaaaggaagtaatttattctttaataaagcaattgttaaatactctttagaactaccactgattgcaattttgcagtgtctactcatagtgtctatataggtaccatgaaaaagatgtacttgtgaaactgttctcatgttacttcagaaaaattttgcttctaagtgtgtattctatgtctggttaaatgttcattgaattttatttaatcattaatctcaacagcattaaacagtcaataacataaatgacagtcttctctttgtactcctccctgtacaacatcacagagctccatctgtatacacgaaagtcacatgaaaatagaactcagtgttttgtattacatagtctattcagtacatttagaagtattttgcctccaatattcaaccacagtaaaagactcagtgagaacgcgtggtggcgctgcaggttaagatgacggaaaatacaactgcctacgcagctccaggatccagcaaaccgtttcccaaagcctggaagcaaaagaatagctgagccagagcgaacgtgagtgtgaaacctctttaagacaccgttgggctgcttggttctgacattctggactgcaaaacagttctactaggatcctggggatacatgaagcttctgtgaaccaacttttcaagaaaaagcaatggagattggatggatgcacaatcggagacaaaggcaagtccttgttttctttgttttgctgagcttgtctggggcgggcgccgagttggggtcctattccgtagtggaagaaacggagagaggctcttttgtggcaaatctaggaaaagacctggggttggggttgacagagatgtccacccgcaaggccaggatcatttcccaggggaacaaacagcatttgcagctcaaggctcaaactggggatttgctcataaatgagaagctagatcgagaggagctatgcggtcccactgagccttgcatactacatttccaagtgttaatggaaaaccctttagaaatatttcaggctgaactgagggtgatagatataaatgaccattctcccatgttcactgaaaaggaaatgattctaaaaataccggaaaacagtcctctaggaactgagttccctctgaatcatgctttggacttggacgtaggaagcaataatgttcaaaactataaaatcagcccaagctctcatttccgggttctaatccatgaattcagagatggcaggaaataccctgagctagtgttggataaagagctggatcgggaggaggagcctcaactaagattaaccctgacagcgctggatggtggctctccaccgcgatctggaactgctcaggtccgtattgaagtggtggacatcaatgataacgctcctgagtttgagcagcccatctacaaagtgcagattccagagaacagtcctcttggctccctggttgccaccgtctccgccagggatttagacggcggagccaatggaaaaatatcatacacactctttcagccttcggaggatattagtaaaactttggaggtaaatcctatgacaggggaagttcgactgagaaagcaagtagatttcgaaatggttacgtctt

SEQ ID NO: 10506 - DNA, 6000 bp, Homo sapiens
gtggtggcgctgcaggttaagatgacggaaaatacaactgcctacgcagctccaggatccagcaaaccgtttcccaaagcctggaagcaaaagaatagctgagccagagcgaacgtgagtgtgaaacctctttaagacaccgttgggctgcttggttctgacattctggactgcaaaacagttctactaggatcctggggatacatgaagcttctgtgaaccaacttttcaagaaaaagcaatggagattggatggatgcacaatcggagacaaaggcaagtccttgttttctttgttttgctgagcttgtctggggcgggcgccgagttggggtcctattccgtagtggaagaaacggagagaggctcttttgtggcaaatctaggaaaagacctggggttggggttgacagagatgtccacccgcaaggccaggatcatttcccaggggaacaaacagcatttgcagctcaaggctcaaactggggatttgctcataaatgagaagctagatcgagaggagctatgcggtcccactgagccttgcatactacatttccaagtgttaatggaaaaccctttagaaatatttcaggctgaactgagggtgatagatataaatgaccattctcccatgttcactgaaaaggaaatgattctaaaaataccggaaaacagtcctctaggaactgagttccctctgaatcatgctttggacttggacgtaggaagcaataatgttcaaaactataaaatcagcccaagctctcatttccgggttctaatccatgaattcagagatggcaggaaataccctgagctagtgttggataaagagctggatcgggaggaggagcctcaactaagattaaccctgacagcgctggatggtggctctccaccgcgatctggaactgctcaggtccgtattgaagtggtggacatcaatgataacgctcctgagtttgagcagcccatctacaaagtgcagattccagagaacagtcctcttggctccctggttgccaccgtctccgccagggatttagacggcggagccaatggaaaaatatcatacacactctttcagccttcggaggatattagtaaaactttggaggtaaatcctatgacaggggaagttcgactgagaaagcaagtagatttcgaaatggttacgtcttatgaagtgcgcatcaaagccacagatgggggaggtctttcaggaaagtgcactcttctcctgcaggtggtggacgtgaatgacaatcccccacaggtgaccatgtctgcactcaccagccccatcccagagaactcgcctgagatagtagttgctgttttcagcgtttcagatcctgactccggaaacaatgggaagacgatttcctccatccaggaagaccttccctttcttctaaaaccttcagtcaagaacttttacaccttggtaacggagagagcactcgacagagaagcaagagctgaatataatatcaccctcaccgtcacagatatggggactccaaggctgaaaacggagcacaacataacagtgcagatatcagatgtcaatgataacgcccccactttcacccaaacctcctacaccctgttcgtccgcgagaacaacagccccgccctgcacatcggcagcgtcagcgccacagacagagactcaggcaccaacgcccaggtcacctactcgctgctgccgccccaggacccgcacctgcccctcgcctccctggtctccatcaacgcagacaacggccacctgttcgccctcaggtcgctggactacgaggccctgcgggagttcgagttccgcgtgagcgccacagaccgcggctccccggctttgagcagcgaggcgctggtgcgcgtgctggtgctggacgccaacgacaactcgcccttcgtgctgtacccgctgcagaacggctccgcgccctgcactgagctggtgccccgggcggccgagccgggctacctggtgaccaaggtggtggcggtggacggcgactcgggccagaatgcctggctgtcgtaccagctgctcaaggccacggagcccgggctgttcggtgtgtgggcgcacaatggcgaggtgcgcaccgccaggctgctgagcgagcgcgacgcagccaagcagaggctggtggtgctggtcaaggacaatggcgagcctccgcgctcggccaccgccacgctgcacgtgctcctggtggacggcttctcccagcccttcctgccgctcccagaggcggcccccggccagacccaggccaactcgctcactgtctacctggtggtggcgttggcctcggtgtcgtcgctcttcctcttttcggtgctcctgttcgtggcggtgcggctgtgcaggaggagcagggcggcctcggtgggccgctgctcgatgcctgagggcccctttccagggcgtctggtggacgtaagcggcaccgggaccctgtcccagagctaccaatacgaggtgtgtctgacaggaggctcagaaacaagtgagttcaagttcctgaagccgattatccccaacttctctccttagggcactaggaaagaaatagattaaaattccacccttcacaatagctttggatttaattattgataggaacccatttgataaattccttaacttcttatgattgtcttgttgattaaattgttcatgctcaccaccaccaataaggtatttttctctgattgttagttcaaattatattgttaattccagtttcccttttcctcatatttaccccgaagaggtgttgcatatagaatcccaattaacaaaatatactttatcttcaaagttgatgtcatttaaaatttttccgtctttatattttatttacttcctattcattttttgctccatttttcatgttacttctcagtttcctagaacttcaagtattaaaataacctgttgcatgtattaggcatatttcctatgttacatttcttttgtctattttcctttcaaaattggtatttttgttgggctcaattttcattataatacttttcttaaagtttctttctttcttttcttttctttctttttttttttttcctttttgagacagggtcttactcttgtcacccaggctggagtgcagtggcacaatcttggctcactgcaacctctgcctcctgggctcaacggatccttccacctcagcctcccaagtagcttggactataggtgcatgccaccatgcctggctaatcttttgcagcgatgagattttgccaagttgcccaggctgatcttgaactcctgggctcaagccatcctccctcctcagcctcccaaaattctgggattacaggcataagccaatgtgcccatccaaagttttatttatttatttttttgagatggagtctcgtaaagttacctttaaaaaaaaagttctattttccctgtattggtatctccttaaataaaataaaatattcctattgtaagtgatatgagaaatctttaaccagccttatctaaaaataaaaagagaagccattgtaagacattcagtatgtgtaaatgtgtttgtgtttgtagacaaaaggcaaaggtattatgtaaaaatatttaataatttattctttctattactgaattaaaaaatcagaggtccctgttatatttttaatggctaacaactcaatctcattaagttggaaaaaaaacttatcaaagagacatttacatggtttggcttttatattcatcatagtatacattggcggtatctagccctttctctgtaaaatatccctatgtttaatctgtatttcttgcttattatatgtaaagttgagcttctttctagatattaggcctttgaataaaattctatgtgagtcagatttaataatttgttttcactttcaatagtgttaggataggtgttagtttgatctgttctttacctccgcttatttggttcagagaaattagggcctactagatttccactaaaagggacttgaaaataaaggtcagtcccttctttaattctgcaagttactttaaagctaatctaagaaaaaaaaaaacaaattgcaaagtatgagtaaattaaagaaaacaattttcaaatggcagagatcgaaaggcactgaattttgtttcatgtcctactcactagtttatttatgcatgccttaatatagccagcatttagtgagtggctaatttgccaaccaaagatgactaagacatagttgttctcaagtagttcacacattgatgaaggggcaaactggcctgaaacaagaagcaataatatttatagagtaaacatagttgtatgcataagttttagagaagcacaatggaaagacagcctaatgcttggttctggactacagagcggtgattctagttaggcaatctgagatcttgaagacatttgttgaagaagatgtgaaacaagttttttttattgttgttaatttttggtgttcctatgcccaaagcttttgagacagtgaaattgattattttggtggttccagaaggcacccacaattttccctttgtttgcgtaagagttgtgtcagaggcgaaaggcctaacacagctaaatctaacacagagttgaacagggttactgctagaaacattttttcaactgttcaatttttatcttttctcatgaagcaatgaagaatttttaaataaacacaaaaattgggcacagccatttgactgtgttggaagccacaaggtggcgctgcagactgaagagacggaggaacaaaattgaccagaatgctacggaagtccttgacaaaaaggaaacactgagacagatgggctgagaagaagagctgtcgagtccctgattgggaaaggaaaaattaaaaaccctagatctctggtacacataagtctgggtttgcgattgctatttgtgctggggcagtgtgattgagactgacattgaggaaagaagcagctatgaagaccagggggttcagctttccaagacaaaggcaagtcctgtttctttttcttttctggggagtgtccttggcaggttctgggtttggacgttattcggtgactgaggaaacagagaaaggatcctttgtggtcaatctggcaaaggatctgggactagcagagggggagctggctgcaaggggaaccagggtggtttccgatgataacaaacaatacctgctcctggattcacataccgggaatttgctcacaaatgagaaactggaccgagagaagctgtgtggccctaaagagccctgtatgctgtatttccaaattttaatggatgatccctttcagatttaccgggctgagctgagagtcagggatataaatgatcactcgccagtgtttcggcacaaagagatggtcttaaaaatatcagaaaatacagctgaagggacagcatttagactagaaagagcacaggatccagatgaaggtcataacagtatccaaaactacacgatcagctccaactcttttttccatattaaaattagtggcagtgatgaaggcatgatatatccagagctagtgttggacaaagcactggatcgggaggagcaggaagagctcagcttaaccctcacagcgctggatggtgggtctccatccaggtctgggacctccactatacgcattgtggtcttggatgtcaatgacaatgccccacagtttgcccaggctctgtatgagacccaggctccagaaaacagtccagtagggtcccttattgttaaagtgtctgcaggagatgcagactcaggagtcaatgcagaagtatcctattcattttttgatgcttctgaagatattttaacaacgtttcaaatcaatcctttttctggggaaatctttctcagagaattgcttgattatgagttagtaaattcttacaaaataaatatacaggcaatggacggcggaggcctttctgcaagatgtacagtttt

SEQ ID NO: 10507 - DNA, 6000 bp, Homo sapiens
aggatcctttgtggtcaatctggcaaaggatctgggactagcagagggggagctggctgcaaggggaaccagggtggtttccgatgataacaaacaatacctgctcctggattcacataccgggaatttgctcacaaatgagaaactggaccgagagaagctgtgtggccctaaagagccctgtatgctgtatttccaaattttaatggatgatccctttcagatttaccgggctgagctgagagtcagggatataaatgatcactcgccagtgtttcggcacaaagagatggtcttaaaaatatcagaaaatacagctgaagggacagcatttagactagaaagagcacaggatccagatgaaggtcataacagtatccaaaactacacgatcagctccaactcttttttccatattaaaattagtggcagtgatgaaggcatgatatatccagagctagtgttggacaaagcactggatcgggaggagcaggaagagctcagcttaaccctcacagcgctggatggtgggtctccatccaggtctgggacctccactatacgcattgtggtcttggatgtcaatgacaatgccccacagtttgcccaggctctgtatgagacccaggctccagaaaacagtccagtagggtcccttattgttaaagtgtctgcaggagatgcagactcaggagtcaatgcagaagtatcctattcattttttgatgcttctgaagatattttaacaacgtttcaaatcaatcctttttctggggaaatctttctcagagaattgcttgattatgagttagtaaattcttacaaaataaatatacaggcaatggacggcggaggcctttctgcaagatgtacagttttgataaaagtattagattccaatgacaatcctcctgaactgatcatatcatcactttccaactctgttgctgaaaactctcctgggatagtattggctgtttttaagattaaagacagagactccggagaaaatggaaagacatttgctatgttcaagataatctgcctttttttctgaaaccgtctgttgacaatttttacatcctaatgactgaaggtgcactggacagagagagcaaagctgagtacaacatcaccatcaccgtcactgacttggggacacccaggctgaaaaccgagcacagcataaccctgcaggtctccgacgtcaatgacaacgcccccgccttcacccaaacctcctacaccctgttcgtccgggagaacaacagccccgccctgcacatcggcagtgtcagcgccacagacagagactcaggcaccaacgcccaggtcacctactcgctgctgccgccccaggacccacacctgcccctcgcctccctggtctccatcaacgcggacaatggccacctgtttgccctcaggtcgctggactacgaggccctgcaggctttcgacttccgcgtgggcgcctcagaccgcggctccccggctttgagcagcgaggcgctggtgcgcgtactggtgctggacgccaacgacaactcgcccttcgtgctgtacccgctgcagaacggctccgcgccctgcaccgagctggtgccccgggcggccgagccgggctacctggtgaccaaggtggtggcggtggacggcgactcgggccagaacgcctggctgtcgtaccagctgctcaaggccacggagcccgggctgttcggtgtgtgggcgcacaatggggaggtgcgcaccgccaggctgctgagcgagcgcgacgcagccaagcacaggctggtggtgcttgtcaaggacaatggcgagcctcctcgctcggccaccgccacgctgcacgtgctcctggtggacggcttctcccagccctacctgcctctcccggaggcggccccggcccaggcccaggccgacttgctcaccgtctacctggtggtggcgttggcctcggtgtcttcgctcttcctcctctcggtgctcctgttcgtggcggtgcggctgtgcaggaggagcagggcggcctcggtgggtcgctgctcggtgcccgagggtccttttccagggcatctggtggacgtgagcggcaccgggaccctgttccagagctaccagtacgaggtgtgtctgactggaggttcagagaccggcgagttcaagttcttgaagccgattaccccccacctcccgccccataggggtgggaaagaaatagaggaaaattctactctccccaatagctttggatttaattattgaaaggaacccacttaataaagacatttacttctttaatatattcttgttggctaactaaattgtgtatgcccaccacaaagaaggtactattttttgtttgattcatcttcaactttgcgtattatgcttaacttcacaagttaactttttcttattttgtatcctgatgaggcatttcttactagaatcccataagtgaaatataatatttttcaaagttgatatcatttaaaaatttttggtcgttttaaatgtctttattgactttaaattcattgcctctacattattcattagttcttcttttcctaaaactttttacttgttaaaatagtctgctgcatgtaatatgtgcttttactatttgatatttcttctatttttcttttgaaaccggtgttcttattggtttgccatccttgttcattacaactgttttttgtttgtttgtttgttttttggtttgtttgttttttttttttttgagacggagtctcgctctgtcgcccaggctggagtgcagtggcgcgatctcagctcactgcaacctccgcctcccaggttcaagcgattctcctgcctcagcctccagagtatctgggactacagttgcatgtcaccacgttcggctaatttttgtattttcagtagagacgggtttcatcatggtggccaggatggtctatctcttgacctcgtgatccaccccactcagcctcccaaattgctgggatttacaggcatgagccaccgcacccagcctacaataattttcttaaactttaccttttattttaaagttctagtttcccggcattgatagttccctatttgaaatataatgtttctcttgtaagtgatatgataaataaacccctaattagccttagaagaaaaaccactgcaagatattaagcgtgtgtaaatgggctttagtctggaaaccaaaaaaaaaaaaaaaatttagtcattctataggatcatgtgaaaatatttaatttgctccttttaattctgtataaacaaatcagaggttcctgaggttcctgttaaatttttaatggctaatagcccagtgccatccagttgaaaaaacaacagcaatcacaaagtagaggtttatattgtgcggcttttatattcagctattagagtgttattggtagtgtctagccttttcctccacgacattccttgacttaatccatttgggcctattatagacaaaatagagcttctttctagatataaggtctttgaggcagggctcagtggctcattcctgtaatcccagcactttgggaggccaaggcgggcagatcaccttaggtcacgagtttgagaccagcctgaccaacgttaagtaaccccgtctttactaaaaatacaaaattagccaggcatggtggcacatgcttgtaatcccagctactcgggaggctgaggcaggagaatcgcttgaacccaggaggtggaagttgctttgagccgagattgcaccattgtactccagcctgggcaataagagcaaaactccatcaaaataaaataaaataaaatataaaataacttaaaaagaactttgaataaaattctatgaaaaaagacactagaatgctgttcttaattttaatagtgttaagataggtgttagtgtggtctgttctttacctccctttatttggtgcagagaagttagatcctgctaaatttcaattaagaggggaccttaaaataaggatcaatctcttatttaaccctgtaagttactttaaagctaatacaagaaaaacaaagacaagtgaaagtaaggaaacagaaattgcaaagagtaaatgaaagaaaaaaactttcaagtggtcggaattgaaaggcactggaaaacgtttcaggttctacccatctgagtttatttatgcatgtcctaatacaggcagtatttattgcttgtctgatttgtcactcacagatgattaggacatagttcctatccttaagtagcccacacattgaagaagaaatagatttgcatgaattaagaagcaataatatttgcagggcaatcatagttgtatacacaagtttttatgagagaatagaggagggacagcttaaatgcattatacaagattacagagtgatgattctccttaatcagtgtgatgagattttgaagtttgttgaggaaggtgtgaaacatattttctttgtctgttttggtgttcttatcccgatgtttctggaaaagtaaaatctcctgttactttggtgatcccagatgtcagcaacattttccctttgattcttgacattgtgtgagagttgtgtctgagatgaaaggactagtagagagctaaatttagcacagtgaggtggacagagttattgctagaaacatattttcaagtgttgaatttttaacttttcccaaaaagaattgaagaatctcaacaatgtgactatttctctgtctcaacattaatttttacaagacaaacgaaaataaacatgaaaaatttaaatgaggcactaaaggaaattgtctgaatacacacacccaaatgggtacaactactgaaatctggtggaggccacacggtggcgctgcaggctaaagagacggtttgggaattgctctgaggatgctatgcaagtcactaataaaggaagacacggacagatgaacttaaaagagaagctttagctgccaaagattgggaaagggaaaggacaaaaaagacccctgggctacacggcgtaggtgcagggtttcctactgctgttcttttatgctgggagctgtggctgtaaccaactaggaaataacgtatgcagcagctatggctgtcagagagttgtgcttcccaagacaaaggcaagtcctgtttctttttcttttttggggagtgtccttggcaggttctgggtttggacgttattcggtgactgaggaaacagagaaaggatcctttgtggtcaatctggcaaaggatctgggactagcagagggggagctggctgcaaggggaaccagggtggtttccgatgataacaaacaatacctgctcctggattcacataccgggaatttgctcacaaatgagaaactggaccgagagaagctgtgtggccctaaagagccctgtatgctgtatttccaaattttaatggatgatccctttcagatttaccgggctgagctgagagtcagggatataaatgatcacgcgccagtatttcaggacaaagaaacagtcttaaaaatatcagaaaatacagctgaagggacagcatttagactagaaagagcacaggatccagatggaggacttaacggtatccaaaactacacgatcagccccaactcttttttccatattaacattagtggcggtgatgaaggcatgatatatccagagctagtgttggacaaagcactggatcgggaggagcagggagagctcagcttaaccctcacagcgctggatggtgggtctccatccaggtctgggacctctactgtacgcatcgttgtcttggacgtcaatgacaatgccccacagtttgcccaggctctgtatgagacccaggctccagaaaacagccccattgggttccttattgttaaggtatgggcagaagatgtagactctggagtcaacgcggaagtatcctattcattttttgatgcctcagaaaatattcgaacaacctttcaaatcaatcctt

SEQ ID NO: 10508 - DNA, 6000 bp, Homo sapiens
gaggggcgctgagaccctgtcccagagctaccagtatgaggtgtgtctgacgggaggccccgggaccagtgagttcaagttcttgaaaccagttatttcggatattcaggcacagggccctgggaggaagggtgaagaaaattccaccttccgaaatagctttggatttaatattcagtaaagtctgtttttagtttcatatacttttggtgtgttacatagccatgtttctattagtttacttttaaatctcaaatttaagttattatgcaacttcaagcattattttcaagtagtatacccctgtggttttacaatgtttcatcatttttttgcattaataacaactgggtttaatttaatgagtatttttttctaaatgatagtgttaaggttttaattctttccaactgcccaaggaattaattactattatatctcattacagaaatctgaggttttgattcatttcagagcttgcatctcatgattctaatcacttctgtctatagtgtacttgctctatttaagaaggcatatctacatttccaaactcattctaacattctatatattcgtgtttgaaaaccatgtcatttatttctacatcatgtatttaaaaagaaatatttctctactactatgctcatgacaaaatgaaacaaagcatattgtgagcaatactgaacatcaataatacccttagtttatatacttattattttatctttaagcatgctacttttacttggccaatattttcttatgttaacttttgctgatgtataaaacagactatgccttataattgaaataaaattataatctgcctgaaaatgaataaaaataaaacattttgaaatgtgtggttgagattgctggagatattcatttatatgttgcaaatttattttaaataccaaatttttaataagcaagaggaactaaaggttagaatgaaaaacaagtttcatcagtttttttatattactatatataaaatatatactatatataactaacattttatagttttttaagttagctgttctgccagtcccttaccacagtgtggtttcttcttgaattgatctcaatatttataaataatatgtttataatactatatcttgatattgttttgtatttgaaccatttctttctataatagaaaagcattttagctttatttccaaactaacaaacatatgcaaacattgcaaattctttttctcctattctccaatatagatgtcacagtttcttagttaaattagtggttattatctatattgttacatgcttcagaatatgcatttgtatactgtactagaattacatttccatacttgaaaagtatggttcctagagttcgtaattgttatttcatacttgcattattttctatgtacctctattgtttttttccatatctttcatttgaatgtattttctccttaaaaatattccaatttttaagatactctgtcaatgacatttattttcaggagctctttcatcgtgagtttcctgtttcatttagactggttaatctatagactgttaccctgggactttttcccttcaatactttcctgtatgagtctacttttccaaggtccagtatactcttttttctagtttactctcttattcagctggcacgcatctctcaagaccttcatataaacgaatgcagaagagatttttaaaaaattgtctccttacattgtgaagacatcttttttgtttgttttcatttgcttgatagtttgactgggtataaaattctagtttgaaaataattttccctcaaattttgaaagctgaagctgtctcttttactcattgcatgtcgagtttcttcagaagactgacttgattttgattccatctctctttgtgtccttctctcttacctcctttcctggaagcattgaaaaactttttcctggtaatctgaaaagaccttaatacaggcattttatttattaatctggccatgcaggcataccctgttaacatatagactcttactgtaagttctgagaaattttcttgttatgttttagtaataatttatccattgagttttctacagtctcactttaaccagaatctcattaaatattgcacctcctgtgttgattttctgagactctaaattataatttttttcttcttttccatctcttgttctacttattagacaatttatttaatcatccaatctccatatttaagtttttctttttggatagcaaatatttatttttaagagctcttggtttttcataacatcctattacaaatttgcaaatgtaaatcttctttcatctataattaatctatttattctttaaaaatgcattatatagtaagagttattattatacctattttaaacttgcaagtgaatcaaagggaagttaagaatttgcctaaggctatatagctagtaaggggcacttaagccctaagctattctttgtcttccaggtataaatacgtacttgatagggttactgttaacatcaactaggtaaatccatatgaggcactagaataatgaacttagaataagtcaataagtgttagctcttattacattttgtttctctggggatactaatcagacattttaaaaggctttcttttgttttctgaattatatctattccctcctgttgctttttgtgcttggcggtagtattacagttttggcttttctatttcatgttgtaggcattttctcaaatgtcttgttatctttgactgtcttattatatatatgaatggtgacacagcaaatgctgacagtcaacacttcatgagtattgatgacagggcttcactctaatgtaaccatgctaggatagagctactaccttgggaaacccccacatatcagtacatgtaagtctttatctgcgcctttcatattccccaggatagaattctacaatattcaatgttttgggtgcgatggggaagatgtcaggcatatatcttgtgtcctacaatctgagagtatcatggctaggagtctcacaatacagaaggcagtgttttgcctaatctccctatctttagtttcatacctcctactttcactcagctctgcctggggtttccaagactggagatagtataatttctccagaatataatctaatttctccagagtataagctttccattctctggctctcagttattttcttgtctctgtatgatggtgaaaagaccagagaattcaactatcctacatacatactttcaactaataacttcttttttaagcccttacttgacttcagccttcttatacacctggttcctccaagtctggtacctactaggattgtgtagggaaaacccagtagtttatttttagtatctccaatgaaggaactttattttagacatttcttggaactattgtcaattgctctttcatctgctttctatcatcaaataatttgtgtatttacttatgtattcttagtctttgtgaattcataccttttattacttttctgtcattttagagaggggttaagaagaaggaaggataattgtatagtcaatccacatactattcaatttctactcttctgcactgataatttttcaaccatgtatctagttcacatttttgtgaatgtaatttgaaattagaatttttaaaagcagacttcttagatgtcctccattattgagagtactttgagatgtctaacagtggataccattggtagtttccaagcacctattccaactatctccctcattatgccatgcactttggctaggactgaaaccacctcaagtttaaggggcaatctctgcctggattaaaacaaagggtcaaagatggagtctttagattctgggactataatctctacctttaatcctatacatcttgagacactgatttcttcagtaacaggctgaagtgctctcagttggtctaatcagaatgaaggctaagattttgttctattattgaggaagaaaatatctctcattctgtcttcttgagctgaaaaacaaagcagatagccatagatgttgctggaataaatcttgggaaactgagggagggcagtcttagaaataagcctgctttaaatgaaactaacatgcttgtgcttgtgtatttattattttttgagaagctggaactaaatcaaggattctcataatgtgttctactcccaatatcttactttactttctagcagttcacaattccttgctaccaaggaaatctatataaatgccttcttgtgctatcataactatcaaagtatgtcccatctcatggttaatccagtttcatatcctctgagaggacttctaaaatgacccatgtatagtttgccttttcattaccacctaaggaaagtcaagtagtgatagaattttgtacagcttaaaaatattatggttgttttatgtttccagtcttctcagaaagattacaaaccactgggagccaggaatcacatcttgtatttctgtattcaccacaactaagcacgtttggttgtatggagaagggggaaagataaatgctttaagatgaatattaacagcatatcaaactaaagagaatatgaaataattattacagaacgtgcaatatatttgtaatcacttgaacacaatgaataaaacaatatttgtttccggaggacatataagtgaatggaatttaggtagctttcaccaaactgtgaaaatctatggagacacttggtggcgctgcaggataacatcgtgaaaaatatattcactggatggcgttgtgaacactgatatccagtgcacacagagaatcagaagacagaaacaacaagccttcaagagggtgacctggaaaccattcaacagggttaaaatccttagaccacagaggatttggtggacaagtcagagacgcgttccgcagagctgaagcctttcttcaagaagcctacaagaaaggaactatggagaaccaagggacacgcactcagcagataaggcaagtcctgcttctctttgttttgctcggaatgtctcaggcgggctctgaaacctggagcttttctgtggcagaagaaatgcagagcgggagttttgtaggcaatctggcaaaggacctggggctgaaggtgagagaactgtcctcacggggggctcgggtggtctctaatgataagaaacagcgtttgcagctggacataaacactggggatttgctcttaagtgaaacactagacagggaggagctctgcggttccatcgagccttgcgtgctacatttgcaggtgttaatgcaaaaccccacgcagtttttacaaattgagcttcaggtcagggatataaatgatcactctcccatcttctcggaaaaacaaatgctcctagaaatcccagagaacagtcccgttggtgctgtgttcttactagaaagtgcgaaggatttagatgtaggaatcaatgctgtaaaaagctacacaataagccccaactctcattttcacattaaaatgagagtcattccagacaataggaaataccccgagttagttctggacaaggcgctggattatgaagagctcccggagctcagtttcatcctctctgctctggatggtgggtcccctcccaggtctggaactgccttggtcagggtggtggttgtggacattaatgacaactcccctgaatttgagcaggctttttatgaggtgaagattcgggagaatagcatccttggctcgctgattttgattgtctcagcttgggatttagactctggaacaaatggtgaaatatgctataccttttcccatgcctcagaagatattcgcaagacatttgaaattaatcaaaagtctggagaaattactttaagagcacctctggattttgaaacgattgagtcatactcaataatcattcaagccacagatgggggaggactttttggaaaatctacagtca

SEQ ID NO: 10509 - DNA, 6000 bp, Homo sapiens
ctgttggaaagatattcacttttccttttattttgtaaatttatttcattattttcaaatgtaaaaatcaagatgaactaaaggttgaaagaaaaacaaggcctgcctcagtggcttggctgggtgggttagatcacacctgtaatctcagcactttggaaggctgaggcgggcgggtcacctgaggttgggagttcaagaccagcctggccaacacagtgaaaccccatctacactaaaaaatacaagaagtagctgggtgtggtggtgcgtgcctataatcccagctactcaggaggctgagacaggagaatcacttgaacccaggaggcagaggttgcagtgagccaagatcttgccactgcactccagcctgggtgacagagcgatactccgtctcaaaaaaaaaaaaaaaaaaaaaaaaagaaagaaagaaaagaaaagaacagaacaatattttctttaatttccagtctccttctattgagtggcttcttctagaattacctcaatacttctaaatgatatgtttttgctgttaaatcttgctactccattttacattttaatcacttcttgctatgtattttttaaaaaagatttaactttcttttcaactaatgtaaaccaatataagcactgcacattccctttctcctattctcccaataaaattgttacagttttttttttctttttgacagagtcttactctgtcgcccaggttggagtacagtggtgtgatctcagctcactgtaacctctgcttcccaggttcaagtgattctcctgcctcagcctcctgaatagctgggattacaggcacccaccaccacacctggctagttttgtagctttagtagagatggggtttcaccatgttggccaggcttgtcttgaactcctgaccccagctgatcctcctgcctcagcctcccaaagtgttgagattacaggcgtgagccacagtgcccagcctacagttttttttaagttaaactaatagtgtccatattgctaagctttcttcaaaatacacattagtgtagtgtgattaaatttcctttcttgagaaacatttttcctagaactgaaaattgttttgtacttacataattttccatttactaatattagtttctttacattctctaatttgaatctctttcttctcaaaatattcaaatatatcagatacctgtcaattatgtttatttcttggtgatcttgcacccagatctctacttcattcatactggttgctctataggctgtcaccctaggactttaaaaaatatttttctttgttggtccttttttataagatccagtacattcttctttcttagtttactcacttattttgttgatgcacatctctcagtaccttcataaaaatggatacagaggaaataaaactttttgagagcttgctttgttattttctttttttttatttgattgatagtttgggcataacattctaggttgaaaataattttccctcagatttcaaaagcactgctccttttattgactgcatatagaattgctgttcagaagactgattccattctgattcctatgtctttttatgtgattccccccctttttttctttctttctgtgagcattgaaaaaaattcccctggtcttctgaaaataccttagtactggctctttattgattaatctggttatatcgctatgccctgttcatgtttaactttttttttttttttaagatgatgtctcactgtgttacccaggctggagtgcagtggctattcacaggcacaatcacagcaccctgcaagctctaactcgagagctacttctgcctcagccttccaagttgctgggactacaggcatgtgctagaccccttggctaatgttcagactatcaattttatttctgagaaattttggttgggcatggtgactcacacctgcaatcccagtactttgggaagctgaggcaggattatttgaggccccgagtttgagaccaccctgggcaacatagtgggaacctatctctacacaaaaacaatttgttaaaaggaatttccttggtatgttttactcataatttctcctctgagttttctggattctcacttcaatgaaaatctcagttaaatattagacctcctagattgactctataagactataagccatttttcctttcttattttctctttgcctctcattccattttttggacaatttatttaatcactcaatgttttatgtataagtttttctttatgactgaaaaatatttacttttaagagttgtttttggttctctgaatgtttttcatggcatcctgtcatagatttataaatgtaatattttctctcatttataattaatcttttctttaaaaatgcattaggcagtatcattattatatatccattttaaaagtgaaagtgagtctaaggggagttaagaacttgtccaaggtaatatagctagtaaaaagcactgaagtcctaatctagtcttcatcttacaataggaatatgtacttcatatagttactatttagattaagtggataaatacatacttcatacagctactatttagattaaatggataaatgcattatgaggcacttagaacaatgagtagcatagagtaaatactaaataagtattagcttttattagattttctttctctgggaatattaaccagacattttcaaaggctttcttctgctttctatattattgttccttttttttttcttgatggtagcgatggtggtagttttggtctttctatgttatgttgcaggcatttcctcaaatgccttggctatcttctcgtattttagaaggatgatatatcaaaatgctgacaatcaactctgtgagcgaacagtacctgttgatggcagggcttcattctaatataaccatgctaggataagtctattaccttatgagatgccaaatattaatatgtgtcttcatttgggctttcatattctccaggttagaattctacaatatacactatggggatagactaggggtcaggcatacactttgtgtcctacagtctaagagtattgcatgaaaagggattagaagtctcaccatgcaaaatgcaaaggtttgcttactctccctattttcagtttgacacctcacacttgtgctcagctgtgcctagatccccaagactagagaaagtcccattaaatttctccagagaataaactttctattttctggctgtgagttatgtttccatctatgtagggtgatgagaagaacagagaattcaattatcctctacacatacttccaactaataacttttttccatccttaactgacttcagtcttcttaaacatctggttcctccagatcttgcgcttaaaagagattatgtttcttgtgagtatcttcaatgcaggaactttactttaggggcactttttggaactgctaagttaattgctcttccacctgctttctgtcatagaaaaatgtatgtgttcacttgtgtattcttaatctttgttagttcctaccattttaattacttttctgccattttagtgcatatttttttttaaaaagagaggttaattgtgtgtgctcaattcatctacttttcaagttttacccttctgtaccaattactatttcaaccatgtatccagcttacatttttaagaatattaattgaatttaacattttaaaatgcagacttgttggattcttctcccatccattcttagtgcactttaagactttctatagtgaatatcactgatgagcccttagcatctgttgcaaacagtctccctcattttgtaccaatgaggtactttggctaggactgaaaccttcccaagcttaagaggtggtcccagacaggattaaaacacagtaatggccagagacaggtctttagattctaggactaaaatctccaactataattctatacctcttgaaacaatgattgcttcagtggcagacacatgatcttacttggtctaattagagtgaaagttaggtttttgttctatgtttagggatagactcttactttctcttcctgggctgaaagagaaaacagatagctacagttgtggctacaataaattttgggaacctaaggcaagtcagctttaggaataagagtctgctttaaattaaactaacttgctcatgcttgtgtacttatgaatttttttgtaaattatgaaaaactggaactaaatgatgggtttacataacatgttccaccccaatctcttgcttcattttctgcctgttcacaattcattgctattaaggaaatctacagaagtgcctttttatgctgttgtgttgacctatatatgcctcatctcatggttaatccagtttcataacttcagaaaggatttctgagatgacctttcctttaccttatcacgtaaggaaagccaagtagtaatagaatttcattcagcttaacaatcacttataccctgcttgtttcaggcttacaattgtctcagaaacactatgaattcctgggagccagggatcacatcttgtatctgtgtttaccacaactgaacacatttggttgtgagaagagtggggaaagacactgaataaatgctttaaaacaaaatcatcatcacaaactataaagaatataaaacgattattatggaagataaaatatatttttaattacttcaacagaaggaattatttaaacgcaatatttatttgcttctggaggacatttatgtaaataaaatttaggtagtgttcatcaaactgtgaaaatctgtggagacgcgtggtggcgctgcaggataatatcaagaaaaaaattaccctggaggatgttgtagaccctgttatccagtacacgcggagaactgggaagacagaaagaacaatcctttaagggagaacctagaagccattcaacaaggttaaaatcttcaggcttccgaggatttggtagacagatcagaggcacgtttcccacaactgcgaagaggcgctgaggcaattctgcaagaagattttggggttttggaaaagaagctatggaaaacggaggggcaggcactctgcagataaggcaagtcctgcttttctttgttttgctgggaatgtctcaggcgggctctgaaactgggaactttttggtgatggaggaattgcagagcgggagctttgtaggaaatttggcaaagaccctgggactcgaggtgagtgagctgtcttcgcggggggctcgggtggtttctaatgataacaaagagtgtttgcagctggacacaaacactggggatttgctcctgagagaaatgctagacagggaggagctctgtggctccaatgagccttgtgtgctgtatttccaagtgttaatgaaaaaccccacgcagtttttacaaattgagctccaggtcagggatataaatgatcactctcccgtcttcttggaaaaagaaatgctcttagaaatcccagagaacagtcctgttggtgctgtgttcttgcttgaaagtgcaaaggatttagatgtaggaatcaatgctgtaaaaagctacacaataaatccgaactctcatttccacgttaaaataagagtcaatccagacaataggaaataccctgagttagttctggacaaggcgctggattatgaagagcgcccggagctcagtttcatcctcactgctctggatggcgggtcccctcccaggtctggaactgccttggtcagggtggtggttgtagatattaatgacaactcccctgagtttgagcaggctttttatgaggtgaagattctggagaatagcatccttggctccctggttgtgaccgtctcagcctgggatttagactctggaacaaacagtgaactatcctataccttttcccatgcctcagaagatattcgcaagacatttgaaattaatcaaaagtctggtgacattact

SEQ ID NO: 10510 - DNA, 6000 bp, Homo sapiens
agctttgtaggaaatttggcaaagaccctgggactcgaggtgagtgagctgtcttcgcggggggctcgggtggtttctaatgataacaaagagtgtttgcagctggacacaaacactggggatttgctcctgagagaaatgctagacagggaggagctctgtggctccaatgagccttgtgtgctgtatttccaagtgttaatgaaaaaccccacgcagtttttacaaattgagctccaggtcagggatataaatgatcactctcccgtcttcttggaaaaagaaatgctcttagaaatcccagagaacagtcctgttggtgctgtgttcttgcttgaaagtgcaaaggatttagatgtaggaatcaatgctgtaaaaagctacacaataaatccgaactctcatttccacgttaaaataagagtcaatccagacaataggaaataccctgagttagttctggacaaggcgctggattatgaagagcgcccggagctcagtttcatcctcactgctctggatggcgggtcccctcccaggtctggaactgccttggtcagggtggtggttgtagatattaatgacaactcccctgagtttgagcaggctttttatgaggtgaagattctggagaatagcatccttggctccctggttgtgaccgtctcagcctgggatttagactctggaacaaacagtgaactatcctataccttttcccatgcctcagaagatattcgcaagacatttgaaattaatcaaaagtctggtgacattactttaacagcacctttggattttgaagcaattgagtcatactcaataatcattcaagccacagatgggggaggactttttggaaaatctacagtcagaattcaggtgatggatgtaaacgacaacgctcctgaaatcactgtgtcatcaattaccagtccaatcccagaaaacactccagagactgtggttatggttttcaggatacgagacagagactctggggacaacggaaagatggtttgttctatcccggaggacatcccattcgtgctaaaatcttcggtaaataattactacactttggaaacagagagaccgctggacagagagagcagagccgagtacaacatcaccatcaccgtcaccgacttggggacccccaggctaaaaaccgagcacaacataaccgtgctggtctccgacgtcaatgacaacgcccccgccttcacccaaacttcctacgccctgttcgtccgcgagaacaacagccccgccctgcacatcggcagcatcagcgccacagacagagactcgggcaccaacgcccaggtcaactactcgctgctgccgtcccaggacccgcacctgcccctcgcctccctggtctccatcaacgcggacaacggccacctgtttgccctcaggtcgctggactacgaggccctgcaggggttccagttccgcgtgggcgccacagaccacggctccccggctttgagcagcgaggcgctggtgcgcgtgctggtgctggacgccaacgacaactcgcccttcgtgctgtacccgctgcagaacggctccgcgccctgcaccgagctggtgccctgggcggccgagccgggctacctggtgaccaaggtggtggcggtggacggtgactcgggccagaacgcctggctgtcgtaccagctgctcaaggccacggagcccgggctattcggcgtgtgggcgcacaatggcgaggtgcgcaccgccaggctgctgagcgagcgcgacgcggccaagcacaggctggtggtgctggtcaaggacaatggcgagcctccgcgctcggccaccgccacgctgcacgtgctcctggtggacggcttctcccagccctacctgcctctcccggaggcggccccggcccaggcccaggccgactcgctcactgtctacctggtggtggcgttggcctcagtgtcgtcgctcttcctcttctcggtgctcctgttcgtggcggtgcggctgtgcaggaggagcagggcggccccggtcggtcgctgctcggtgcctgagggcccctttccaggacatctggtggacgtgagtggcaccgggaccctgtcccagagctaccactatgaggtgtgtgtgactggaggctccaggtcaaataagttcaaatttctgaaaccaattatccccaacttcctaccccagagcacaggtagtgaagtcgaagaaaatcccccatttcagaataatttgggtttctgataaagaatgaaaaataaaacctgtgtttatgaatacatttataattaggaacttatcgtgaggtgcctgtaaagtagtatttttgatcacttcaaatacatactcttcaagtcaagaaataaatttctttacatagaaaaggatacagatttagtaccaagaacacttcacaaagcaggaaatgtgcatgtgtaatggtttatgtcaaacaattatgcttaatataaagtctattaagtggtaagtcttgtttgagatattttaaattgctttccattgttttcaatatttactgtgacttttgttttctgagttgattagaatgctgttcgagtatacctaccctagtttcagaagcatagattgtagtgtacctttttaaactttatttttttaaaaaaagttgttttatgaatcatacactattttcacacttttaatctcagaagaaacatatgtgacatggtattttagtaatgaccaaatagacggtcttagagattcagtaagttcactaaggtccactaactaataagtgacaaaactgagcatccatcctagatctgcctgactctaagtcagtgactttgctcccattccatactgtttttgtcattggatatcacctggcaagtttctgcctaactaaagagaagaaaagtttttatcgtattcatactactgttcaatctttatttagaaataaactttatctatgatttcattttcttataaaccagtaatcttgcttttctgggtaaattttcagctattattactaatgctctgatctgcccaaatcttaagtaaaaaacaaaattgaaagagcaacctatgccttctcattgtctcctgaacatataactatcatttcacagaaaagattaatggtcctgattaggaatagtacataattttgatggcattattagttaattattttctttacattgtagtatatttccagagtcacccatgcttacatttgtaatatattttcctgatttgagagtttgtttttagcagtttttcttacctatactgcactgctgaatcaggaaaatttaagaaaaagaatagatttaaatgtgtaatatcaaagagaaatatagatgatcattaaatttttagaaattttggggagttaaggagaagcattgtttgttaaaaatatataaccgattcttatatttaaaataggtaatttttgcatagttgtgttctaaatatattataaactagtgccagtaactctaataaagctagtattactgcatatcactggtgggatagaatctaaggacaaaaactcacagtagtaaaatctaaaattgctttcatggtctcagggtaaaattatccaatttctctgacaaataaatggctcaaaaaataagaggagtgaagtttacacaaggaaaaatcttaagaggtctaccactcaaatacaatgtgtggatcttttttggatcttgattgaaacaacagcaatgactttgaaaaacttggaagaatttgaatatagatgggtattaaataatgttaacttgatttttaggtatgataatggcattgtacttaagcatatttttagagtcatttaaagtcatgatgcttttaaagaaatgtataatgacgtatttgtgggagaaaattcagtttgtctgggatgtgaaaatgttgaagggatagagtcaagaattatggcaaaacattgataatagttgaagctagtactgagtccttggaggatcattatactcctctcttttatgagatttgaaaaatttcaaaataatgtcttttaattgatgctgttagaagtggaggtaataaaaaaggacatccttcccagaaacaaaatcaccactgctgttacagatattgtctctatttagacaaactctccagcctttccttgttcatttcctttcattattggacataacctctctacctgagatagtcatgctcctgtattcttctaccatttgaatttcgaggtgtttatctagttatagtaatggatttatgctagacttatgatggatttatgccatcaagactcagttacttgatggcatcaaattgctttatacttggtatataccttatttttaaggttaatatctatttgcattagattcctcatgtttaaggtggggaattcacaacagccctatgtggtaggtactgttcttatcctcactttacagaggagcaaactaaagcagagagattaaataatttgttcgaggttcacagctactaattattcctatggttcatggaaataaaactataaagatctaaatgttgtccatgataactacaattatatttgaaattctttttgccaagctagactattacctaaatatttcctttctgcccaaaactcagttatcattgttgaaagactaatgtgatttctcctttgggcagttgtctgctcactaaagtccggcgatattaacggtggtgttgtaaccttacatagtctcggggtgcatacaggcagagttgggaatattacatccattatcattccacaaaatgtaagatcctgtgaggacgcgtggtggcgctgcaggataagaaggcacaaaccagaaccgcagctgcagctccattaaccggcaaaaagcagcagaacctggaagtccacggggagcttggatgccaaagggaggacggctgggtcctctggagaggactactcactggcatatttctgaggtatctgtagaataaccacagcctcagatactggggactttacagtcccacagaaccgtcctcccaggaagctgaatccagcaagaacaatggaggccagcgggaagctcatttgcagacaaaggcaagtccttttttcctttctccttttgggcttatctctggcgggcgcggcggaacctagaagctattctgtggtggaggaaactgagggcagctcctttgtcaccaatttagcaaaggacctgggtctggagcagagggaattctccaggcggggggttagggttgtttccagagggaacaaactacatttgcagctcaatcaggagaccgcggatttgttgctaaatgagaaattggaccgtgaggatctgtgcggtcacacagagccctgtgtgctacgtttccaagtgttgctagagagtcccttcgagttttttcaagctgagctgcaagtaatagacataaacgaccactctccagtatttctggacaaacaaatgttggtgaaagtatcagagagcagtcctcctgggactacgtttcctctgaagaatgccgaagacttagatgtaggccaaaacaatattgagaactatataatcagccccaactcctattttcgggtcctcacccgcaaacgcagtgatggcaggaaatacccagagctggtgctggacaaagcgctggaccgagaggaagaagctgagctcaggttaacactcacagcactggatggtggctctccgcccagatctggcactgctcaggtctacatcgaagtcctggatgtcaacgataatgcccctgaatttgagcagcctttctatagagtgcagatctctgaggacagtccggtaggcttcctggttgtgaaggtctctgccacggatgtagacacaggagtcaacggagagatttcctattcacttttccaagcttcagaagagattggcaaaacctttaagatcaatcccttgacaggagaaattgaac

SEQ ID NO: 10511 - DNA, 6000 bp, Homo sapiens
tagctcactgaagccttgacctcctgggctcaagcaatcctcctgacgcagcatcccaagtagccgggaccacaggcacatgccaccccccacagctatttttgtttgtttgtttgttttttgttttgttttgtttttgaggcagagtctcactctgtcacccaggctggagtgcagtggcgcgatctcggctcactgcaagctccgcctcctgggttcccgccattctcctgcctcagtctcccgagtagcacccccagctattttaaaaaaaatttttgtagagatgggttctcatcatgtcgcccaggctgttgaacttctggcctccaaaggtgggagttattctagcagcttccctgtgatcttctcatatctactggtggagtgggaaagagtagttcaaacaactcagacagaaaatctcgctggtgcaacagtggagagaagggccaagtacttgtcctgttacttccagtttttctagatatatgagcagcaggactcctctctttataaaaagaactatgagtttcctggctctaatgaagagtgaccaggcattcaggagctcaaatgcccagatacatataaccaaccaattctcctagaatgcattgctaaaaacgaattttgcttatatgcttcaaagacctcatttatagttatacttaaaacagtgcataggaatcaagctgtatcagccaattttatatgaaagaactataggttgtaagtaacttagaatataattttttatctagcgggggttaaaggacacttagaaaatagagacacaagagatggcccagccttacagaatggattctcctgaaaacgcttacaataaaaaccaaataacagtattttttttttatttaggcaatagtatgggagggaaaagggacataggacattttatcttacaaacacattgttctctttatctttctgtttcaagttctaccaccactcctgggtccactgattaatctaacaacatggcctctcagtccctaagtctttacctctactcctgtttttcagtcattaatgccctggctacatattgtactttttccccaccaagaaactgttctatgatataataatttcagctatctccctctgagtgcacaattgtctatgcctataaccttctcattctgctgtttctatcacatcttgtctttgaccttatcagagctccattccatggtgctgttactacctatcaaacgctcctgttttaatttccttcctattcagctgatttcctggtttaccactcccagttgctctcatgcccatattctcaattcccttgttcaattttccttcactaaaaccacctgatgaaactccagcccagatgaatatagtcctcctcctctcttacacatggggtgctgcactctataagaccaaacttacaaaattagcaataccactgccactataaatgtataatattcaaacctaattgggcttctgagaccaagaactccttttataatttttctaacgagctttctcttctacgctccacaacaactattttaaacctacgtatcttactttaaacttcttaccctaccacttagatacccccttttatccgatgaacttgcctgataccttattgagaaaatagaatccatcagctagaaattcattttcctgtcccctactccacagctttaacagcatctgtatctatacttttcacctgctgaggtccgtcccactggtctaaatccaaacacttcatacattgcctggatcccatctttaacaacctttctaggggacttgcattatcccttctgtatcttaattttctccttccctactgaacattacacattggcattttaaatatattcaagtttctctagtctttaaaatactctctgagtctgaattcttctccagataccaatgtatttcttattccttttacagccttttcattctttacaaatttcttgagagcctggatgcagtgagccagtgagcctgggtgacagactgagaccctgtctcaaaaaaaaaattgttgaaagagcggtttacctcatttttgcttcctcatccgcctcactttgcaccgaagtacaatctaattttcatcacaaccattctactgaaactgctattgcaaatgttatcaaagatttccatataagttaagattatactgtggaaccaatgtgatgcaatgacacagtggcttgtaaacatgtctctctttttcacatgacagtaccaatgtaaaaattattaggtaggtagggcagctttcatcctcacagtccttctgaaaccaaattttctttcaagtaatttcttcaacattccctatggcaatataatctgcatggctgtagctgggtcactgtcacatctgggttctagctcgcttggaagaaagaggcatatccagatgatttctgttctataactggaaggggaagacagaaattctgctcacaatccatctgtgagaacttaattcacttggccacactcaaatacaagggaggctgggatgggcaatctaccttcatggccacatacctgggcacagttctattactatagaagcaaaggaaaacagattttgtcagacatctatcagaatcctccacaatgaccatctttttaagcccactggataattgtcatacttatttttcttgatttttctgaagcatttgcagccattgatcttccttatctccttaaaatgctatttgcttttgatttcatgattttgaactctgagccttctttatcttttcaaatatacttcttgccctgtctcctctaaatgaagatgtttctcagagttctgtgccaagcctcttttatacttatttgacacacttttgcttggttatcctagagcattcatggtgtgtatatatatatatatatatatatatatggtgattgaaaccatgaatgctatatatatatatatgctatatatatgctctctgtatatatgctatatatatgctctctctctatatatatgctatatatatgctctctctctctgtctctctctgtctctctctatatatatacatatatacacaccacagttcatattgccagctcagatttatttcctatgctttggttatatgcaaacacacacacacacaccccaccaccacgcaaacacacatcctacaggcacttacctcaatatcagcatgttcaaaactgaacacttcatctttttccaccccaatcatgtttttttttagcattccctgtcctagtgaatgacaccactagtcatccagatgcccagtccagaggtgtgatatcatctctgagtctttcccatttttctccccatgcaacctatcaaccaacagttgaaaacatttcatctcctcatacctttctattcatccctcttctctccatccacactggcattatcctcatccagatcatcatctcttatctgatctccttgattctccagtcactccccctgaaattaattctccatactgcagccaaactgattttttaaaatgcagatgtaatcatgttaatcagatatttaaaacccatctttgtacttgaattacctttaggataaattcaagaatgcatgatatgacctgtataatgattcatgttctcaccatgcttttaaccctaatttcattgttagaccctccccttccatagtttttaaagtccaaggcatacttcatttctctgtgttcctcaaaatgcccatctgaaatattcctccttctcctggctagttccttcagatcacaatgtatttttcattacctcaggaaagctttcactgatgtcccaagtccgactttgatcttaattattttatttttgacagacacttaaccagcacttacaaaccactttgtaaatattaattcattagatgcctacgataataatcataggagacaaatattattaccccattttacaggtgaggaaacaaaggtatctataacttgcccaagcttatagatagtaagtcacataaccaggattctaatattgataatttggttccagatcccatattcccaagcactaaggtatgcagcctcctaggtacaagaagtcttttctaggtatttctatattactttttataaatgcatacattatgacatacttcgtttacttgtctgccaatttttctagcttgtgagctctgtaagagcaagaattatctctaacttatttgtgccatgtccttctttatatttttaaaatataaaagtgaaaaaagtaatgatattaccaactatagctgacaacaagtatttacaagagtgaaggagataatatatttgtaattactcgagaaatgacttaaataaaaaattatttcttcagttcagaatattttaacagatcctttagtgccgagcattcaaaacagtgataatgcagtgtatggacttttctggattcaaattcaaacaaaccaacagcaaaggacattttggagagaactggggaaaaccaaatgcagtataaattacaccaaggaattattgctcaagttgttgattgtgaacgttttattacaattatcttttagaaggccttacctattaaaaatacttagtgaagtatttaaaggaaaaaaaatgatgtctgggatttgtttcgaatgttccggatgtatttatgaattactttttcaaagaggaaaacttttttaatgaaaaaaaaaacatggagacacatggtggcgctacaggataagacgaaaacagtacataggctggcacggtgagcttcgctattcaggagaacagaaagcatccaacccactgaaaagacaggcattaaaggagcttcgcctacagagctgctggaggatacactctccagggggttcctgttaaaaaccagagcttcagcttccaaaattacggctgagcttcagtttttccacaagagattgcctaaaggaaccatggagatcagaggggcactcgatctgcgaaaaaggcaagttctaatattccttgttttgctgggattgtctcgggcaggtactgaatctgcacactattctgtggcagaggaaacagaaattggctcttttgtggctaatctagcgagggacctagggctgggggtggaggagctgtcttcacgtgaagcccgggtagtgtctgatgataataaaaagtatttgcaccttgatttgctgactgggaatttgctcctaaatgagaaactagaccgagacgagctgtgtggctccaccgagccctgtgtgctgcattttcaggtggttttggaaaaccctttacagttttttcggtttgagctgtgtgtcaaagacataaatgatcactcccctacatttctagacaaggaaatacttattaaaatatcagaaggtaccactgttggagctacctttctaatggagagtgctcaagatttggatgtcggaagcaacagtctccaaaactacacaattagccccaattctcacttctacattaaaattcccgacagtagtgacagaaagatatacccagagctggtcctagatagagctttagattatgaacaggaagctgaactcagattaacactcacagcagtggatggtggatccccgcccaagtctgggacaactttggttctcatcaaggtgttggacatcaatgataatgcccctgagtttcctcagagtctctatgaggtgcaagtccccgaggacagaccccttggctcctggattgccaccatctcagctaaggatctggatgcaggaaactatggaaaaatatcttacacatttttccatgcatcagaagatattcgtaaaacatttgaaattaatccaatatctggggaagttaatttgagatcacccctggattttgaagtaatacagtcctacactataaatattcaggcaacagatggtgggggtctttcaggaaaatgcacccttct

SEQ ID NO: 10512 - DNA, 6000 bp, Homo sapiens
cctcccagaactgggactgctctggtcctcattgaaatcttggacatcaatgacaatgcacctgagtttgtgtagccactctatcaggtgcagatatcagaaaacagccccctggattcccttgttgccactgtttccgctagagattcagacatgggaattaatggtgagatattctactcattttttatggtgatgaagagatttctaagacatttgcacttaatgaacgaaggggagaaattaaaataatcagaaaactagattttgaaaaaattgtgtcatatcaggtggatattaaagcctctgatggggcaggtctttctggaaaatgcactgtcataatacaggtggtagatatcaacgataacgctccggaactgaccatggcttcattcacaagccccatccgcgaaaattctcctgagaccgttgcagctcttttcagcattcaagaccgcgattctgggaaaaatggaagaatagtttgatcaattcaaaatgatgttccgttcatgccgaaaccttccgttgagaatttatactggctgttaacagaaggaccactggacaaagagattagagccgagtacaacatcaccaacacagccacggacttggggactcctaggctgaaaaccgagtacaacataacggtgctggtctcctacgtcaatgacaaagcccccaccttcacctaaacctcctacaccctgttcgtccgcgagaacaacagccccgccctgcatattggcagcgtcagcaccgcagagactcgggcaccaacatccaggtcacctactcgctgctgccgccccggaacccgcacctgcccctcgcctccctggtctccatcaacacagacaacggccacctgttcgccctcaggtcgctggactacgaggccctgcaggagttcgagttccgcgtgggcgcttcagaccgcggctccacggcgctgagcagcgaggcgctggtgcgcgtgctggtgctggacgccaacgacagctcactcttcgtgctgttcccgctgcagaacggctccgcgccctgcaccgagctgatgccccgggcgggccgccgagccgggctacctggtgaccaaggtggtggcggtggacggtgactcgggccagaacgcctggctgtcgtagcagttgctcaaggccacggagccagggctgttcggcgtgtgggcgcacaatgcactgacaggctgctgagcgagcgtgacacagccaagcacaggctgatggtcctggtcaaggacaatggcgagcctccgcgctcggccaccgccacgctgcacgtgctcctggtggatggcttctccctgccctacttgccgttccctgaagcggccccggcccaggcccaggccgacttgctcaccgtctacctggtggtggcgttggccttggtgtcgtcgttcttcctcttctcggtgctcctgttcgtggcggtgcggctgtgcaggaggagcagggaggcctcattgggtcgctgctcggtgcccgaggacccctttccaggcatctggtggacgtgagcgacaccaggaccctatcccagaggtacaagtatgaagtgtttctgacgcgaggctccgggacaaatgaattcaaattcctgaagtctgttatccctaagcatccgggcgctgtgaatgatgggaggaaaagtccaactttgtaaatggttttggattcaattaagaatctgtagatttttcagagcatttaggataaaggttagtcctttatcaatatattaagtctctgttatgttttttgtgctatatggattttctaagatttttgctgatttcattttcctacttaagattagacattttctttgattatttgttcatacttggtctccttttatcatgtccattttgatgaatacaactttcaggtttactcattaatgaaaagtaatatttgttcaatttatcaacttttcaaaatcacaggctgttgacttgaagactccagctccattccgtttcattaaagaaagcttttctaaacttttgatgcttagaagacaggaacgatgatatagtgattattagtacatattctattgattctgtcttatgcttacctgtcttgaatttttaaatggagaagcgtctgcaaaaattgcatcgttttatttcacaatagcttgaagtgggaaagactacatttttccccaaacttaaagacttttctgctctttttataaccttcactccataacatatatgagcattattattactattattgagtcagagtttcactcttgtcgcccaggctggagtgcaatggcgcgatctgggctcactgcaacctcgcctccccggttcaagcgattctcctgcctcagcctcccgagtagctgggattacaggctccttgttttagtagagatagggtttcaccatgttggccaaactcaaactggctcctgaggtcaggagtttggctggtctcaaactcctgacctcaggtgatacactcgcctctgcctcccaaagtgtggcattacaggtgtgagccaccttgcccggccatacgagcatctttagtgattattagattatctcaagattttaaaatcatagctcccttttgtagcgtctatctagcccacctgatctttttctggaaaattctccctgtctttggctgaagtgtaatgttgcagccacatttattttatatgacccacctccctctgtgatttcaaacacaaaaataagatgatcctagctggcctaatctgattctctctgtttaaaaaaaaatggctttaagaaccagatacaacatagtctctttgttaggaacataagcagaaagtggtgtcatatttggctaaacacttgcaaagaaatacagaacatcaatctattgagagacaagaaaaaataaggtaccaaaagaatgaccttgtcatagattttcctgttttagattttccagtccctcccaagtctttttcccttaggttgctggagacaaatttgtgctctttaataaatttccctctaattaagagatctaagtgaggtttttgttgtcaaaagcatgtttagatattcctgcattgttggtaagttagacctttcttcctattgggtttttattgtggcttttcatattagtatgacaacatttgggatcaaggaggttgtaaaatattagtagtctataagggacatgcactagcttttgtcagaatatacaattttgagaaaaactgaaggatctttccaatggtacagtctttgaagtgtttaatagaaattcttagaacattttattatataagagttttgaatatcgtaagtgtcataataacattactgtaaaaaaaaaaccttgacaatgaaaaatgtgtgtctaaaagagacataatccttatctttagggtcatcataatcttgttatgttctttctttctgtcatataatatatcccttgcttatgggtagctaagttgttttgccacttaatgaaatgacattttaggtcattctgagttatttcacattactatttaaagggcataggaaatagctaccttatgaacatgttgtctttgtttatccatcttatataatgaacttgaatcccagaagaagagggaatttctacagtaggaggagaacctatctgtcagaatgtttaaattaattgtgatttattaatggatccatttaacaaatatttattgagcacgtaccatgtgccagggattattttagatattggggatgcagcagtgaacaaaatgaagttctaacatgtgaggttgaaacagaaaggaaacaactaaataagtacatctatactacgtcagataataaatacgagagagacaaggcagggctgggtacagcagctcatgcctataaccccagcactttgggaggctgaggcaggaggattgcttgagctcggaaatttgagaccagcccgggcaacatagcaagacctcatctttacaaataattaaaacattagccaggcatggtgatgcgcaactgtggtcccagctacagttgctgaggtggggggattgcttgagcctgggtagtcaaggctgcaatgagcagtgattgtgccactgcactccctcctggacaacagagcaagaccccatctcaaaaaaaaaaaaaggaaaaatgaaaagaaaaaaaagaaaaagcaaagtaagagatataggaagtgccttcatatgtatttttccacagtttaaaattttcataaaatcataactctctgactttatgtagaaaggataccacactggaattaacgtgtagctttttcttgatgtaatccaaccaatgggagcacaattctggtacataggctgtctagaatttgaaagaaattaaagaattcattttgttttgctgataaatttttaagaaatcacgtggctttatgttattattattacaagatgactgatcactattatgtcttctttcacttctcaatttccctcagaacactacacccagactacaggctctggagggtggggaccatgtctgggttgtttactgatgtatttcataatttggcacatagagaccaataatactcctttaaatgaagaaattaataattaccattgcgtgatattgtgattacatcatttcctcccaatttccaaactcctaatagaatagagaatagatcaattgtagcaattcgtttcgaagcaaagacaacgcatggtggcgctgcaggctaaggcttcaaaaaaaggaaaaggaaaaagcccatgaaatgctactagctacttcagacctctttcagcctaagaggaaagcctgttagcagagcacggaccagtgtctccggagaatgctattctcctacatttccgaacaggttatcaacgcacagatcgatcactgcctctgtcccatcgctccctgaagtagctctgactccggttccttgaaaggggcgtgtacagaagtaaagatggagcctgcaggggagcgctttcccgaacaaaggcaagtcctgattctccttcttttactggaagtgactctggcaggctgggaaccccgtcgctattctgtgatggaggaaacagagagaggttcttttgtagccaacctggccaatgacctagggctgggagtgggggagctagccgagcggggagcccgggtagtttctgaggataacgaacaaggcttgcagcttgatctgcagaccgggcagttgatattaaatgagaagctggaccgggagaagctgtgtggccctactgagccctgtataatgcatttccaagtgttactgaaaaaacctttggaagtatttcgagctgaactactagtgacagacataaacgatcattctcctgagtttcctgaaagagaaatgaccctgaaaatcccagaaactagctcccttgggactgtgtttcctctgaaaaaagctcgggacttggacgtgggcagcaataatgttcaaaactacaatatttctcccaattctcatttccatgtttccactcgcacccgaggggatggcaggaaatacccagagctggtgctggacacagaactggatcgcgaggagcaggccgagctcagattaaccttgacagcggtggacggtggctctccaccccgatctggcaccgtccagatcctcatcttggtcttggacgccaatgacaatgccccggagtttgtgcaggcgctctacgaggtgcaggtcccagagaacagcccagtaggctccctagttgtcaaggtctctgctagggatttagacactgggacaaatggagagatatcatactccctttattacagctctcaggagatagacaaaccttttgagctaagcagcctttcaggagaaattcgactaattaaaaaactagattttgagacaatgtcttcgtatgatctagatatagaggcatctgatggcgggggactttctggaaaatgctctgtct

SEQ ID NO: 10513 - DNA, 6000 bp, Homo sapiens
ctctacttatattattttttaaaacaagactttccttatctatctgactcaaattctaagaaaataattttataactttttttcaaactctaaagcagcatagtgaacacgtatttgttgacatcaccattattataattattgggttgttaacaataactaagcaccgatgctgtgtgcctactacagtgtcttttgcatactgtgtgcctgatagtatttaagagtgaaaatggccgggtgcggtggctcatgcctgtaatcccaacactttgggaggccaaggcaggcatctcacgaagtcaggagttcgagaccagcctgaccaacatggtgaaaccccgtctctactaaaaatacaaaaattagccaggtggggtggcatgggcctgtaatcgcagctactcgggaggctgaggcaggagaatcgcttgaacccatgaggcagaggttgcagtgagccaagatcgtgccactgcactccagtctgggtgacagagcgagactctgtctcaaaaaataataatgataattaataaataaagagtgaacatgaattttaaaacatgctcggtagtgtctgcttacaggacatatctctaaaaatagatgactgactggtgaatgggagaacaaatgttaatgaggttcaaataaaaatttaaatattttagcattttaacccagacaataaggctttcatcatataggaactctttattgaaatatttcaagaaaaaagggattatcatttagaagactgattagtcttatttattatgactgaaatgtgcaaacagaatcattgtttcatgaacagaaaacagcagagtttttgactgtcaatgatgttcgaatagaaaatggatcactaaggagataggagattctgttatcgacagtcttcaaaagtaagttgatggccctggaatgaatggagtacaggggattctctaatttgatgacttgttgaactacattatagtcaagatttttctccagtcatgagttggaagattctacaatctggtggtattatagaatggattggccacttgtgcatctgaatttgttatgaatgtgtaagaaaaaagcaattgagaagataccttgaaaataaatgagaacctcctttgtaacctgactttgtcagtcttcttaaagataacattgagttgatgtgtttttaaataagctgctaagagtaatatgtgtttttctgaaccaatattgtggtatttacatttaaggaattgttatagatttatttatttcaagtttccaaaggtatatacctaaacaagagatctaatcatacacatcttcaaagctcattttcttgtatctttgtgatataatttgataaaataacaattttaaacaacttgaatcttggatattagtctcatgagttagatgggctgttatacatatgattatttcataaactctgaaagtgtgaatgttattttactatactaccaatttgggatgttaaactacatcttgagcatttgttgttatagggaaagctcactaactacttttcatggagatcaggctggtttattttattctcttattacctgtgaccatttcatttaaacaaataaaatatttctctgatggaaaaactaccaacttctactctcacaaaagtcattcactcatgtggactgaccaactgttaaacatcctggcagtcatggaatttgctaagttatggctaaatgaggttctttaatccacctgcaatacagatcattaataataagataggctatctgaggttttgagagttcagtatagaattttgaagcatcaggaaaaaaaactaccaaattattgtcttattcttattttatggtctgtgaaagcctcttttttttttttttttttttttttttttttgtcagagtcttgctctgtctcccaggctggaatgcagtggtgtgatctctgctcactgcaacttcctcctcctgggttcaagcgattctcctgcctcagcctcccaagtagctgggattacaggtgcatgccaccatgcctagctaattttcatacttttagtagagatggggttttaccatgatggccaggctggtctcaaactcctgaccttaagtgatccacccgcctcagcctctcaaagggctgggattacaggcatgagccactgagcccggcctgaaaggcattcatttctgatcaggcttctgttgaggtggcaattgtcaaaggggaaggagtaaaatctcagaggagaaacattggaagatacctatatctttgcttgagaatgaaaatctaaatggaacttcaaagaactgttttgttgtttgttttttagaaaaaaaagtcccaaaaaagaaaagagagaagataatcaattcgatgcccaggaagccaaatagactttacatagaattctttttaatgcaaccaaacaaatggtcaggattcttcccaatatctcagtcaacaataatatacactctttaaactatgaaatgatttcaatttgatacaatgagcttatgttagattttattaaacatatcttggcggtctagtaaagatctttaatatttaattttatgatgttcgataacttagaaaatgtgaatgctagagacaatgaagccatttactccatagggtatgtatgctttgtgttcggagtagtctataatttaatttaactagctcttatttccttttctccaaagaaggtaccaagacactataaattaattgagacttttttaaaacagtagaataagaaacaaatgtgagatgaaactatgaattttgaggcatcaggtaaaaatggatcaagacattgagagctataacctccaaacatgaaagtttgtttgaaaatatctacaagtgcttacattgtttaataatcatacactttgcttgcctcaacaagaagttcaaaagtactattaaacaaatagaatttaactccagtttacagaattcatctataatacctctattagttcctttaaacaaaatttatctactttgtgaatgcaaagataactatggattattttgatagatcaaaacagaatgtccttcaaagtgttccctgtattctggagcaatgccaccagaaagcagaaataggttacttaggagcctcccacaaaacgaagttaagctttcttagtgttagttctggattctcctcctggttccaccaactactctccaggacctagaagaatttacaaaccaagactgtttcttgccaggtctttattccagagcaggtcattctcttttattctgcaactatgtgaaaggagctttcttttctttctgctagcagagggtagcctcggatccatcaataatttagttttactctatcaacatcagtggagagacgagtacctctaaggatcctgtcaggacagtcctgcattttgctcaaatgctgtctagagatccctgttttctcaattacactagaatagagtaggatgaagatttgaattgcatactaggatgaagacttgaattgaattgcataatgaaaagaatcagccaatccattatccagtttcttatgaattcacagcccagtaggatctctgcagatttctgccttctgtagaaaatgggttgcttctatagctgattgctgcagccaagacaaacaacgatttctttctttttttctcacaagactgggagtgagaatatttggattccgacattgttctactactatataatcaataatcaggaacaaggcaaggcaattccctctttctttctttctttctttcttcttcttttttttttttttttttttttggcagagttttgctcttgttgtccaggctggagtgcaatggtgtgatctcggctcaccacaacctccacctcccgggttcaagcgattttcctgcctcagcctcctgagtagctgggattacaggcgcgcgccaccacgcccggataattttgtatttttagtagagacggggtttctccatgttggtcaggctggtctcaagctcccgacctcaggtgatccgcccgcctcggcctcacaaagtgtgggattacaggcgtgagcaacagcacctggccccccctctcattttttaaacggttaaaatgaaggtgttagaccgtctctaaggttctatacaatcaaaaatttattaaaataggtctatatattttacaacaattttgactttctgaatcttgcatcatggtgtctagaacatatgtgttcaattaatactgaattaattaaaatttatatacactgatgtaaatattttctaagtaaaatctttcatatgtatttaaataaaatttacctttttgccttcaataactgattttcccatgtgcaataacgtgtgagtcagtgcccaaaagagtcacttgaaagttgcaaggcaaagcagttttttaaaaattatctaagattatcaaacaccggtccatgaacactgttgcattaattcagtgtcttaaaatggatttttaattatcagggatatctagagcaaagaaatctaacagggaaattttgaaagatgaaacaattttctatgaaatcagtgtattgtgtgcatcaatgtggtgcagtaacttagtaaggactcacagcgccgctgttcaccaaccagggaaaaatggtgcgagagatcccacagaaaccaccgagttttacagcacagagaaacgacagattgcgataagccctcttccaggctgcactaaactcaagcctctatcctgctggattctgagctccccttcctaagacagaggggtccacccggatacacccgcattctgaagcacttcccgagatcggcgcctaagcaagagaagcaggacgactatggcggctcagccgaggggcggggactacagaggattcttcctgctctccatcctcctggggaccccctgggaagcctgggcaggacgtattctctactccgtgtcggaggagacggacaaagggtcctttgtgggagacatcgccaaggacctggggctggagccccgggagctggcggagcgcggagtccgcatcatctccagaggtaggacgcagcttttcgccctgaaccagcgcagcggcagcttggtcactgcgggcaggatagaccgggaagagatctgcgctcagagtgcgcggtgtctggtaaactttaacatcctgatggaagataaaatgaatctttaccctatagacgtggaaataatagatattaatgacaacgttccaagattcttgacggaagaaataaatgtaaaaataatggagaatacagctcctggggttcggtttccgttaagcgaggctggggatccagatgtgggcacgaactccctccagagttaccagctcagccccaatcgccacttctccctggctgtgcaaagtggagacgatgaaactaagtacccggaactggtgctggagcgggtgctggaccgggaggaagagcgggttcaccacctggtcctcacagcctctgatggcggcgacccgccccgatccagcaccgcccacatccaggtgacagtggtggatgtgaatgaccacacgcctgtcttctctctgcctcagtaccaagtaactgtccccgagaatgtgccagtgggtacaagactgctcacggtacatgctatcgacctggacgagggagtcaatggggaagtgacatattcttttcggaaaataactcctaaacttccaaagatgtttcatctgaactcgcttacaggagaaatatcaactttagaaggattagattatgaagaaactgccttctatgaaatggaggttcaggctcaagatggtcctggtagtctgacaaaggcaaaagtactgatcacagttttagatgtaaatgataatgctccagaagtgactatgacgtctttaagtagctcaatccctgaagacacacctcttgggacagtcattgctcttttcta

SEQ ID NO: 10514 - DNA, 6000 bp, Homo sapiens
agaagcaggacgactatggcggctcagccgaggggcggggactacagaggattcttcctgctctccatcctcctggggaccccctgggaagcctgggcaggacgtattctctactccgtgtcggaggagacggacaaagggtcctttgtgggagacatcgccaaggacctggggctggagccccgggagctggcggagcgcggagtccgcatcatctccagaggtaggacgcagcttttcgccctgaaccagcgcagcggcagcttggtcactgcgggcaggatagaccgggaagagatctgcgctcagagtgcgcggtgtctggtaaactttaacatcctgatggaagataaaatgaatctttaccctatagacgtggaaataatagatattaatgacaacgttccaagattcttgacggaagaaataaatgtaaaaataatggagaatacagctcctggggttcggtttccgttaagcgaggctggggatccagatgtgggcacgaactccctccagagttaccagctcagccccaatcgccacttctccctggctgtgcaaagtggagacgatgaaactaagtacccggaactggtgctggagcgggtgctggaccgggaggaagagcgggttcaccacctggtcctcacagcctctgatggcggcgacccgccccgatccagcaccgcccacatccaggtgacagtggtggatgtgaatgaccacacgcctgtcttctctctgcctcagtaccaagtaactgtccccgagaatgtgccagtgggtacaagactgctcacggtacatgctatcgacctggacgagggagtcaatggggaagtgacatattcttttcggaaaataactcctaaacttccaaagatgtttcatctgaactcgcttacaggagaaatatcaactttagaaggattagattatgaagaaactgccttctatgaaatggaggttcaggctcaagatggtcctggtagtctgacaaaggcaaaagtactgatcacagttttagatgtaaatgataatgctccagaagtgactatgacgtctttaagtagctcaatccctgaagacacacctcttgggacagtcattgctcttttctacctacaagacagagattctggaaagaatggtgaggtgacctgcaccattccagaaaacctaccttttaaattagaaaaatcaatagataattattatagattggtcacaaccaaaaacttggaccgggaaacactctctttgtataacatcacactgaaagccacagatggtggaactcctcccttgtccagggaaactcacatattcatgcaggtggcagacaccaacgataacccacccaccttcccccactcatcctactcagtctacatcgctgagaacaaccccagaggggcctccattttcttagtgactgcacaggaccacgacagtgaggataatgcccagatcacttattccttggccgaagacaccatccagggggctccagtgtcctcctatgtctccataaactctgacactggagtcctgtacgcgctgcaatcctttgattatgagcagttgagagaactacaactaagagtgactgcacatgacagcggggacccgcctctcagcagcaacatgtcactgagcctgttcgtgctggaccagaatgacaacccgcccgagatcctgtacccggccctccccacagatggttctactggcatggagctggcaccccgctccgcagagcccggctacctggtgaccaaggtggtggcggtggacaaagattcaggccagaacgcctggctgtcatacctcctgcttaaggccagcgagccaggactctttgcggttgggctgtacacgggcgaggtgcgcacggctcgggccctgctggacagagatgccctcaagcagagcctcgtggtggccgtccaggaccacggtcagcctcctctgtcagccaccgtcacactcaccgtggctgtggctgacagcatccccgaagtcttggccgacctgggcagccttgagccctccgacggtccttacaactatgacctcacgttgtacctggtggtggcggtggccacagtctcctgcgtcttcctagccttcgtcctcgtactgctggcgctcaggctgcggcgctggcacaagtcacgcctgctgcaggcttcagaaggtggcttggcgaacgtgcccacctcgcactttgtgggcatggacggggtgcaggctttcctgcagacctattcccatgaggtctccctcaccgcggactctcggaagagtcacctgatcttcccccagcccaactatgtagacatgctcatcagccaggagagctgtgagaaaaatgattctttgctaacatccgtagattttcaggaatgtaaagaaaacctgccaagtattcaggtgagcccagcccttcctttatttccatgaggaatttatttgcatgatatttctctattattttgcaaaacaaatgttttgaaaatagggatttaaaaaactttatagaggtaaaaatgagtttaccagtttccttcagtggtgacactttaatatagaacacataggatatagtatttctttagtgaaagcctatggacaagattatgaatatgtggactatcacattttataatttccacctactttccaatctatgttccaacctactttcttaactcatatattttatacattggaatgaatcgagtctttcatattgcacaaggttagcaggaataaaacacacctcagctgtcttctcaggattctctttagcattcaaatatgtaaaaggttctgaaagatttcttccatgtgaagatttttttctgtggctgattctgcctccatgtacctcagcttggtggtcctaaaaaatcttgattgcttcttgacctatttacagtataatcatttattaatggggtggtagtagaaggttggatttatgcctaaagaatgaaatgtgtgtgtatcacacttcactaagatctatatcaaagacagacatcaagtctaatgccacactaaaggccatcggacaaaaccaataaaatatgtcaaataaaatgtcattttaagtgttgtaattggcatttgtgacataggcaattacatgttttaacagagaattccagtatgttgttttagtggtacagccagatgaagtgtgtctgtgggctatcaaagtgggagattggggatactggctttgtttcaactgtctcacgtactcaaaccttagaccatcttatgtacacagatcctagaccagtagttgattttatttattaggtctactgaaaaattcagttggaaataacccaatctgggattaactacttccatattcttttgtataacattttagtaaagctcagtatatcaagtgattgtcatccagaaggggtggatgacaaggtaatcttgattccagagacctttgagtattaattaaaaacacacttttagccaggtatggtgttgcaagctgtagcccacctgcatgggaggctgaggcaagaggacagcttgaacccaagaattggaggcccacctagataatataacaagactctgtctcttcaaaaaaagactctttttagactagtgttgtatttggtagtattttgcacatgatagactctgtacaatagtgtgggggatacattttttttttttgacatggagtctcgctctgtcacccaggctggatacattttacaagttctgcagtgttcacatttcagatgtacaatcacttggggtagaagacaatgttgctgacaccaacaatgttactgagggaagatcctatggcagaactacggttataaggtattttgtaaaagaaaatctcctgaccaaaatttattagatgcataaaattgtttttaagcaatggagagacataatcactaaactcagtgagctattgcaatcaaactttccagggattgtttccttcaattcagaggtcaccaaggaatgtaaaataagtgcagaggtaggaagcagtgcttcagtgcagcagatctcagtgactttgtgttttgaggctatgtattatccccctgataactttgaagatgaatgttgtatttcataaccagtaaaataattgtgtaatgaggagaggagtaggctactgcctgtgatcatcgaaatgagaatcacataatattcctgtaatgaaatcactgaaactattgggaagggggtgtatttgaagataagtataaattgcaccttctaaaaggcaattttggtattactgatactctccggaaaaagttgaaataaatcaacttggaggtacttagaaaagtggagaaaatgttaggaacaatgaaagaaagataaaatgtatccagtatatttctaatgagtaagtatggaaaattactgtactctgagacggtttaggccaagtctgtgttatggctatctttatatagatagtgcatgtttgaagattggggaaagcttatgtcaataaatgtttatgtacttaatctacatgatttgcctaaaaatcctcaaagttgggatgaaggcattcctaagagtacatttttagacgtcattaaatatacagacgtatccacgtagtttttgttctttcagttaggcacacaattataattattgcactggttaacttgaagcagcagaggctgtagtttcctagtgctgactctgggcgccgctgttggccaaagtggagagcttggcgctccagatctcctcgcgcagccgcagcgcgctttccagggcagccccagctcagactccccagcgccagcctttacaccgcttcctcctcggaaaaagaagaattttttcttgaactggaactgcaactaaagtccgttcggagatccaaaaatctgcaatacagaggttatttgtaacccggcgtctccaggctggtgagcaagctgaggagagcaagagggatggggagcggcgccggggagctgggccgggctgagaggctgccagtgctctttctcttcctgctgtctttgttctgcccggcgctctgtgagcagatccgctacaggattcccgaggaaatgcccaagggctccgtagtggggaacctcgccacggacctggggttcagcgtccaggagttaccgactcgaaaactgcgcgtcagttcggagaagccttacttcaccgtgagcgcagagagcggggagttgcttgtgagcagcaggctagacagggaggagatatgcgggaagaagccagcttgtgctctggaatttgaggctgttgctgaaaatccactgaacttttatcacgtgaatgtggagatcgaggacattaatgaccacacgccaaaattcacgcaaaattcctttgagctgcaaataagtgagtctgcacagcctggcacacgatttatattaggatctgcccatgatgcggatattggtagcaacacactgcagaattaccaactcagtcccagtgatcatttctcactgataaataaagagaaatcagatggcagtaaataccctgagatggtattgaagacacctttggacagagaaaagcagaaatcctaccacttgactttgactgccttggactttggagctccacccctaagcagcactgcacagatacacgttctagtgactgatgccaatgataatgctccagtgttcagtcaagacgtatacagggtgagcctttcagaaaacgtgtacccggggaccacggtgctacaggtgactgccacggaccaggatgagggtgtcaatgccgagattactttctctttcagtgaagctagccagatcacccaatttgacctgaactctaacaccggggaaattactgttttaaatacattagattttgaagaagtcaaagaatattccatagttttggaagcaagggacggtggaggaatgattgcgcaatgcacagtggaggtag

SEQ ID NO: 10515 - DNA, 6000 bp, Homo sapiens
tattaacaccctggttgaggataaaggaaaactctttggggtagaaatagaaataattgatattaacgataataacccaaaattccaggtcgaagatctagaagtaaaaattaacgaaatcgcggttcctggagcacgttatccactcccagaagctgttgacccggatgtgggcgtgaactccctccagagctaccagctcagccccaatcaccacttctccctggacgtgcagactggagacaatggagccataaacccagagctggtgctggagcgcgccctggacagggaggaagaggctgctcaccacctggtcctcacggcctcggatggcggcaagccgcctcgctctagcacagtgcgcatccacgtgacagtgttggatacaaatgacaatgccccggtttttcctcacccgatttaccgagtgaaagtccttgagaacatgcccccaggcacgcggctgcttactgtaacagccagcgacccggatgagggaatcaacggaaaagtggcatacaaattccggaaaattaatgaaaaacaaactccgttattccagcttaatgaaaatactggggaaatatcaatagcaaaaagtctagattatgaagaatgttcattttatgaaatggaaatacaagccgaagatgtgggggcacttctggggaggaccaaattgctcatttcggtggaagatgtaaatgacaatagaccagaagtgatcattacgtctttgtttagcccagtgttagaaaattctcttcccgggacagtaattgccttcttgagtgtgcatgaccaagactctggaaagaatggtcaagttgtctgttacacacgtgataatttaccttttaaattagaaaagtcaataggtaattattatagattagtgacaaggaaatatttggaccgagaaaatgtctctatctacaatatcacagtgatggcctcagatctaggaacaccacctctgtccactgaaactcaaatcgctctgcacgtggcagacattaacgacaaccctcctactttccctcatgcctcctactcagcgtatatcctagagaacaacctgagaggagcctccatcttttccttgactgcacacgaccccgacagccaggagaatgcccaggtcacttactctgtgaccgaggacacgctgcagggggcgcccctgtcctcgtatatctccatcaactctgacaccggtgtcctgtatgcgctgcaatctttcgactatgagcagatccgagacctgcagctactggtaacagccagcgacagcggggacccgcccctcagcagcaacatgtcactgagcctgttcgtgctggaccagaatgacaacgcgcccgagatcctgtaccccgccctccccacagacggttccactggcgtggagctggcgccccgctccgcagagcgtggctacctggtgaccaaggtggtggcggtggacagagactcgggccagaacgcctggctgtcctaccgcctgctcaaggccagcgagccgggactcttctcggtgggtctgcacacgggcgaggtgcgcacggcgcgagccctgctggacagagatgcgctcaagcagagcctcgtggtggccgtccaggaccatggccagccccctctctccgccactgtcacgctcaccgtagccgtggctgacagcatccccgaagtcctgaccgagttgggcagtctgaagccttcggtcgacccgaacgattcgagccttacactctatctcgtggtggcagtggctgccatctcctgtgtcttcctcgcctttgtcgctgtgcttctggggctcaggctgaggcgctggcacaagtcacgcctgctccaggattccggtggcagattggtaggcgtgcctgcctcacattttgtgggtgttgaggaggtacaggctttcctgcagacctattcccaggaagtctccctcaccgccgactcgcggaagagtcacctgatctttccccagcccaactacgcagacatgctcatcagtcaggagggctgtgagaaaaatgattctttgttaacatccgtagattttcatgaatataagaatgaagctgatcatggtcaggtgagtttagttctttgcttgcttttaatttccagatgaattttatttggcataaattatgttttgaaaaacattgtgaagatagttgaaaataatttttaaggtgtatcacagagttttgggtttattttggtggtgttactataaaattgaactctaatagtcataggttattgtttcatttgcttttaaacgacttggaaaagattgttcaaccattttaagccttccagtattttattcctattatcactcattcacttaagaagtagctacccgtccatactggtaattttgctattgtttgtgtgtgtgtgtgtgtgtgtgtgtgtgtgtgtgtgtgtgtgtgtgtgtatcccaaactagaacttcagaaaattatcaagaagtctaaagccttgttattagcttagcaaaagtaaaatatatctcagaatttttagggttatgtttagcatttgaacctgtaactaggctcttgtagatttcttcactttaaacctcttttctgagccctgtttctgtaccagtgcccttcaaaactttaatacttcttaccatccttcaaaacatgaacaaactttaaagatggatcttggtgggagatgagactggttactaaatattaagtatgtgagtcagtggtcacctgggctccatgcccatggagacatgaaatctaaagcctagaatgtccattgctcccccaaacaaaaaacaaaagcaaaaacattagatctgaattaaaatgtaattttaaactgttgaaagtgacttttgtaaaatatgtaagaacatatttcaatacaattccaattagctgtttcggttgtgcattgatgtgaagtggtgagaatgttgatattaagaaccaatgtttcaggtacacaagttctaaataagctgatcaattcaattaaagttattcagtcttggctggacacagtgcctcatgtctgaaatcccagcactttgggaggctggggcaggaggaccgcttgagccccgggggtttgaaactgcagtgagctatgatcatgccactgcactccagcctaggtggcagaactagaccctgtctctaaaaaaactattattaggccgggtgcggtggctcacgcctgtaatcccagcactttgggagactgaggtgggtggatcacctgaggtcaggagttcaagatcagcctggcaaacatggtgaaaccccgtctctactaaaaactacaaaaattagccaggcatggtggcatgcgcctgtggtcccagctactcgggaggctgaggcagaagaatcacttgaacccgggaggtggaggttgcagtgagcctcgatcctgtcactgcactccagcctgggcaacagggtgagactccgtctcaaaaaaaaaaaaaactaatattaatagtaaaaactcggtataggctatccattattgtattcctgcataccttcttgtagcatttgaataaagctaatacctgaattgattgttgtaaggtagaagtagatgacccaataaatgtttgttattaatgaaaaggacatttcctaaggattgtgtagtgttctactgtatggtgcatattcagtggagtgggagttaacttcatagtttgtgtaccatttggatgcacatttgagaggacaacatattattggcactttgcaattttaaaaactcggatgaaagttgccctggtaggaaagaaaatccttactctccctaaaaatgttggctagttgtttttattaatctgacaaatggactaaagaaggttgaccaatgtccacaaatttatgtaaatgaacttatgagcttcatttatccaattccaaagtcatttcagataggataataatgcaatccactagaatatccctttgtaccttgtattgcagaatagataagcatttccccaataactcttaagaatgaatttatgtactgtaaaagatatgacataagagaagtattttgagatatgaagaagagcaacgtagtagggtatatcatttcttagctacatcatatgggcagtatacttgaatgaatatttcctgaagtagaagagtaaagaaaaattatttttataaagaatgttaatatagtcaggaagaggagatgtttggggattggtataaaattgccacaactttacaaaatagttttaaatagtatagatttccctaatatgtgtaatataaaacactagaaatattggggagttggaaatcatagaaatgaacagaagaatgataaaattgtttccatagctaataaaaaatgaatttttgaaatcagtatagtatgaaggctctgagagcaagaactgtatcatattaattattatattgccagtgacaagggcaatacttagttctagctaagagttcaaggtatgtttgcagaatggtgaaagaatggaccaatgtatgcaggtttgtataaaaacccaacgtgatatttctaacaatttggaaaacagagaaagataccttaaagaagttgttataattttttattaagtatatggacgtaaaaacttggcttgttaagttaggcacacaaaaacaattactgcactggttaacttgaagccgcagaggctgtagtttcctagtgctgactctgggcgccgctgttggccaaagtgcagagcttggcgctccagatctcctcgcgcagccgcagcgcgctttccagggcagccccagctcagactccccagcgccggcctttacaccgcttcctcctcggaaaaagaatcgtttcctaaactggaactggaactaaagcccgttcggagatccaaaaatctacaatacagaggttatttgtaacctggcgtctccaggctggtgagcaagctgaggagagcaagagggatggggagcggcgccggggagctgggccgggctgagaggctgccagtgctctttctcttcctgctgtctttgttctgcccggcgctctgtgagcagatccgctacaggattcccgaggaaatgcccaagggctccgtagtggggaacctcgccacggacctggggttcagcgtccaggagttaccgactcgaaaactgcgcgtcagttcggagaagccttacttcaccgtgagcgcagagagcggggagttgcttgtgagcagcaggctagacagggaggagatatgcgggaagaagccagcttgtgctctggaatttgaggctgttgctgaaaatccactgaacttttatcacgtgaatgtggagatcgaggacattaatgaccacacgccaaaattcacgcaaaattcctttgagctgcaaataagtgagtctgcacagcctggcacaagatttatactagaagtagcagaagatgcagatattggcttaaactctctgcagaagtataaactctctcttaacccaagtttctcattaataattaaggagaaacaggatggtagtaaatacccggaactggcactggagaaaaccttagaccgggaacaacagagttaccatcgtttagtcctgactgccttggacggtggacatccacccctaagcggcaccactgagctccggatccaggtaaccgacgccaatgataatcccccggtattcaaccgagacgtgtacagagtcagccttcgggaaaacgtgccaccaggcaccactgtgttgcaagtgtcagccactgaccaagacgagggcatcaactcagaaattacttattccttctacagaaccgggcaaatctttagtctgaattcaaagagcggagaaattaccactcaaaagaaactggattttgaagagaccaaggaatattcaatggttgtagaagggagggatggtggtggactggttgcacaatgtacagttgaaattaatattc

SEQ ID NO: 10516 - DNA, 6000 bp, Homo sapiens
ccagctcagactccccagcgccggcctttacaccgcttcctcctcggaaaaagaatcgtttcctaaactggaactggaactaaagcccgttcggagatccaaaaatctacaatacagaggttatttgtaacctggcgtctccaggctggtgagcaagctgaggagagcaagagggatggggagcggcgccggggagctgggccgggctgagaggctgccagtgctctttctcttcctgctgtctttgttctgcccggcgctctgtgagcagatccgctacaggattcccgaggaaatgcccaagggctccgtagtggggaacctcgccacggacctggggttcagcgtccaggagttaccgactcgaaaactgcgcgtcagttcggagaagccttacttcaccgtgagcgcagagagcggggagttgcttgtgagcagcaggctagacagggaggagatatgcgggaagaagccagcttgtgctctggaatttgaggctgttgctgaaaatccactgaacttttatcacgtgaatgtggagatcgaggacattaatgaccacacgccaaaattcacgcaaaattcctttgagctgcaaataagtgagtctgcacagcctggcacaagatttatactagaagtagcagaagatgcagatattggcttaaactctctgcagaagtataaactctctcttaacccaagtttctcattaataattaaggagaaacaggatggtagtaaatacccggaactggcactggagaaaaccttagaccgggaacaacagagttaccatcgtttagtcctgactgccttggacggtggacatccacccctaagcggcaccactgagctccggatccaggtaaccgacgccaatgataatcccccggtattcaaccgagacgtgtacagagtcagccttcgggaaaacgtgccaccaggcaccactgtgttgcaagtgtcagccactgaccaagacgagggcatcaactcagaaattacttattccttctacagaaccgggcaaatctttagtctgaattcaaagagcggagaaattaccactcaaaagaaactggattttgaagagaccaaggaatattcaatggttgtagaagggagggatggtggtggactggttgcacaatgtacagttgaaattaatattcaagatgaaaatgacaatagcccagaagttacattccattctctacttgaaatgattctggaaaacgcggtgcctggaacactaattgctttgatcaaaatacatgaccaagattctggggaaaatggggaggttaattgtcaattacaaggcgaagtcccttttaagattatctcttcatccaaaaattcgtataagttggtaacagatggaaccctagaccgagagcaaaccccggagtacaatgtcaccatcacagccacagacaggggcaagccgcccctctcctccagcataagcgtcatcctacatatcagagacgtcaacgataacgctccggttttccaccaggcgtcctacttagtcagtgtacccgaaaacaaccctcctggggcctccatcgcgcaagtctgcgcctcggacctggacttggggttgaacggccaagtctcctactctatcatggccagcgacctagagcctctggcactggcctcttacgtgtccatgagcgcgcaaagtggggtggtgttcgcgcagcgcgcctttgactacgagcagctgcgcaccttcgaactcacactacaggcccgcgaccagggctcgcctgcgctcagcgcaaacgtgagcctgcgcgtgttggtgggcgaccgaaacgacaacgcaccgcgggtgctgtaccccgcgctgggtcccgacggctctgcgctcttcgatatggtgccgcgcgctgcagagcccggctacctggtgaccaaggtagtggccgtggacgcagactcaggacacaacgcctggctgtcctaccacgtgctgcaggctagcgagcccgggctcttcagcctggggctgcgcacaggagaggtgcgcacagcgcgtgccttgggcgacagggacgcggcccgccagcgcctgctggttgctgtgcgtgatggtggacagccgccactctccgccaccgccacgctgcacttggtctttgctgacagcttgcaggaggtgctgccggatatcactgaccgccctgtaccctctgacccccaggctgagctgcagttttacctagtggtggccttggccttgatctcagtgctcttcctcctggccgtgattctggccgttgccttgcgcctgcgacgctcctccagccctgccgcctggagctgcttccaacctggtctctgtgtcaagtctggacctgtggttccccccaactacagtcaggggactttgccttattcctacaacctatgtgttgcacatacaggaaagacggagtttaatttcctaaaatgtagtgagcaattgagttcaggacaagacatactttgtggtgattcatctggggccttatttccactttgtaattccagcgagtcgacttcccatcctgagttggtgagtttcatttatgtctattctttttcattacccacccaattttctgtatttacatgaaactatcgtacattttcaagtccaatgagttgtcttagggaagtcagagctgctcagaaagctgtcctaccattctttaagaggagcagtaaattgtgagtttttatgtcgcataaaagaagtagccttatagatttacaaagtagtgagagtttgctcttagcttcctctctagcaaaaacatttggtgcgtttttttgtcctctttctcaaagctaatgaattttacctattcgttgtctcattctttaacatgtttatattttattgtatgtagataaaccattaaatttaatgtatgtaatcatttaattcatcttttaaagcaaagaaactgctagtagatgtctttcttcactgatttcactggtagttttcatctctttcttatgttcctcatatatgctttcttattcctacctaatggatttatgattttttgaatctcctaaaattttattaaaaatactatatgttggctgggtgcagtggctcatgcctgtaatcccagcactttgggaggccgaggcggttggatcacatggtcaggagttcaagaccagcctgggcaatatggtgaaaacccgtctctactaaaaatacaaaaattagctgggtgtggtggcgggcgcctgtaatcccagctactcaggaggctaagacaggagaattgcttgaacctggcaggtggaggttgcggtgagccgagatcactccattgcattccagcctgggcaacaagagcaaaactccatctcaaaaaaaaggaaggagaaggagaggaagaagaagaaaaatactacatgttatgtgtatgagagagaaagagagagactgattcactgaacttagaaggtccaaatcatccaaataattttctaagtttatccaggttttcttggatgcaaaatccttttccacctctatataattaccagaagaaacttacaaaaaaaaggaaatgctattgcctgaatttctcttgctcggaatcctgacatattcttgaagaaggggaaaaagacaccggatttgtcttatcgtttggagctttaaatataaatgactggatgttttctcaacatccttgtaggatggaaggtgaatacaggattattccatttttaagacaaaaactactagtcttgtgtacatacaaagctcccattacatggtataagtcttttgcttggtttcccttagtatgtgattcagtaaatgggttccttacaaagtgctgagatttcttataataccacttacttttaacctttcagtagttttctttgttgtatattttgtgttctttttcccaaattattatataagtttaagtgatgcttagaataatgtttaagaccactttaaaattgcataatttattgatgaaggattaaaatagaaacttgcttttcagtgtatatgcatttgaatcattgaaacacagtctgtgcatgcattacatattcacattaaaaaactaagcatttttgaaatagcagaaaagtttaagcaattacaaaaatgtgaaaatttccaactttaatcctgttaatatttagcaatattaggcgagaacatctgtaactattgctgaattaatattacttttataatacaaaaatttaaaataaacgtttttccaggaattttatcatcaaaataaaccccagaaaataatttcaaagtggataatctatccttatatatgtattaatacaattatatattttacatttacaaatatataggtataaaaattaaaaatgaatgtacttccaaacaagattgcacataaaaattacttcagaaaattgttaagatacacagaaaaaattgaagcatcataaaaaggaaattataatagtttacatatctagaaatagagtgcaaagttctaccaagaataagaataaattaatattaagcaatggtttgtgattttataatacacttacagaaattttattccactttatttacaactcagatatctaaaaaatagattgcttttgaaatacaaatgcaagaaacaattggagaaatctaaaatcataattagaagagagtagtgttttctttatcagccatctgatataatgttacacatcagtgggtgtagtaacggcttaggactctgagcgccgctgttgatcaactctaagcgaaaatcaggactccatccggatttccagttctgcggctacacaaaacccggcagataccacaaacctgctcccaggctgcagcaaaactcagcctctttcttctaaggaaaagatcaccatactttgcagggtggaagaaagaacctgatgaagcagcgcgcacagagatccttttgagaaaattccaaagcgaggcagcaatggcagctccaaccaaatgccagctccgcggaagattagtcctgctatgctcgctcctggggatgctatgggaggccagggccagtcagattcgctactcagtgcctgaagagacagaaaagggctatattgtgggcaacatctccaaggacctggctctggagccccgggagctggcggagcgccgagtccgcatcgtctctagaggtaggacgcagcttttctctctgaacccgcgcagcggcaccttggtcaccgcgggtaggatagaccgggaggagctctgtgctcagagcccgcggtgtctggtgaactttaaagtcctggttgaagacagagtgaaactgtacggaatagaaatagaagtaactgatattaacgacagcgccccaaagttccaggccgaaagtctggaagtaaaaattaacgaaatcgcggttcctggagcacgttatccacttccagaagctattgatccggatgttggcgtgaactccctccagagctaccagctcagccccaatcaccacttctccctgaacgtgcagactggagacaatggagccataaacccagagctggtgctggagcgcgccctggacagggaggaggcaactgcccaccacctggtcctcacggcctcggatggcggcgagccgcgtcgctccagcacagtgcgcatccatgtgacagtgttggatacaaatgataatgccccggtttttgctcaacggatttaccgagttaaagtccttgagaacgtgcccccaggcacctggctgcttactgcaacagccagcgacctggatgagggaatcaacggaaaagtggcatacaaattctggaaaattaatgaaaaacaatctctgctattccagcttaatgaaaatactggggaaatatcaacagcaaaaagtctagattatgaagaatgttcattttatgaaatggaaatacaagctgaagatggtgggggattgaaagggtggacaaaagtgc

SEQ ID NO: 10517 - DNA, 6000 bp, Homo sapiens
tggtcaccgcgggtaggatagaccgggaggagctctgtgctcagagcccgcggtgtctggtgaactttaaagtcctggttgaagacagagtgaaactgtacggaatagaaatagaagtaactgatattaacgacagcgccccaaagttccaggccgaaagtctggaagtaaaaattaacgaaatcgcggttcctggagcacgttatccacttccagaagctattgatccggatgttggcgtgaactccctccagagctaccagctcagccccaatcaccacttctccctgaacgtgcagactggagacaatggagccataaacccagagctggtgctggagcgcgccctggacagggaggaggcaactgcccaccacctggtcctcacggcctcggatggcggcgagccgcgtcgctccagcacagtgcgcatccatgtgacagtgttggatacaaatgataatgccccggtttttgctcaacggatttaccgagttaaagtccttgagaacgtgcccccaggcacctggctgcttactgcaacagccagcgacctggatgagggaatcaacggaaaagtggcatacaaattctggaaaattaatgaaaaacaatctctgctattccagcttaatgaaaatactggggaaatatcaacagcaaaaagtctagattatgaagaatgttcattttatgaaatggaaatacaagctgaagatggtgggggattgaaagggtggacaaaagtgctcatttcggtggaagatgtaaatgacaatagacctgaagtgaccattacatctctgtttagcccagtgagagaagacgcacctcagggaacagtaattcttcttttcaatgctcatgaccgagactccgggaagaatggtcaagttgtctgttctatccaggagaatctatcttttacattagaaaattcagaagaagattattacagattgttgacggcccaaattcttgaccgagaaaaagcctcagaatataatatcacggtgactgcaacagacagaggaactccgcccctgtccacagaaattcacatcaccctgcaagtgactgacatcaatgataatccacctgctttctctcaagcctcctactcagtctacctcccggaaaacaacgccagaggtacttccatcttctccgtgattgcctatgaccctgatagcaatgagaattctagagttatttactccttggcagaggataccatccaagggtctcctctctccacctatgtctctattaactcagacactggtgtgctgtatgctctgtgctcctttgactatgagcagtttagagatttgcaaatgcaggtgacggcaagtgacagtggaagcccaccacttagcagcaatgtgtcattgagactgtttgttttggaccagaatgacaatgccccagaaatcctgtaccctgccctccccactgatggttctactggtgtggagctggcaccccgctctgcagagcctggctacctggtgaccaaggtggtggcagtggacagagactcaggccagaatgcttggctctcctaccgcctattcaaggccagtgagccagggctcttctcggtggggctgcacacaggtgaagtgcgcacagctcgggccctgctagatagagatgcgctcaaacagagccttgtggtggctgtacaggaccatggccagccccctctctcggccactgtcacgctcacagtagccatagctgacagcatcccagacatcctggctgacctgggcagtcttcagatccctgcagacctggaggcctcagaccttaccctctacctcgttgtggctgtggcagtcgtctcctgtgtcttcctcaccttcgttatcacgctgctggccctcaggctgaggcactggcactcctcgcatctgctgcgggctaccagtgatgggttggctggtgtgcccacctcacactttgtgggtgtagatggggttcgagctttcctacagacctattctcaggagttctccctcaccgctgactcaaggaagagtcacctgatcttcccccagcccaactatgcagacacactcatcagccagcagagctgtgagaaaaatgagcctttgtgcgtctctgttgattccaagtttcctatagaagacacccctttggttccggtgagttcattttttttctttctttcttttctttttttgttttttgttttgttttgtttttgagacagagtcttactctgttacccaggctggaatgcagtggtgtgatctcggctcattgcaacctccgcctcccaaattcaagcgattctcctgcctcagcctcccaagtagagtagctgggactagagtagagtagctgggactacaggcctcccaagtagaataactgggactacaggcacgtgccaccacgcccggctaattttttgtgtgtttttagtagagacggggtgtcaccatgttggccaggctggtcttgaattcctaacctcaagtgatccacccacctcagcctcccaaagcactgggattacaggcgtgagccactgcgcctggcccttaactttctattatagttagctttctctttaactgtctgtacttaaggtagtataagttgatatcagtgtgtttctcatcacttttcactgggcctaattgttgctccaacactgaaaggaggcatttattagttatatttgctgatataactttcatgttctcataataattaacctgctgtcaacgtaaaccatacttcatggggtagctctcagcctgcattgatgtgggctttttgggtagggttgcttcattggttgcagtggactcatatcataaaattcttactcctttttttttttttttaagagatgggggtgtcattctgttgtccagggtggaatgcagtggtgtgggtaaagcttactgcagtctcaatctcctgggcttatgcaatcctcccacctcagccttcacagtagctaggactgaggtgggagggctagcaagctatgttgcccagactggtctcaaacgatcttcctgcttcagtttcccaaagcactgggtgaggtgtgaaccacctcacccagcaaattcttactcctacgatcatttattcaggtcatactatgtttgtaagggtaaactgataaaaaggtaaatgtattcttcttagagaaacagctgaaagcccagatttattgcttctattcttccatttctatgacaggaaaacacctctttgaggttatatttttcagatcacaagtgtgtaaagtctgtttgtgtttacagatattttctgacgaagattcaaacttcagttatccacttccaaaccctagtaaaccaattttttccctttaatggtgaaagttgtcacatcttttattctcatatcttcaaaggtcttaatttcctaatgctttaatgttaaattatggagaatagtaggacattcttcttttctatagtatatgcttgctcaagagaagtttctaagactggacactgtgaaatgacaaaacaaggaattaaaaatatttctctcacttatatattatttctggctcaattctccaacttttgagtctagaaatgaacttgcatatcagatataatttaagaaaatattctcaggaactgctgggaagattctaaaactattttactgtttttagctataaggaagagaataatgtattatttaatgttattttaaacatagtgttgtttcaaatagtaaataacatttcacaagacatttgaaaataagctttgaagttgactcaaaattctatgctaaacatgtgatccatagatacactgatgactgctggcatttctgtggaaatgaagaattgttttatttgtttgtaattatttgggtttcagttgctttatttttaagaaaaaaaagctgaagtgtctgggaatcctttatgacatacagacattttaattatttcaaacacgttttcccccttaagtgggtagcaaaaaaaataaagcatacttcaggctcatatttttaaccatgcaacaagaaaattgttacaatttctgttctgaggagtagccttcatacttagtatttataaatattgaaatgtatgttaatttggggaaaacataacagatatccatgaaggcttgtatgtcatggtaggtagttactattcgataccacaaaaatgtctcttgcccttaaaaccagaacacgaggctcaccagacagatgactgaatggagtatggaaaatctttatttctgtttttcttaggctatgtaggacttaacttattgtgcattggtaacagattgtagaacataagctgaaagataaaattcttgaccttaatgtctcatcttaaaaagaagcattggttgacattctatatctcgtattacttaaaaataatgggggagcgcagtatatattaaacaaagattggctttgtggtgatcattgttgaaggtggggtgatggctatgtgaaggttcactatatatactccctactgttgtataagtttgaaattgtgcataatagatttatttaaaacacaaagcatagaaatatctactataatattatggtgagagcaaaatttgagggggatgtacacctgcattttcgaagaatatatacatttcggagaccgaattcaaaatgaaaaaccgggctgctgtcccgcacggagcctctgggcgccgctgtcggccagtgcagagcaagcgctgacgccggggatccgtcagcctctggcctgggattccctgcgcagccaacaacagaaagaagaaaaccagctcccacacagagcctcccggctgcgcagacctttcccagcacagcggattgccagctccgagacccgggactcctcctgtcctgggccgaatgctcttttagcgcggtagagtgcactttctccaactggaaaagcggggacccagcgagaacccgagcgaacgatgggagggagctgcgcgcagaggcgccgggccggcccgcggcaggtgctatttcctttgctgctgcctttgttctaccccaccctgagtgagccgatccgctactcgattccggaggagctggccaagggctcggtggtggggaacctcgctaaggatctagggctcagtgtcctggatgtgtcggctcgcaagctgcgagtgagcgcggagaagctgcacttcagcgtagacgcggagagcggggacttacttgtgaagaaccgaatagaccgtgagcaaatatgcaaagagagaagaagatgtgagttgcaattggaagctgtggtggaaaatcctttaaatatttttcatgtcattgtggtgattgaggatgttaatgaccacgcccctcaatttgataaaaaggaaatacatttagaaattttcgaatctgcatccgctggtacacgactatcgcttgaccctgccacggatcctgatataaacataaactcaattaaagattataagataaactctaatccttatttttcattaatggttagagttaattccgatggtggcaaatacccagagttatctctggagaaactcctagaccgggaagaacagagatctcatagcttgatattgactgccttggacggaggggacccaccaagaagtgccaccgctcacatagaaatttctgtcaaggataccaatgataaccccccggttttcagcagagacgaatatagaattagtcttagtgaaaatctgccccctgggtcccctgtgttgcaagtgacagccactgaccaggatgagggggtcaatgctgagataaactactacttccgaagcactgcccagagcacaaaacatatgttctcattggatgagaaaacaggtatgattaagaataaccagtcatttgattttgaagatgtagaaaggtacaccatggaagtggaagcgaaggacggaggtggtctctctacccagtgtaaagtaa

SEQ ID NO: 10518 - DNA, 6000 bp, Homo sapiens
gcgccgggccggcccgcggcaggtgctatttcctttgctgctgcctttgttctaccccaccctgagtgagccgatccgctactcgattccggaggagctggccaagggctcggtggtggggaacctcgctaaggatctagggctcagtgtcctggatgtgtcggctcgcaagctgcgagtgagcgcggagaagctgcacttcagcgtagacgcggagagcggggacttacttgtgaagaaccgaatagaccgtgagcaaatatgcaaagagagaagaagatgtgagttgcaattggaagctgtggtggaaaatcctttaaatatttttcatgtcattgtggtgattgaggatgttaatgaccacgcccctcaatttgataaaaaggaaatacatttagaaattttcgaatctgcatccgctggtacacgactatcgcttgaccctgccacggatcctgatataaacataaactcaattaaagattataagataaactctaatccttatttttcattaatggttagagttaattccgatggtggcaaatacccagagttatctctggagaaactcctagaccgggaagaacagagatctcatagcttgatattgactgccttggacggaggggacccaccaagaagtgccaccgctcacatagaaatttctgtcaaggataccaatgataaccccccggttttcagcagagacgaatatagaattagtcttagtgaaaatctgccccctgggtcccctgtgttgcaagtgacagccactgaccaggatgagggggtcaatgctgagataaactactacttccgaagcactgcccagagcacaaaacatatgttctcattggatgagaaaacaggtatgattaagaataaccagtcatttgattttgaagatgtagaaaggtacaccatggaagtggaagcgaaggacggaggtggtctctctacccagtgtaaagtaatcatagaaatccttgatgaaaacgacaacagcccagaaataatcatcacttctctctctgatcagattttggagaattcacctccaggaatggttgttgccctcttcaaaacacgggatctggatttcggaggaaatggagaagtcaggtgtaatatagaaacagacattccattcaagatttattcttcttccaataactactacaaactggtgacagatggagccctggaccgagagcagacaccagaatacaatgtcaccatcgtagccactgacaggggcaagccgcctctttcttccagtagaagcatcaccttgtatgtcgctgacatcaacgacaacgccccagttttcgaccagacgtcctacgtggtccacgtggccgagaacaacccgccaggagcctccattgcgcaagtgagcgcctctgacccggatttggggctcaatggccacatctcctactctatagtggcgagtgacctagagcccctggcggtgtcgtcatacgtgtcagtgagcgcgcagagcggggtggtgttcgcgcagcgcgcctttgatcacgagcagctgcgcgccttcgcgctcacgctgcaggcccgcgaccacggctcgcccacgctcagcgccaacgtgagcctgcgcgtgttggtgggagaccgcaatgacaacgcaccgcgggtgctgtacccagctctgggtcctgacggctccgcgttcttcgatatggtacctcgctctgcagagcccggctacctagtgactaaggtggtagcggtggacgccgactcgggacacaacgcctggctgtcctaccacgtgctgcaggccagtgagcccggactcttcagcctggggctgcgcactggggaggtgcgcacggctcgagccttaggcgacagggacgcagcccgccagcgcctgctggtcgctgtgcgtgacggtggacagccgccactctctgccaccgccacgcttcatctggtcttcgcagacaacttgcaagagatactgccagacctcagcgaccgccctgtactctctgacccccaggctgaactgcagttttacctggtggtggccttggccttaatctcagtgctcttcctcctcgccgtgattctggccattgccttgcgcctgcgacgctctctcagccctgctacttgggactgcttccatcctggtctctgtgtcaagtctggacctgtagttccccccaactacagtgaggggactttgccttattcttataatctgtgcattgcacatacgggtacaaaagagtttaatttcctaaaatgcagtgtgcccctacattccaatgaagacatggtttgcagtgtttctcctggagccttaattccacctcatggtggggaggatttgacttcacatcctgagactctgacttcggtgagtttctcttttttgtgtgtgatttatctaatagtctactagtttctcatattttaggcatactactttattttcatatctagaatcatatgtttaaaatccatagctttttacaatattttctcaatgttttttcaattatagttttcactatgtatttggttcataagttgctctatctttttgtaaaataatgtcaccagactgaagatattttgtctttgtcttttttttttttttttttttttgagatggagtctcgcactgttgcctaggctggagtgcagtggcgtgatctctgctcactgcaacctccgccttctgggttcaagcgattctcctgcctcagcctcccaagtagctgggattactggtgcccctcaccacagctaaattttttgtatttttagtagacatggggtttcactatgtcgaccaggctgttcagaaactcctgtcctcgtgatcctcccaccttggcctctcaaagtgctgggattacaggcgtgagccacaatattttgtcaagttctgactatcgaacagaagcagtggtcttggcatctaagaaaacaaacaagtaacctatctattcaaatttgcgaagacttagtgaatttacgatatcttatttatatatttttaaagcctaaaaatattcagaagacaggcccagtggctcacacctataatcacagcactttgataggctgaatcggaaagtatcacttgagcccaagaattgagaccagcctgggcaatatagggagaccccccatctctactaaaacaacaacaacaaaaaaaaacattagcagagtgtggtagcattcccctgtggtcccagctacttgggaggctgagctgggtggattgcttggtcctgggaggtcaaggttgcagtgagccctgatcttgccactgcactccagcctgggcgacagagtgcgaccctgtctctaaaataaataaataaatatgcaggcagggccaagtgtgctgtaatcccagcactttgggaggtggaggtggagaatctcttgagcgcaggaatttgagaccagcctgggcaacacagggagactccatcgctacagaacatttaaaaattagcagggtgtggtggcacatgcctgtggtctcagctactctggtggctgtggtgggagaatcgcttgagcccaggaagtctaggctgcagtgagctgtctaggtgacagagtgagaccctgtctcaaaaaaaaaagacatttctaagaaataaatgaaatactattgcctttgcactcagtctctgtctctgattctctgatagaagatttttgaagaaaaaagataaaatctttgaagagttctatacttggaaggcatagtgacataaacacttctgaacatcctgttctctgtgtgaaagaagtgaacttctataccctttgcatttgagggaacaattgctactgggttgatgggcacacacagttgaagatatgtgaaccactggactttggcctctgatacaaactgcctaagagaagagattatttatactggtattaatgctctgatgaaaacaggtcatttgacataaacacttacttgttaaaaacctatatcactacatctaactttgttttctaaaacttttagtacttcaaattctacgtatttcttttctcattacaatgcaaacagtttaatttgcaactgtaatatatgttcattttagtttgtgattacctgcttaatcatttaaataggtccatttaacttgtatccctgtaagataaagtatgttttacacaaaaaggttaattaaggctcagtaaaactattctagaagagtactttaaaaacctcttacacaatcctaagctaaataagtttaatgaattaagtagttacaattataaagcttcagagtgaattatctcatgagtttatttaatataatctttgtatgaatgtatactaaataaaattggcctattcaaatcacaattttaaattataagacttttctgaatttacctagacactaatatgacctaaaataagtattatttaccttttattaaagtgtgtacatttctgttgggaaaacgtgttgcaaatatatatttaaccaaacattatcttgaaatatttacaatattttcactccactttatcacacctcccctaagaaacctacatatagtaaattatttaaagataggagtggagaaaccaaagaatctatgtaaaatataataatccaacagaatagtttactttccattgcatgtatcacttgggtgcagtaacttcttaggactctgagcgccgctgttcacctactaggagagaaaacgcagccagagctcaatccggattctcagggcttcaactacacaagccccacaaaccggctgctgggctgcagggaagctcactccagaatttaaagtgcccaggctacagagacaccctgaagccacagaaagacaaaggaaccggttgaaacacacaacgtgtccagtgaggactttgcagaattctgtaaccagactacaatggccgctcaaaggaatcgctcaaaggaatcaaaggattgcagcgggctggtcctgctctgccttttcttcgggattccatgggaggctggagcccggcagatctcctactcaattcctgaggaattagagaaaggctctttcgtgggcaacatctccaaggacttgggtctggcgccccgggagctggcggagcgcggagtccgcatagtctccagaggtaggacgcagcttttctctctgaacccgcgcagcggcagcttgatcaccgcgggcaggatagaccgggaggagctctgcgctcagagcgcgcggtgcgtggtgagttttaatatccttgtggaagacagggtgaaactttttgggatagaaatagaagtaactgatatcaatgacaatgctccaaaattccaagcagaaaatctagacgtaaaaattaatgaaaatgtcgctgcgggaatgcgttttcctctcccggaagctattgatccggatgtgggcgtgaactccctgcagagctatcagctcagccccaataagcacttctccctaagagttcagagccgtgccaatggcgtcaagtacccggagctggtactggagcactccctagatcgcgaggaagaggccattcaccacctggtcctcaccgcctccgacgggggtgaccctctccgatctggcactgtccttgtcagtgtgactgtcttcgatgcaaatgacaacgcgccggtcttcaccttgccagaataccgagtgagtgttcctgagaatttgcctgtgggcactcagctgctgacagtcacagccaccgacagggacgaaggtgccaatggagaagtgacatattcattccgaaaattacctgacacgcaattgttgaagttccaactaaacaaatatactggagaaataaaaatatcagaaaatctagattatgaagaaaccggtttctatgaaatagaaatacaagcagaagatggaggagcatatcttgcaactgcaaaagtgttgattacagtagaagatgtaaatgacaacagtccagag

SEQ ID NO: 10519 - DNA, 6000 bp, Homo sapiens
ttttcactccactttatcacacctcccctaagaaacctacatatagtaaattatttaaagataggagtggagaaaccaaagaatctatgtaaaatataataatccaacagaatagtttactttccattgcatgtatcacttgggtgcagtaacttcttaggactctgagcgccgctgttcacctactaggagagaaaacgcagccagagctcaatccggattctcagggcttcaactacacaagccccacaaaccggctgctgggctgcagggaagctcactccagaatttaaagtgcccaggctacagagacaccctgaagccacagaaagacaaaggaaccggttgaaacacacaacgtgtccagtgaggactttgcagaattctgtaaccagactacaatggccgctcaaaggaatcgctcaaaggaatcaaaggattgcagcgggctggtcctgctctgccttttcttcgggattccatgggaggctggagcccggcagatctcctactcaattcctgaggaattagagaaaggctctttcgtgggcaacatctccaaggacttgggtctggcgccccgggagctggcggagcgcggagtccgcatagtctccagaggtaggacgcagcttttctctctgaacccgcgcagcggcagcttgatcaccgcgggcaggatagaccgggaggagctctgcgctcagagcgcgcggtgcgtggtgagttttaatatccttgtggaagacagggtgaaactttttgggatagaaatagaagtaactgatatcaatgacaatgctccaaaattccaagcagaaaatctagacgtaaaaattaatgaaaatgtcgctgcgggaatgcgttttcctctcccggaagctattgatccggatgtgggcgtgaactccctgcagagctatcagctcagccccaataagcacttctccctaagagttcagagccgtgccaatggcgtcaagtacccggagctggtactggagcactccctagatcgcgaggaagaggccattcaccacctggtcctcaccgcctccgacgggggtgaccctctccgatctggcactgtccttgtcagtgtgactgtcttcgatgcaaatgacaacgcgccggtcttcaccttgccagaataccgagtgagtgttcctgagaatttgcctgtgggcactcagctgctgacagtcacagccaccgacagggacgaaggtgccaatggagaagtgacatattcattccgaaaattacctgacacgcaattgttgaagttccaactaaacaaatatactggagaaataaaaatatcagaaaatctagattatgaagaaaccggtttctatgaaatagaaatacaagcagaagatggaggagcatatcttgcaactgcaaaagtgttgattacagtagaagatgtaaatgacaacagtccagagctgaccatcacgtctctatttagtccagtgactgaagattcacctctgggaacagtcgtagcccttttaaatgtgcatgatttagactctgagcagaatggacaggtaacctgttccattttggcgtatctaccatttaaattagaaaagtccattgacagttattacagattggtgatacacagagcccttgacagggaacaggtatcctcttacaatatcacagtgacagccacagatgggggaagtcctcctctatcaacggaagctcactttatgctacaagtggcagatatcaatgacaacccacctaccttctctcaagtctcctactttacctatatcccagagaacaacgccaggggtgcctccatcttctcagtgacagcgctggacccggacagcaaagagaatgcccagattatttactccctggctgaagacaccatccagggggtacctctgtcctcatacatatccatcaactcagacactggcgtcctgtatgcactcagatccttcgactatgagcagtttcatgagctacagatgcaggtgacagccagcgacagcggggatcctccactcagcagcaacgtgtcgttgagcctgtttgtgctggaccagaacgacaatgcgcccgagatcctgtaccccgccctccccacagacggttccacaggcgtggagctggcgccccgctccgcagagcccggctacctggtgaccaaggtggtggcggtggacagagactccggccagaacgcctggctgtcctaccgtctgctcaaggccagcgagccgggactcttcgcggtgggggagcacacgggcgaggtgcgcacggcgcgagccctgctggacagagacgcgctcaagcaaagcctcgtagtggccgtccaggaccacggccagccccctctctccgccactgtcacgctcaccgtggccgtggccgacagcatcccccaagtcctggcggacctcggcagcttcgagtctccagctaactctgaaacctcagacctcactctgtacctggtggtagcggtggccgcggtctcctgcgtcttcctggccttcgtcatcgtgctgctggcgcacaggctgcggcgctggcacaagtcacgcctgctgcaggcttcaggaggcggcttgacaggtgtgtccggctcgcactttgtgggcgtggacggggttcgggctttcctgcagacctattcccacgaggtctctctcaccgcggactcgcgaaagagtcacctgatcttcccccagcccaattatgcggacacgctcatcagccaggagagctgtgagaaaaacgatcctttgtctttgttagatgattcgaagtttcctatagaggataccccattggttccagtgagttttattttcatttttacttttgttaaaaaaaaaaagattggtttttactttgaagtttgcggcatgatggtggaaagtgtaaatgctaaaacactgatgagtagaatttgatgtttattaaggttttttttttttttttttttttttttttttttactttctggtaaaattcacctagtctcaatcaaggcctatatatcataaggctttgttatgattagctttgcagaaccttgtagtttatagtgttgttgagtacaatattgacaattcctaagacagacttccatacagaagtgcctgtcaatttatatttcctcctgggtggtcacatattgaaactccagccccttaagcaaccctcttgttctgaaggcaggtctggtaagaataggtaagtatcagaaagaaatcacctctggaaacacaacccaaatccaagaatactcaatgcagttcttcccaaggagaagggcaataggcctttttcaaactacattttatatatttttcaatctatactttgtggtgatagttgcagttgaatatactaagtttttcattaatattgaattaacaatttatttataacaatgtatgcttagatttttccagccctatttataactgataacactgcagtatcctttttgcatacaattctctaatttcacactgctatgtggaagatatagcattttaatttaactttcattgctcaatagggatcctgaggaggctatagagggtgaaattaagaatatttgggattctgcttttgtcttttttgttaaattttctagtgactaaggctgaaagtaaatatgggttgggaagacagataaatttgtacatgttcccgagaacaggagcaagagatatatgacaaagctatttcagtggctctttaatgtataaggaggcaaacacctgaaactctgaaaactctgaaattgagaggcaaaataaacttagagtcaagaaagaaatgccatttctgcagatcagaatataaacaccaaccacagctgtaaaaaagaaaagaatatatgcaacgaagggaaattatataaacaaaggatcattggaggtactgatgagttcatttagttcaatgaaaatagtgacgtattaggtagatctcttaattttattactagtattctactaaatgtggtagtataaagtcaaaaagcattccgaagtttctcaagacccttataattccatgatttttttcaggtcagtcaacatttgttgaatgataggtctgtggaaggaaagcacactctttagggtcatagttattaactattaaaccattgaaactattattttatatttgtgttaatgagagtcaaaattattgtgcattcatctcaaataattctattattttgaaaaatacaggttttttttttaaaaaaaactgctcttgacattgtagctattgtgagaaaatattttgattataattatttaaaagcaatacaggacaccctggatgatggtaatgactagggcaatggttgcattccagtacttaagtatgaaataaggaattattactttctgggtgaatataggctagaattgaagacaaaaaaatttgttgcttatcttcagtacttccagcttcatagataattactcttaaaaggaacaagaatgactgcctctggatggaggaattggatagcaatgggccgtgggataggagacctataaaccttcatgctatattattttgtgcctttttaaattttgaagaaaaaatattcatttattcaagatatatgtaaattcagtaaataaaaagatatgatagttatgaccaagtggaaatatatttcctgatgtaaaaggaatcactgaggaaaaagattaaaatattttggctgtcaactcgtagtttaaaaaaaattccttgaaagaggtagagaaaagtcaagttgcagtcccacacagagcctctgggcgccgccgtcggccagtgcagagcaagcgctgacgccggggatccctcagcctctagcctgggattccctgcgcagccaacaacagaaaagaaaaccagctcccacacagaggctcccggctgcgcagaccttgcccagcacaccagattgccagctccgagacccgggactcctcctgtcctgggccgaatgctcttttagcgcggtagagtgcactttctccaactggaaaagcggggacccagcgagaacccgagcgaacgatgggagggagctgcgcgcagaggcgccgggccggcccgcggcaggtactatttcctttgctgctgcctttgttctaccccacgctgtgtgagccgatccgctactcgattccggaggagctggccaagggctcggtggtggggaacctcgctaaggatctagggcttagtgtcctggatgtgtcggctcgcgagctgcgagtgagcgcggagaagctgcacttcagcgtagacgcgcagagcggggacttacttgtgaaggaccgaatagaccgtgagcaaatatgcaaagagagaagaagatgtgagttgcaattggaagctgtggtggaaaatcctttaaatatttttcatgtcattgtggtgattgaggatgttaatgaccacgcccctcaattccggaaagatgaaataaacttagaaatcagtgaatccgtcagcctggggatgggaacaattcttgagtctgcagaagatcctgatattagtatgaattcgctgagcaaataccaactaagtcctaacgagtatttctcattggtggagaaagacaatcctgatggtggcaaatatccagaattagtattgcagaagactctggaccgagaaacgcagagcgctcaccacttggtactgaccgccttagatggtggggaccctccccgaagcggtactgctcagataagaatcctggtaatagatgccaatgacaaccccccagtgttcagccaggacgtgtacagggttagccttcgggaagacgtgcctccaggcacctccatcctgagagtgaaggccactgaccaggacgagggcatcaactcagagatcacttattccttctttggtgtggctgacaaagctcagcacgtgttctctctggattacactacaggaaacattctaactcagcag

SEQ ID NO: 10520 - DNA, 6000 bp, Homo sapiens
ttcaatctatactttgtggtgatagttgcagttgaatatactaagtttttcattaatattgaattaacaatttatttataacaatgtatgcttagatttttccagccctatttataactgataacactgcagtatcctttttgcatacaattctctaatttcacactgctatgtggaagatatagcattttaatttaactttcattgctcaatagggatcctgaggaggctatagagggtgaaattaagaatatttgggattctgcttttgtcttttttgttaaattttctagtgactaaggctgaaagtaaatatgggttgggaagacagataaatttgtacatgttcccgagaacaggagcaagagatatatgacaaagctatttcagtggctctttaatgtataaggaggcaaacacctgaaactctgaaaactctgaaattgagaggcaaaataaacttagagtcaagaaagaaatgccatttctgcagatcagaatataaacaccaaccacagctgtaaaaaagaaaagaatatatgcaacgaagggaaattatataaacaaaggatcattggaggtactgatgagttcatttagttcaatgaaaatagtgacgtattaggtagatctcttaattttattactagtattctactaaatgtggtagtataaagtcaaaaagcattccgaagtttctcaagacccttataattccatgatttttttcaggtcagtcaacatttgttgaatgataggtctgtggaaggaaagcacactctttagggtcatagttattaactattaaaccattgaaactattattttatatttgtgttaatgagagtcaaaattattgtgcattcatctcaaataattctattattttgaaaaatacaggttttttttttaaaaaaaactgctcttgacattgtagctattgtgagaaaatattttgattataattatttaaaagcaatacaggacaccctggatgatggtaatgactagggcaatggttgcattccagtacttaagtatgaaataaggaattattactttctgggtgaatataggctagaattgaagacaaaaaaatttgttgcttatcttcagtacttccagcttcatagataattactcttaaaaggaacaagaatgactgcctctggatggaggaattggatagcaatgggccgtgggataggagacctataaaccttcatgctatattattttgtgcctttttaaattttgaagaaaaaatattcatttattcaagatatatgtaaattcagtaaataaaaagatatgatagttatgaccaagtggaaatatatttcctgatgtaaaaggaatcactgaggaaaaagattaaaatattttggctgtcaactcgtagtttaaaaaaaattccttgaaagaggtagagaaaagtcaagttgcagtcccacacagagcctctgggcgccgccgtcggccagtgcagagcaagcgctgacgccggggatccctcagcctctagcctgggattccctgcgcagccaacaacagaaaagaaaaccagctcccacacagaggctcccggctgcgcagaccttgcccagcacaccagattgccagctccgagacccgggactcctcctgtcctgggccgaatgctcttttagcgcggtagagtgcactttctccaactggaaaagcggggacccagcgagaacccgagcgaacgatgggagggagctgcgcgcagaggcgccgggccggcccgcggcaggtactatttcctttgctgctgcctttgttctaccccacgctgtgtgagccgatccgctactcgattccggaggagctggccaagggctcggtggtggggaacctcgctaaggatctagggcttagtgtcctggatgtgtcggctcgcgagctgcgagtgagcgcggagaagctgcacttcagcgtagacgcgcagagcggggacttacttgtgaaggaccgaatagaccgtgagcaaatatgcaaagagagaagaagatgtgagttgcaattggaagctgtggtggaaaatcctttaaatatttttcatgtcattgtggtgattgaggatgttaatgaccacgcccctcaattccggaaagatgaaataaacttagaaatcagtgaatccgtcagcctggggatgggaacaattcttgagtctgcagaagatcctgatattagtatgaattcgctgagcaaataccaactaagtcctaacgagtatttctcattggtggagaaagacaatcctgatggtggcaaatatccagaattagtattgcagaagactctggaccgagaaacgcagagcgctcaccacttggtactgaccgccttagatggtggggaccctccccgaagcggtactgctcagataagaatcctggtaatagatgccaatgacaaccccccagtgttcagccaggacgtgtacagggttagccttcgggaagacgtgcctccaggcacctccatcctgagagtgaaggccactgaccaggacgagggcatcaactcagagatcacttattccttctttggtgtggctgacaaagctcagcacgtgttctctctggattacactacaggaaacattctaactcagcagcctttggattttgaagaagtagaaagatatacgataaacatagaagcaaaagaccgaggatctctctcaacacggtgtaaagtaattgtagaagttgtagacgaaaacgacaacagcccagaaataatcatcacgtcactctctgatcagattatggaggattcccctccaggagtggttgttgccctcttcaaaacacgggaccaagactcaggggaaaatggggaagtcaggtgtagcttaagtagaggtgttccatttaagattcattcttcttctaataattactacaagctagtaacagatgaggccctggatcgggagcagaccccagagtacaacgtcaccatcgcagccacagacaggggcaagcctccgttatcctccagcaaaaccataaccctgcacattactgacgtcaatgacaacgcgccggttttcggacagtcagcctacctggtccacgtgccagaaaacaaccagccgggtgcctccatagcgcaagtcagtgcctctgacccagacttcgggctcaacggccgtgtctcctactctctcattgccagcgacctggagtcacgaacgctgtcgtcctacgtgtccgtgagcgcgcagagcggggtggtgttcgcgcagcgcgccttcgaccacgagcagctgcgcaccttcgagctcacgctgcaggcccgcgaccagggctcgcccgcgctcagcgccaatgtgagcctgcgcgtgttggtgggcgaccgtaacgacaacgcaccgcgggtgctgtaccctgcgctgggtcccgacggctccgcgctcttcgacacagtgccgcgggccgcgcagccaggctacctggtgaccaaggtggtggccgtggacgcggactcggggcacaatgcctggctgtcctaccacgtggtgcaggccagtgagcccgggctcttcagcctggggctgcgaacaggcgaggtgcgcatggtgcgtgctttgggtgacaaggactcggtccgccagcgcctgctagtcgctgtaagagatggaggacagccacccctttcagccactgccacgctgcacctggtgttcgcagatagcttgcaagaggtactgccggatttcagcgaccatcccacaccctctgactcccaggctgagatgcagttttacctggtggtggccttggccttgatttctgtgctctttctcctcgcggtgattctagctattgctctacgcctgcgacagtctttcagccctactgcaggagactgctttgagtcagttctctgctccaagtccggacctgtgggtccccccaactacagtgagggaacgttgccctatgcctataatttttgtgtgcctggggatcaaatgaatccagaatttaattttttcacatctgttgatcattgtccagccacacaagataacctcaacaaagatagcatgctactggctagcattttaactcccagcgttgaagcagataagaagattcttaaacaggtaagtatttaaaaatgtatttaatcctttttatattacaatatgccaatatattccaatatagtggtattattttaagattctagataacttcttcatagagttcgcaaaatataggtcaaatttatggttatcattattaaaacaaaagtttaaattaaatgcctcagtcttcctactattcaaagacattttaaagcaaactacatgggtaatctccggtgacatttttatgaagtaaaatacctttcggttaaaaatataaaatacaggtatatttttacggcatggtattttaattgaaaccctgatgctactcaatttttctcaagtatttcatcttcatttactcaataaaggaaccttgtaagaattatagttaggcatcctacctgatgattttatcgggaccgtattatttccacttccagaaatgtcgttcctttcagtcggttaaaatcaattggaaccaactacaacctacaagttttcagctccagtaatattttgaaaactttttaaaaattaagcaagcccttttaataattactcctttcgcaggtgttcttggtaaagttttaacgtcacataatgtaagtattgtgtatcatcgtttttaagctctacaaatacgtgtgattcacaaaggtgagcgtaatcatttcttctggaatttcttagtcgttgcaataataagaatgggctctaggcgccgctgctcaccaatcagggaatgggaagctgcgcgccattgagtccctccctcccccgcctctaccacacaaagcggaatgagatggatactcacagatcctgacactggagacttagaagtattttccttcgctttctgatatattttggatgtagtcggcctaggacttcatagatacataagccgattcacaaccaaccagctcgagaaaccgcggaatatcggcttagagcctgccatggcgaatcggctacagcgcggggaccgcagtcggctgctgctgctgctgtgcattttcctggggacgctgcgggggttccgggccaggcagatccgatattcggtgccagaagagaccgaaaagggctccttcgtgggcaatatctccaaggacctggggctggagccccgggagctggcgaagcgcggagtccgcatcgtctccagagggaagacacagcttttcgctgtgaatccgcgaagcggcagcttgatcacggcaggcaggatagaccgggaggagctctgtgagacggtgtcctcctgttttttaaatatggaacttctcgtggaagacaccttgaagatttacggagtggaggtggaaataatagatattaatgataacgcccccagcttccaggaggacgaagtggagataaaagtcagtgagcacgcaattcctggggcgcgatttgctcttcctaatgctagggatccagatgtgggcgtgaactccctccagagctaccagctcagccctaataattacttttccttgcaactgcggggcagaacggatggggccaagaatccagagctagtactggagggaagcctggaccgagagaaagaggctgctcacctgctcctcctcacagctttagatggaggcgatcccatccgaaagggcgcagttcccattcgtgtggtggtcctcgatgtaaatgatcacatcccaatgtttacacagtccgtatatcgcgtgagtgttccagaaaacatcagctccggaactcgggtgctgatggttaatgcaacggatccagacgagggaatcaacggggaagtaatgtattcatttcggaacatggaaagcaaggcttctgaaatattccaattggattcacaaactgga

SEQ ID NO: 10521 - DNA, 6000 bp, Homo sapiens
tctacaacaggagagaagactttgcctagttcttccaatatgtgcattgcttctgcttagaaaaaaacaaacttttaaattctctttgctgggttaatgactgttctatagattcccatctctaaggaatcttctttggtagtaaacactggaaaacagtcactacgaaaactcataaaatgtctagtttcctatacattagtccaacacatcagtctaattctgaatcccattgaattagcaaaggcttccggctgcagttttctaaatagactcagagccctgctgttggccaatgtgctgcaagaactggagcctgggatctaccaggacgatattctgttcagtcacagaagcaagtcggagagtggccaagacttgggctttctgctcctgcaaatctgattccatacggattggggtgccctcaaactgggagcattgagttttctatgtatggaagtaaatattttaaaagcactttgtgaaacattttctcttaacgtcggagactgcagcaacgcatgggaaggatgggaaacagggtgaagcagagaagcaggacccggcagtggcaagcactcttccctttcctgctgcctttgttctgcggggcaccctcggagcagatccgctactctattccagaagaaacggtccagggctccgtggtggggaaccttgcggaggacatgcggctgcatgttcaggatttattgacctgaaaccttagagttagtgcagagaaacaatactttaccgtgaacacggagaatgggaacatacttgtgagtgacagaatagatcgagagtcactgtcttcaaaatcctctgtgtcatacccttagagattgtagcagagaatcctctaaatgtttttcacataaatgtgatgatagaagatataaatgataacccacctcattttccccaaaatagcattgttttacaaatcaatgaactagcaattccaggcattcggtttggcctggaatctgctatagatgcagatgtagggcctcactctctccagagttaccagctcagttctaatgaacatttctctctgatgatggacaagactaaaggcaagaacgctccagaattagtgctggagaagcccctgggccaggagcaacagagctctcatctcctggtcctggaagcaatggacatgggtgacccagtcccaactggcactgctgcaattcaaattgaggtcactgatgccaacgataatgccccagtttttagccaggatgtatacaaagtcagccttagagagaatgtgcccccaggcacctctgtactaaaggtgacagccactgaccaggatgagggtgtcaatgcggagatcacctactctttcaaatccctacgagatgatattggaaatatgtttgtgctagaccatcaaaatggggaaattaaatccaaagacttaatagacttcgaatttcgtagcagttataccatgagagtagaagctaaggatggtggaggcatgaccagcgaatgtaaaattatactagaaatcctagatgagaatgacaatgccccagacgtggtttttacttcagtgtccagttctgtaactgaggacgcagaaccctggacggtgatcactctgttcaaaacacatgataaagattcgagagaaaatggggaggttacatgcctcataaacgaaagagttccttttagaatcgaatcttccgccaataatgactataagcttgtaacagatgggaccctggattgggagcggatcccggagtacaacgtcaccatcactgccactgacaagggcaagcctccgctctcatccagcacaagcctcaccctacgcattggtgaagtcaacgacaatgctccggttttccaccaagtctcctacgtggtccacgtggccgaaaacaaccttcccggagcctccatcccacaagtcagcgcctctgacctggacctagggctgaatggccaagtctcctactccatcgttaccactgacttggagctgcgggcactgtcgtcctacgtgtccgtgagcgcacagagcggggtggtggtcgcgcagcgtgccttcgaccacgagcagctgtgcgccttcgagctcacgatgcaggcccacgaccagggctcgcccgcgctcagcgccaacatgagccggcgcatgttggtgggcgacctcaatgacaatgtgccgcgggtgctgtaccccgcgctggggcccgatggctccgcactcttcgatatagtgccacgcgccgcagagtccggctacctggtgaccaaggtggtggcggtggacgcagattcgggacacaacgcttggctgtcctaccacgtgctgcaggccatcgagcccgggcttttcagcctggggctgcacacgggaacctgctggttgctgtgcgtgacggaggacagccgccgctctctgcgccgctacgcttcacctagtcttcgcagacagcctgcaggaggcactgccagacttcagtgacagtcctgtgccctctgattcccaagcaaagctgcagatttacctggtcgtggccttggccttgatttctatgctcttcttcctcgcagtgattttggcggtcgccttgcacctgcgatgctcttccagcccctctgcctggggttgctttcaccctggtctctgttctaagactagaccaggggtttttcccaactacaatgagggaactttgctttattcctgcaatctgtatgttccctcggattctagaaaaagaagatttaattttctcaccatgacaccagaaacagtccccccacaagatctttctaatgaagtttctctggtagcaagcttcactgaagagaataacaagataagctctaactctgttgctcctactcacgtgagttccaatgaatgtctttcatttacaaatggatgaggtttaattttcaaaccaatattttggcaagaaaatcttaaacatattatatctactattgcttcaggtttgtttgcccactcttaatatttcctgttcctttctgtgtgggccagtaacttcattattagctttcatgtatttttgaaacattttcaccatttttacgggagactttttttttttttggacggagtctcgctctgtggtccaggctggagtgcagtggcatgatctcggctcactgcaagctctgccttccgggttctggccattctcccgcctcagcctcccgggtagctgggactacaggcgcccgccaccacgcccggctaattttttgcatttttagtacagacggggtttcaccgtgttagccaggatggtctcgatttcctgacctcgtgatctgcccgcctcggcctcccaaagtgctgggattataggcgtgagccactgcacccggcccggagacattgtttatacacacacacacacacacacacacacacacacacacgtgtgaaaagtgggtattatgatactgctgtcattgagatattttaattgaggaataaatttttttcctgtgatgtttcttgggacatcaatatttgagtatataaggctttttctttaatccattaactataaattttgaagaaaatgcatgagaaaatggagaaaatgtgttttttttttaaaaaaaattgagattaaggtctcattatgttgcccaggctggactcaaactcttgggctacagtaatcctcccacctcaatctccagagtagctgagactacagttgcctgaaactgtgcctggcagagaaaaaagcttaaaaaaataagaacatggtaatgatttgataatattcagttacatttacttttgattcttgtaattcaagtaaactcaattttatgtctgatattttctcacagctacctatatatttcttcccaatttaaaatatattattttattttatgcctagcaaatatctttacagtataaatatttacgctcatgaaagtacgtagccagttatttcttagggagaattttttccctatattttgatgggcttccaaaagtattaccagtaattctcagtaattacaattaggtcagttacccaggaaaaggtaagtctgtaacattctttggactaccaattttcttttactaagtttcctgaacaataaatatttttgaaatataatgtattaatagaattctggagtacttccattatttccagtcaatgcaagttggaatgcttctactttatgctaaaaatattaatgtttctttttcacttgggttcttgttaagtgtgattctgataatgtatacaatcacatatcatttttaggtttccataatatcatgaaaatttgatttttaagcgttacatgtcaacaacctggtaaagtaatccttccattcaggatcattcaaggaatctatttaaaaatattttccccaaattatagctgaatcagaaagtttaaattattatattatatgatttgtcaaaaagagaaactcctagggagacatctccataataggtgtgttgggggaacagtaatctcaaagcagatgcactaacattataagattaaaatcattgtttatagaaacttccaattcatttaaaagctcattggggaaaaaaaagctcattgggaaaaaaaaaaaaagctcactaaagtttctattaaagcgaatacggtagatttccatccccttttgaagaacagtaggtggagctatttaagatataaaaacgaaatatcctttctgggagttcaagattgtgcagtaattggttaggactctgagcgccgctgttcaccaatcggggagagaaaagcggagatcctgctcgccttgcacgcgcctgaagcacaaagcagatagctaggaatgaaccatccctgggagtatgtggaaacaacggaggagctctgacttcccaactgtcccattctatgggcgaaggaactgctcctgacttcagtggttaagggcagaattgaaaataattctggaggaagataagaatgattcctgcgcgactgcaccgggactacaaagggcttgtcctgctgggaatcctcctggggactctgtgggagaccggatgcacccagatacgctattcagttccggaagagctggagaaaggctctagggtgggcgacatctccagggacctggggctggagccccgggagctcgcggagcgcggagtccgcatcatccccagaggtaggacgcagcttttcgccctgaatccgcgcagcggcagcttggtcacggcgggcaggatagaccgggaggagctctgtatgggggccatcaagtgtcaattaaatctagacattctgatggaggataaagtgaaaatatatggagtagaagtagaagtaagggacattaacgacaatgcgccttactttcgtgaaagtgaattagaaataaaaattagtgaaaatgcagccactgagatgcggttccctctaccccacgcctgggatccggatatcgggaagaactctctgcagagctacgagctcagcccgaacactcacttctccctcatcgtgcaaaatggagccgacggtagtaagtaccccgaattggtgctgaaacgcgccctggaccgcgaagaaaaggctgctcaccacctggtccttacggcctccgacgggggcgacccggtgcgcacaggcaccgcgcgcatccgcgtgatggttctggatgcgaacgacaacgcaccagcgtttgctcagcccgagtaccgcgcgagcgttccggagaatctggccttgggcacgcagctgcttgtagtcaacgctaccgaccctgacgaaggagtcaatgcggaagtgaggtattccttccggtatgtggacgacaaggcggcccaagttttcaaactagattgtaattcagggacaatatcaacaataggggagttggaccacgaggagtcaggattctaccagatggaagtgcaagcaatggataatgcaggatattctgcgcgagcc

SEQ ID NO: 10522 - DNA, 6000 bp, Homo sapiens
atatctttgaagcctcctgacttatacattatacctgtaatgaaatcagctaacaaaaatcaagtatatatcctattttaatgtgtgttaacttttcagaagaaaaaaaaagtatggtcggggagtaagtccatgctttgatgtatttactctgctccaataaaatacagagatacataaaatataagaggaaagcaaaagcaaagtggtgagctagtctaaagccatgtgagttatagtcttggacttaaaagcagaaattgaaggttaggaaactgcctccagcaatgtaatagggacagaagtgcttcagactagataaatatctggaccaggcttactgcctgaatccaaaataagcaatgaggcccttcagctggttaaaaaggaaaagaaagatgcattaacatgctgcctagctgggcgcagtggctcacgtctgtatttccaacaatttgagaggctgaggcggaaagatccttggagccctggagttcaagaccagccggacagggcggcctgcgactgtagtcccagctacgcggggcggggaggggcggggcggggcggggcaggagctgacgtgggaggatcccttgagcccaggaagtcaaggcttcagcgaaccgtgatcgcgccactgccctccagcctgggcgacagagccacaccctgttaaataaataaatataataataaaagctgtttcccaattccggtggttataactttcttcgtaagctgtgtagaccaagagagagagacagacacggatgctggatagagacagcgaacaccaagtatctcatatgtgagctgtggtatccagaatatcactgctgtgcatcattaaagcgtcattaagagacctagttatggcctgggacctgaggtcagatagaaactatttcaaaaccattacaaatgagcactgaacccaggagggaaggagagagggatatagtgtagaagagaaaaaaacaaactaaaactaaaaacaaacagagctcttccactaaaaataaatatacaaaccaaaatttcaaaacacacttgtctcgtagaatttattgttactagtgagaaactttctgtcaacacactgttattttttaaggtaatctctgttttctctctggtaactattgaagactttctctcattcttgctgtgtgtctgttgcatttttatttttattttttgcttggtaccaagagtatactctcaattgataactaagttatctcacttctggactttctcagctcttataatcataattttttttctgtgtatatacaagtgagctacatttacctattaaaggacaaatattacaaaactggttgatttttaaaatccatattctaataatacacgtgcttaaaataaaaatacactgaaacagtgaaactaaatatatatgtacacacacaaaaaagaaagtcatgttaatgtaacaacaaagtcatatttaaggtaacaaacacaaattgtgattttaaaaaatgaactgattatagttgtaaaaagagcagatgatcaaaaggatataaaaatataagcttctattactgaaaaatatagcttagaaaataccggaatatttaaacataattccataagaaataatagaccccacaggaagaaagttagttaacataaagaagatttgaacaacataatttagaagcttgatctattaggattctaatagatccgttctgcacacaacaaatatggaatagtcatccttgaacaagcagacaatctacaagtttattacctagtcattacaaaaaagggttcagcaaattgcaaagtaccaataatatacttgccttacaacacatacttaatcacaaagcaaacatttaaaaatagaaaagggaaaaagtttggatatttacatctacacccttaaataactcttggatttcaaaaatcacaatgacaatgaaaactactcagaaaaaaaggacttaaatattctttattaaaaattgtgagatgcaactaaaactaattaggagtaagtttatagacaaatgcaataatttttttaaaagcaaacaaaattatttaaaatacatgaatttagcttgccattcaagaagtaagataaaaaacatacaatgagtatatactaaaataaaatgatggaaaaaataacaaagagttacatttttgaaatgcaaccatggaagagttctgaggatgaaataatggaagcagacaataaatgtaataaaaccagtggggagaaaatgaaaattctgtcaagtctaacgttaggactcatgtaagagagccaggcacaatggcacacctataatcccaggtactgagtaggctgaggcagtaggattgcttgagcccaggagtttgaatccagccggggcagtataacaagacccaatctctataaaacaaaaaaacacaaacacaaacacaaaaataaaaataaaaaacaaaagcaaaatataccatagtagctctacaagaaaacatggtgagttggtatcaattatttccaatatatttttcttcagtcttgtaagaggaatggatgaaagtaaaaatgagaaaatttcaataaggaaggagccaaaaggcaaacagattaaagtgtcaccagaaatgggcaattccacttatgccacatacaaaaattaattcaaaatggatcaaagaagcaatattcagaagcaataaaacccttttagttattatgtttaagaactaaaactatacaactcttagaagaaaacaggaggaaaccttcataacattgatttttggcaatgatttcttggatatgacaccaaaagcacaagcaacaaaagaaaaaaattgtatactggactttatcacagttaaaaactatatgcagcaaagaacaatatcaatagagtgaaaaggcagcccacagaaagagagaaaatgtttccaaatcatgtatctgagaatggatatccagaataaagaactcgaactcaacaacaaagaatcccaaacaattggatgttaaaatgagcaaaggacttgaatagacatttctccaaagatgatatacaaatggccaaaaccatatgaaacaatgttcaacatcactagtcattagggaaatgcaaatcaaaaccataatgagatactactccacattcattagaattgctgtcataaaagaaaagaaaagaaatgttaacaagaatatggagaaattggaattcttgtgcattgctggtgaatataaaatgacacaactgctgtggaaaatggtatggtgactcctcaaaaatttaaacatagaattaccatataatccagcaattccactctggttattacccaaaagaagtgaaaatagggacttcaacagatatttgtacacctatgtttatggcatcattagtcacaatagttgaaaagtggaagtaacccaagtgtccattgacagatgaatgggtaaataaaaagtggttcacacatacaatgggctgttatttagccttaaaaaggaagggaattctgttacatgctacaatatggacgaacttcaaagacatgatatcaagtgaaataaacctgttataaaatgacaaatactgtatgattcctcatatatgaagttcctagattagtcaaattcatagagaaaaaaggtagaatggtagttgccagggactgggtgaaaggcaatggggagttgctatttaataagtacagagtttcagttggggaggatgaaaaagttctggaagtggatggtggtaatggtcacaccagaatgtaatttgaatgtacttaatgtcacagaattgtatgcttgactatggtcaaaatggtaaagatgaaacaagagtaagaagacatccactgcattgtattttacacccttggaaaatgaatatcagaaaaagaacttgacaacctcaaacaattttgagtgactgattcctagtgtggtgaaaaaccccttccggctctagctttatcaaatagacctgctttctgtttctgtaatgttccatgctgtctcttaccttcaagcatttgttcagaggttctagaacacttcttcagcctttttcttgattcaatcctactttttatgattcagcttcaatcatgccctcaaaaagacttttctgaccccaaatctagactggatacccctcctaggtattcctccatcacccagtgtttcctacctcatatcacagcagttaccatactctattatactctctttactttcttatgtcctcctccaaccttcacgcttgagaccagggcctgtgtttatcatgttcaccatttctagctccagctgcaatcatgcaaagtgggaggcacatgtacccaattaagtgtctgatgattcaataatttaaaggcagattttgaaggtaaatgcaaagccatcaaccataaacgttcaaaatatataaccttagaagaaaacgtagctaacgtttcttaattgatcttactgcttctgattatacaataagagatggaagatgtttggagcaagggcagtggtggcattgattaatgccttgagcagtcaataatactttcctagcaactattatcaagatcatgttcatttataccattcttattaatcctgataaaaagattcctgttttgaaagatctaattctagggtatcttagagctgtaagattctttaaagcgccttgaaagtcaacaaaggcaaacaaacaagaagtaacttaggttttcctgagcaggtgcagaaattatttaggcctctgagcgtcgctgttgaccacctaaggagtaaaaggcagcgagacatccaatccagcaatacggctcccacagcacaagggggtggaggtttggccctaaagcttcaggacaccaaagaaattcagtcgaacagcccaccagttctctccatagggacctgggtcccgtgaatgctggttatctcacaccctgaggaataaagattggaatccgcactggatgctggaagttgactcggagaaaattgcgacaggagggaaatggcggctctgcaaaagttgccacactgcagaaagctggtcctgctgtgcttccttttggcgaccctgtgggaggccagggccgggcagattcgctattctgtgcgggaagagatcgacagaggctccttcgtaggcaacatcgccaaggacttgggtttggagcccctggcactggcagagcagggagtccgcatcgtctccagaggtaggtcccagctctttgctctgaacccgcgaagcggcagcttggtcactgcgaacaggatagaccgggaggagctctgcgctcagagcgcaccctgtctgttgaattttaacattctgctggaggataaattgactatttattcagtagaggtggaaataacagatattaacgataatgcccctcgctttggagtagaggaactggagctaaaaatcagtgaaaccactacgccaggattccggattcctcttaagaatgcgcatgatgcagacgtaggtgagaacgcccttcagaagtacgcactcaacccaaatgaccacttctccctggacgtgcgaaggggagctgatgggaacaagtacccagaactggtgctggagcgctctctggaccgcgaggaagaggctgttcaccacctcgttctcgtggcttctgatgggggtgacccagtgctatctggcacctcccgcatctgcgtgaaggtcctggatgcgaacgacaatgcgcctgtttttacacagcccgagtaccgcataagcattccggagaatacgctcgtgggcacccggatactcacggtgaccgccactgacgcagatgagggctactacgctcaagtggtatattttctagagaaaagccctggagaaacctcagaggtatttgagcttaagtcaacatctggagaactgacaatcataaaagatctagattatgaggatgctacattccatgaaattgata

SEQ ID NO: 10523 - DNA, 6000 bp, Homo sapiens
acaagcccaagccctcttttttttttttttttttttgagacagggtctccctctgttgtccaggctagagtgcagtggtgcgatcttaccttcactgcaacctctgcctcctgggttcaagtgattctcctggctcagcctccctagtagctggaattacaggcacccacccccatgcctggcaatttttttgtatttttagtagagatggggtttcaccatgttggcaaggctggtctcaaactcctgacctcaagtgatccacccaactcggcctcccaaagtgctgggattacaggtatgatccactgcgcccggcctccaagccccctatttttattttgcactgaccctacaagttacgtagctaggcttagttatgtttttagcaaggaaagtgtataatctcatgtaccttttgaaagattactcaggtctctgcatgtgaaatggaatttagggaatgcaagagagggagtaaaaataacagcgaggaagctatgatagcatttaaggttgctttgactcaggggtagcagtagatagggtaagtaattgatagtttcaaaatatattttgggagtagtaagcattggtatggattagtaatatactggatgtggggatgcagaaaaaaatattaaaaattacttctgaaattctggctggaatagaagtgccacttaccaggtaaggaaggttggagacataacatatttgagggtgtggtcaaaagatgagtttgacattatgctatgtcatataaaagacatataaaagactacctattttataattcctttttaataaaatattcagaaaaagcaaaactgtggttgcctgaggctgaagctaggaagattgactacagacaagcatgagggaaattttgggggtgatgagagttttctaaaactggattgtggggttggttgcattactgtataaatttattaaaaatccctgcatcgtataggggcactatattgtatgtagaaagctgtgaaaagattttaaaaatgattgacatgtctgtggttatatcaatgagtactattattattcccattttatacataaagaaaataaaagagaagttaaaaataaaagtttcatggttacatagctactaggtgtaatatccagtattggaatttgaatctttttgacactaagaccttactctcgatcatataatacattcactttctattttaaagttatattatagccgggcacagtggctcacacctgtaatcccagcactttgggaagccgaggcaggcagatcacgaggttgggagatcgagaccatcctggctaacacggtgaaaccccgtctccactaaaaatagaaaaaattagccaggcgtggtggcacgcacctgtatcccagctactagggaggctgaggcaggagaatcgcttgaacccagaaggcagagcttgcagtgagacgagatcgtgccactgcactccagcctgggtgacagagtgagacaccatctcaagaaaaaaaaaattatattataaatgctgcatctcattggtcagaagctctcttgaaattataaaacaaagaagaaaaaagataaagactgggaaattgtgttgaatcagtatataaatcctgtatactggtccttccatttcccctagaaataagtgatacaggccaggcgctgtggctcacacctgtaatcccagcactttgggaggcggaggctggcagatcacctgaggttgggagttcaagatcagcctgaccaacatggagaaacccccgtctctactaaaaatagaaaattagctgggcatggtggcacatgcctgtattcccagctactcgggaggctgaggcaggagaattgcttgaacccaagaggaggaggttgtggtgagccaagattatgccattgcactccagcctggggaacaagagtgaaactcaaaaaaaaaaaaaaaaagaaagaaaaagaaaaagaaagaaggaaggaaggaaggaaagaaagaaagaagtgatacaacaagttacagcatctttgtttattatccactgtgagttgtattaccacactttacttggctctttggcaaactatattatctcttcagatcactagggctaggaaggcccactggtaacttgaaggagtaaatgtatcttctaaaaaatgcttacttccagggagattggatccacacaagtgaatacatatatagtccttagtgtatgctatgattattttactatgtcagtagcataaagattgctatattaataagcattaagtgcctgctgtgctagacagtgaggatgcaagtggccaccaaaatagcatggtccctgccctcctggagcttctttttttcttcttcagtgggggaagcagatactttgcttatgcaaaaataattataaaatttaaagttgtgccaagttcaatggaaaaaatataaggtgttctgagagagcataacaaaggatcctggttttaactggggcctaatggaagacctctattaggaaataacatttaaactaagaccagacagacctgtagaaattagcaaagcaaagggagggaggaaaaagcagctttcctggcaaaggaacaatttgtgtgaaggccctgagacagggaagggctggggttctgaccaccctccaagtggtgcaatggaatatagtgagagagggagaagacatgagaacttggatactatgcaaaggatttggtattttaattcaagagcagtatgatgctactgaggagcagctggacaattgtgtgatccaattaaaattttaggaagatgaacctcgctattgtggagaatgcatacacaagggttctgttggttcatgaagaggtcttaagaaaactatgagctgggtgcagtagctcaggcctgtagtcccatctacttagaagtctgaggcgggaggatcccttgagcccaaggagctggaagttacagtgagctatgattattccactgtactccagcctggatgacagagcgagatcctgcctcagaaacaaaaaccaaaaaacaaacaacaacaaaaacaacaacaacgaaaatctcagaaaactacaggccttattatcaagaaaatgacaggccttattattgagaaaactacttacatttttaaaagctgattttcaaaaaccagattgtgaattaagtgatgctgaataggggaaaaaaagactgataaaccagtgtatctctgaataacccactagatcagtgcttgtcaaactttaatgtgttttcaaatcaccctgatgttttgttaaaatgtaagtcatgtctcagtaggtctagaggagggcatttctgcatttctaacaagctccccggtgatgcctagaccattggtcctcacactttgagtagcaagtgattgggctatactctttattctaaattctaaatgtattctatcttctaatgcctatcagccctcttgctggtctggctaattatcaaacttgagcatttaaaactgggggttttcagagattaattgaagtgttaaagacatggaaatataggtcacatatggcttttcatctcttccggaaatatcctatatatccttacttcttttctacctacctaacctatgtgcctaccccttcacttatgttcaaggttctattatacttcaaaaggactctatgcaatcaaagtgatgtccaagacaaatatacagaaatagtatgaggctctaacactttacatctaatggagtggtttgcatcattaattgaggcttactctgtgccaggcactttacctgccttcttcatttaataggataggagcaggaactcttagaggttcatttcttgttcaaggatatacatctcatctctggcttatatcacagtggactcttttattcactatcctaatcattataattttgtttggtgacaacaattctaaatgcagaaaagttaaggctctttattctgtgactaaaggctttgtattttctaaagatttgtggagctttgctgccattatttcaataattttataaagatcctaggtggtaaataggcctggctttttttctttttgaaatcttctccgtcttcttcttcattagcagtgcaacttcttgtggcatatggtacccaagatcttgggaaaaggattgatcaagtaaagggaaacgatagagagagtgtgctctacaactgagatcatgctccttgtgaaagacagggtagggaaatttcttattgctccctggttcttaagaaatgagagctaacaatgacatccagttttaaaagaaataaaatctgaattgtacttttaaattttataagccagagttaaaccaatagattgtaactcctgctaatttgatagtagctccagataatgaggaagtgacagggaatgctaatttcatttggtaagagataaaactgaaattattaatgtctccacggaaatgctaaatgcctccttacaagtagggtccggctaattgtctgtcttccaacaagccagatttgttggtgtttttccagacaatgttgtgtagttttcggtttggttcgatcccctttcttgtgatcaaagaaagtgattcaaatgtttaatgagtcttgatttggattggagacttgcagaacggctagcctcacagccccaaggctggctttccctaaggtaggtttcctatgcaccgatactggcaaggcgctttggctggaaactctggaaggaagccaaaggaaagtgaagttcctggcgctagcgcgtgtcctgctcagagagcccggcgctagctcattcttcgtgcagttattggctgggactctgtgtgccgctgtcggccaatgaagacgctggagatcgggcccctgcccgtcccctttctgcgccccgggatgaggcagagactgaacagccggcgagcaaatcaacggcatccagaaagccatgtcggactcggcgcccagcgcccaagcgctaacccgctgaaagtttctcagcgaaatctcagggacgatctggaccccgctgagaggaactgcttttgagtgagatggtcccagaggcctggaggagcggactggtaagcaccgggagggtagtgggagttttgcttctgcttggtgccttgaacaaggcttccacggtcattcactatgagatcccggaggaaagagagaagggtttcgctgtgggcaacgtggtcgcgaaccttggtttggatctcggtagcctctcagcccgcaggttccgggtggtgtctggagctagccgaagattctttgaggtgaaccgggagaccggagagatgtttgtgaacgaccgtctggatcgagaggagctgtgtgggacactgccctcttgcactgtaactctggagttggtagtggagaacccgctggagctgttcagcgtggaagtggtgatccaggacatcaacgacaacaatcctgctttccctacccaggaaatgaaattggagattagcgaggccgtggctccggggacgcgctttccgctcgagagcgcgcacgatcccgatgtgggaagcaactctttacaaacctatgagctgagccgaaatgaatactttgcgcttcgcgtgcagacgcgggaggacagcaccaagtacgcggagctggtgttggagcgcgccctggaccgagaacgggagcctagtctccagttagtgctgacggcgttggacggagggaccccagctctctccgccagcctgcctattcacatcaaggtgctggacgcgaatgacaatgcgcctgtcttcaaccagtccttgtaccgggcgcgcgtcctggaggatgcaccctccggcacgcgcgtggtacaagtccttgcaacggatctggatgaaggccccaacggtgaaattatttactccttcggcagccacaaccgcgccggcgtgcggcaactattcgccttagaccttgtaaccgggatgctgac

SEQ ID NO: 10524 - DNA, 6000 bp, Homo sapiens
caggcggattgcttgaggccagcagttcaagaccagcctgagcgacatagtgagatcctgtctctacaaaaaaaaaaaaaaatgtgttttcattagctgggtgtgttggcatgcacctgtggtaccagctacttgggaggctgaagtgggagaattgcttgagcctgggaggttgaagctacagtcagctgtgattgcaccactacacttcaaccatggcaatagagtgagaccctgtctcaaaaaaaaaaattatcagctattactataattatttttattagttcctcactcacctaaaatctcaaacacaccttagaaatacacatatgagaacaaccaaaaatgacaaagtagaagcacatatgaaaaggctaagaaagcatgaaagccagcaagaaataactgccgctcttctggtcagcctggaaagcaactggcattttccctagaacaatgttttcaaacttggttgcacattaaaatcacctagagaccttttaaaaattctgaaacccaggccacaccccgacaaatgaaagcacagtctctgggggtgggacataggcatcattttttgaaggtccccacttgatcctaatgtgcagacaaatttgaaaaccacagctttgggaggctgaggtgggtggatcataagatcaggagtttgagaccagcctggccaatatggtgaaaccccgtctctactaaaaatgcaaacattagctgggcatggtggcgcatacctgtagtcccagctactctagaggctgaggcggaagcatcagtgagggagaatcagtgaacccaggatgtggaagtttcagtgagcccagatcacaccactgcactccagcctgggcgacagagcgagactccacctcaaaaacaaaaagaaagaaagaaaaaagaaaagcagtactctggaacctaccaatccatcatttagcatatttgtgaagtaaagtgttattctggtatttgcagaaccagaatccagctttattgggccaggcccaatttttttaaaaaacatggtaaggtctcccagccttaaagtattacatagcatagctctaaaagatcactgtaggaagacataaaatggtatttcagtcatctaagggaaaaaccttcctaaagcactagcccctggacaactattatttaaacatctacagctgttcaatagatattgggttctttttggagggatgtgacaaaattcttgtataattagattgtgatgatgattgtatcagtttagtacatgtaaatacactgaaaaccattggattatacactttaaatatgtgatttgcatggtatgtgaattatgtctcagtaaaaatctagagatggggctgggctcagtggctcacgcctgtaatcccagtacttagggaggctgaggccagcggatcacctgaggccaggagttcaagaccggcctggccaacatggtgaaacttcatctctactaataatacaaaaatcaggccgggcctggtggctcacgcctgtaatcccagcactttgggaggcggaggcgggcggatcacgaggtcaggagtccaagaccagcctggccaacatggtgaaaccccgtctctactaaaaatacaaaaattcaccaggcgtggtggctgaggcaggagaatcgcttgatggtggaggttgcagtgagccgagatcgcgccactgcactccagcctgggtgaaagagcgaaactccatctcaaaaaaaaaaaaaaaaaaaaaatcagccagatgtggtggcaggtgcctgtagtcacagctacttgggaggttgaagcaggagaatcgctttatctcaggaagcagaggttgcagtgagccaagatcatgctgttgcattccagcctgggcaacaagaacaaaactcactccatctcaaaaaaaaaaaaaaaatatctagagatgggagaatcatatggctggcataaaaaggtcaagtcaaagatatgtaagattaaggctttacgatgctccagttctagtaaaacagaccaggtacttgttttggtgtgaaattgccaatataagtatagtactgtacatattagttgtttagcttaggtaagtcttttaatctctttaaactccagtttcctcatctataaaataaagagaatatctactttgcaaacttgttgtgagagtgaaaagtaatgcatataaagtccctgtatggagcaagtactcaataactatttgttgaactaaaaatgataatactgatattcaccatttattagcatccctatgtgccagacactgtaaacaattaaaagttatcattctggtacccagagtacagtatgagacagacatgcaaaaaaaaaaaaaaaaaaagataatggagatctgcatagcataagatgcagtgggaccaaacgggaaaaaacacctaaatgagcctggagaaaggaagaaatgatagaggtggtgatgcttgagctatgatctaaaggttgagtagtagcttgtcagacagtaaaggggaaaggacagggcagggaggggccattgcaagaaattccatgcagagggattatggtatttcattatcactgaaccttaaactgtgtgtgtggccgggtacggtggctcatgcctgtaatcctagcactttgggaggccaaggtgggcagatcacttgaggtcaggagtttgaaaccagcctggccaacatggtgaaacctcatctctattaaaaatacaaaaaattagccaggtgtggttgtgggtgcctgtaattccagctacttgagcagctacttgagaggtcgaggcaggagaattgcttgaacccgggaggcagaggttgcaatgagctggtgtcaggccactgcactccagcatgggcaacagagagagactccatctcaaaaaaaaagtgtgcgtgtaaaacagacagtctttgtaggagatgaggtgaagcaagtaggcaggagttagatcctgagttacctttgggccaagccaaggagtttttattttattccatatagatgacagtcactgcagaaatttgaactgatatgcatatatcatgaggtttttttgttttagaaatattattctgtcagtcataagtgaagggactggggacattgggactggaggcaaagagatcttatctctttgcaatagtttgaaagctattgcaatatttgaagagaagattgataaatgcttgaaccagcacagtggcagtacagatggagggagctgactacaataaaatcatcaggacttgttgattgacatgatataggaagtgagggacagggatgagtcaaggctgatccccctagatcctgactaaggaagctgggtggttgacagtgccattcacagagacagtgaattctggcataaacacctaataggtcaggctggtttacacctccatcattcccatgggagaaggtatagaggggtgtgtgtttgtgtgtgtgtgtgtgtgtgtaaaagaacacagaaagccagattcctctttttgacaccagaatattggttcccaccatagtcaaaaggatattcctgaggatcgaggcttggaaaaatattggggaaggataagaactccagttgttgctgctttttttggcagccagtgtaacctaggtaaggacttggttgaattaagaaatttcatgtccagatcaggatggatttttctatttctctgagctctggtgtgtttcccactcagattgcaggtcgtaggtacctacggtgtgaattgtgttgtgtttctgtgcttgtgcaagggagtagctaggttgctgggaggtctggatgagggtgggggtggggtgagatcaagtctccagctccaagaggtcccctggggctaagtgaaaagcttgctcttttgaaatggtcttcgttggtaattaacaaaagatcaagaataccttggtgtcagataaagggaatttgtaggcacaatgctgttggtagctgatctcaatcattcaaggaagctattaaatctatgaacattagcattctgccaggtaaagagatctggtccttagcacctcccagacacactgattctttactgttttgaaacatctccctctcctggcttcctccaccccgcttccatactgtccttgaaatcaatgaatggtaatttagtgtatctagtgtatcactagcaaatgtctgaataagaaaggtttggtttccgctgtgtctcctgttacaatgagaacatgtactgcataaatttaattggctacgttaatgtgtaagccttttctgcaaagagatggatccgtttctgaatattctgcagaagggcagagttttgagtatatggcagtggttctaattagcagttgctccaatacaatcagactgagacggaagctactcatttagaatactggttgatgacaacactggcttgaacaaagtgaccactctccaatggctactctccctctcagtgggccgcaggttgctagggctcaggctgtggctgttttccccgccgaaaaggggcggggtcagtcggtgtgttaggaaaaaaaatgtatatatatatatatgttgtctgcctccccacagagataacaacccgtggaaaaacatgccgttgagcgggaggaaggcgaaaagataggctgggttttttggggggtgggggagcgtggaggatagggtgggctttttcccctccaatgctgcgacgcattaaccctgctgctgttgggacgttctctgctcagcctattggctgagcccgggagccgctgtctgccaatcgggtggtgaaaggcagacaaatctaccccgccaccagcaaaaacggcgcgtaacccttgcggcgccggccgaaccgcgccagagctggcgcggggaaagggagataggtgtctccagctgctgtggctgtttggggcgggtcggcttcatccgcgtctcaggagcaagtagagaattagcgggcggcagcaatgctccgcaaggtgagaagctggacagaaatctggcggtgggctacccttttgttcctcttttaccacctgggttacgtttgtgggcagatccgctacccggtcccagaggagtcacaggaagggacttttgtagggaatgtcgctcaagatttcctgctggatacggacagtctgtcagctcgcaggctgcaggtcgctggagaggtgaaccaaagacacttccgtgtggatttggacagcggagccctgctcatcaagaacccaatcgaccgagaggcactgtgtgggctcagtgccagctgcatcgtgcccctggagtttgtcaccgaaggtcctttggaaatgtaccgagcagaggtagagatcgtagatgtgaatgatcacgccccccgttttccgcggcagcagctggacttggaaattggggaggcagctcctccaggacagcgtttcccgttggaaaaggctcaggatgcagatgtggggagcaattcgattagcagctataggctgagctccaatgaacactttgcactggatgtgaagaagcgcagcgacggcagcctggtcccagagctgctcctggagaagcctttggatcgagagaagcaatcggactaccgcctggtgctgactgctgtcgatggagggaacccgccgagatctggcaccgcagagctccgggtatccgtgctggacgtaaacgacaacgccccagccttccagcaatccagctacaggattagtgtgttggagagcgcaccagcgggcatggtgctcatccagctcaatgcctcagacccggacctgggtcccagtggtaacgtcaccttttatttcagtggtcatacccctgatcgtgtaagaaacctctttagcctgcaccccactactggaaagcttactcttttggggcccctagactttgagagtgagaattactatgaatttgatgtgcgggctcgcgatgggggttctccagccatggagcaacatt

SEQ ID NO: 10525 - DNA, 6000 bp, Homo sapiens
tgtgtaagccttttctgcaaagagatggatccgtttctgaatattctgcagaagggcagagttttgagtatatggcagtggttctaattagcagttgctccaatacaatcagactgagacggaagctactcatttagaatactggttgatgacaacactggcttgaacaaagtgaccactctccaatggctactctccctctcagtgggccgcaggttgctagggctcaggctgtggctgttttccccgccgaaaaggggcggggtcagtcggtgtgttaggaaaaaaaatgtatatatatatatatgttgtctgcctccccacagagataacaacccgtggaaaaacatgccgttgagcgggaggaaggcgaaaagataggctgggttttttggggggtgggggagcgtggaggatagggtgggctttttcccctccaatgctgcgacgcattaaccctgctgctgttgggacgttctctgctcagcctattggctgagcccgggagccgctgtctgccaatcgggtggtgaaaggcagacaaatctaccccgccaccagcaaaaacggcgcgtaacccttgcggcgccggccgaaccgcgccagagctggcgcggggaaagggagataggtgtctccagctgctgtggctgtttggggcgggtcggcttcatccgcgtctcaggagcaagtagagaattagcgggcggcagcaatgctccgcaaggtgagaagctggacagaaatctggcggtgggctacccttttgttcctcttttaccacctgggttacgtttgtgggcagatccgctacccggtcccagaggagtcacaggaagggacttttgtagggaatgtcgctcaagatttcctgctggatacggacagtctgtcagctcgcaggctgcaggtcgctggagaggtgaaccaaagacacttccgtgtggatttggacagcggagccctgctcatcaagaacccaatcgaccgagaggcactgtgtgggctcagtgccagctgcatcgtgcccctggagtttgtcaccgaaggtcctttggaaatgtaccgagcagaggtagagatcgtagatgtgaatgatcacgccccccgttttccgcggcagcagctggacttggaaattggggaggcagctcctccaggacagcgtttcccgttggaaaaggctcaggatgcagatgtggggagcaattcgattagcagctataggctgagctccaatgaacactttgcactggatgtgaagaagcgcagcgacggcagcctggtcccagagctgctcctggagaagcctttggatcgagagaagcaatcggactaccgcctggtgctgactgctgtcgatggagggaacccgccgagatctggcaccgcagagctccgggtatccgtgctggacgtaaacgacaacgccccagccttccagcaatccagctacaggattagtgtgttggagagcgcaccagcgggcatggtgctcatccagctcaatgcctcagacccggacctgggtcccagtggtaacgtcaccttttatttcagtggtcatacccctgatcgtgtaagaaacctctttagcctgcaccccactactggaaagcttactcttttggggcccctagactttgagagtgagaattactatgaatttgatgtgcgggctcgcgatgggggttctccagccatggagcaacattgcagccttcgagtggatctgctggacgtaaatgacaatgccccttacatcacagtgacctcagagcttggaaccctccccgagagtgcagaacctggcactgtggtggcacttatcagtgtgcaggatccagactcagggtcaaacggagatgtgagcctccgcattcctgaccacttgccatttgccctcaagtctgccttcaggaaccagttctccctggtgactgctggacccttggatcgagaggccaaatctagctatgacatcatggtcactgcttctgatgctgggaaccctcctctcagtacccacagaactattttcctcaatatttcagatgtgaatgataatccaccctctttctttcagaggtcacatgaggtgtttgttcctgagaacaatcgcccaggggacctgctttgctcccttgcagcctctgacccagactctggcttgaatgcgcttatctcctactcactcctggagcccaggaatcgagatgtatcagcttcctctttcatctctctgaacccccagacaggagctgttcatgctactcgatcctttgactatgagcaaacccagacactgcagtttgaggtgcaggcccgggatcggggcaacccaccccttagcagcactgtaacagttcgtctatttgtgctggacctcaatgacaatgctccagctgtgctccgtcctcgggcccggcctggttccttatgtccccaagcactgcctccatcagttggtgctggccacctaatcacaaaggtgactgctgtggacttggattcaggttacaatgcttgggtttcctatcagctcctggaggccccagatcccagcctgtttgcagtctctcgatatgctggggaggtgcggacggctgttcctatcccagctgacctcccaccacagaagctggtcattgtggtaaaggatagtggtagtccaccactctctacctctgttactctcttagtgtccttagaggaagacactcatccagttgtcccagatcttcgagaatcttcagctccaagggaaggagaatctcgtctaaccctctacttggctgtgtccctagtggcaatttgctttgtctcctttggctcattcgtggcactactctctaagtgtcttcgtggggcagcctgtggagtcacatgctttcctgctggcacctgtgcctgtctcaccagatctcgaaggagggaggggcttcccccttccaatgggatcctccgaatccagctagggtcagatgaccctatcaagtttgttgatgtgggaggccactctcatggctgtacacccttggcttctgcacccactcggagtgatagcttcatgatggtgaagtcacccagtgcacctatggcaggggagcctgttcgcccaagctgcccaccctctgatcttctctatgggctagaggtgagacctttgcaggctcaacaaatgcttgagggttattctgatccaggcatatggctaggccatgtcctagagagtactggcctctcagtaagtgcccatagtgatgtcaccatttttgtaagaggtaactatgtggtagacgctgtgctttgtaactgtttcgtgaattaaccagagttgtcacagtttagcattgggggcgggtcatgcctatatctgagtaagaaatgaaagtaattggtgatcaagagccaggctgttgtggaagcatgatgatggaatgtgggagcacaggaggctacagtgcacagggtacagtgcaccaggcagtcacttggacaaaggtggctgttttctctactcttcctgaaagaggggatcagattctgaagtaccttaactctaggttaccatttcccaagggattgaggggaaataaaatctttgtctcccagtatctagtacactgtgaagggacctctctatttgaaacatagagacagcagaaagaggagagaactaaaggaatagagaggcacgcatcagagtggtggcatagatcttttggtctgggtcttaggactcatatcaagtccctactggggatttgaactagatgcggtaaattggaaggttggggcgggttggtcatcacctttggaaaaaacagtaagtgaaatcacttatgtcagaaaactggtttacagttggctgattcatagaaacagccaccctgtgcatctttaagttgagttctcctgaatttggtgaaaccatgaaacctagaagccaagccatccatgcttggcctctgaccaccctcctgggtgacctgattcagccccagaaatgttcccctacccaaaaactgtaacactcattccacatttggggtctggggtgtcagaaaagctaagtcccatgtcagctgacattgagatttccgcaaagcattgctggagagtcagggcaagactttacaaggttcttactaatcttttctctcaccttagcagcattcagcaggatgggggagggtgggggaatacatgggctttgcctctcccagaaggacaagattttgctggttcaagcaaagtggtggaagcttctgaagtcatgcaggaagttgctgggacagaacgctgaggagttttgtatcactttgtcttccctgttgagtaccatctgagctgtcaaactttgctgccaagggggctgaatcaacctgcagcacgaagtgagtggggaggtaggaagcttctgtgacacagatttgcagcctgtgttcccaaggtttccaggattgaggaaactccataattggttgagagcacacagactttttggccaatcagactcagagctgaggtgggagatctgctcttccagcccgcctctcctcctccagctccccagctccactcaaattcagctcccctcccccctgcccacccccgccactcggtgactaagaactgctgcaagcaggcaaacctccgagcagtttttaagaggctggaaggagacataagagacttcagctgctgcattccaagccctgggtctaccttggagacaggacagcacagacttactctccacaaagggacttctgggtcatggggcccaagacactcccacagctcgctgggaaatggcaagtgctgtgcatgttgtccttgtgctgctggggctgggtgtctgggcagcttcgttactcagtggtggaggagtctgagccggggacgctggtggggaatgttgctcaggatctgggcttaaagatgacagatctgttgagccggcggctgcaattgggctctgaggagaatgggcgctatttttccctgagcttgatgagtggtgccctggcagtgaatcaaaagattgaccgagaaagcctatgtggagccagcaccagctgcctgctgccagtgcaggtggtgactgaacaccccctggagctaatccgtgtagaggtagagatcctggatctcaatgacaactctcctagctttgccacccctgagcgagagatgcgcatctcagaatcagcagcatctggggcacgattcccactggacagtgcccaggatccggatgtgggcaccaatactgtgagcttttacactctaagccccaacagccacttctctctgaatgtgaagaccctaaaagatgggaagccattcccagagctggtgctagagcagcagctggatcgtgaagcccaggcaagacatcagctggtgcttactgctgtggatggggggaccccagcccgctcagggaccacccttatctctgtcatcgtgctggacatcaatgataatgctccaaccttccaatcctcagttctacgtgtgggaatcccagagaatgcacccattggtactctgctgctccgcctcaatgccactgatccagacgagggcaccaacggccaactagactattcttttggagaccacacatctgaggcagtgcggaacctctttggcctagaccctagcagtggggcaatccatgtgttgggtcccatagactttgaggagtcacgtttctatgaaattcatgcaagagcccgtgaccagggacagcctgccatggagggccactgtgtgattcaagtggatgtgggggatgtcaatgacaatgccccagaggtgctattggcctctttggccaaccctgtcctagagagcacaccagtgggcacagtagtggggttgtttaatgtgcgagaccgggactcaggtagaaatggtgaagtgagccttgatatctctccggacctgccatttcagattaagccttctgagaaccactactcgctg

SEQ ID NO: 10526 - DNA, 6000 bp, Homo sapiens
gaccctgtgggaggccagggccgggcagattcgctattctgtgcgggaagagatcgacagaggctccttcgtaggcaacatcgccaaggacttgggtttggagcccctggcactggcagagcagggagtccgcatcgtctccagaggtaggtcccagctctttgctctgaacccgcgaagcggcagcttggtcactgcgaacaggatagaccgggaggagctctgcgctcagagcgcaccctgtctgttgaattttaacattctgctggaggataaattgactatttattcagtagaggtggaaataacagatattaacgataatgcccctcgctttggagtagaggaactggagctaaaaatcagtgaaaccactacgccaggattccggattcctcttaagaatgcgcatgatgcagacgtaggtgagaacgcccttcagaagtacgcactcaacccaaatgaccacttctccctggacgtgcgaaggggagctgatgggaacaagtacccagaactggtgctggagcgctctctggaccgcgaggaagaggctgttcaccacctcgttctcgtggcttctgatgggggtgacccagtgctatctggcacctcccgcatctgcgtgaaggtcctggatgcgaacgacaatgcgcctgtttttacacagcccgagtaccgcataagcattccggagaatacgctcgtgggcacccggatactcacggtgaccgccactgacgcagatgagggctactacgctcaagtggtatattttctagagaaaagccctggagaaacctcagaggtatttgagcttaagtcaacatctggagaactgacaatcataaaagatctagattatgaggatgctacattccatgaaattgatattgaagctcaggatggtccgggccttctaaccagagcgaaggttatcgtcacggttctggatgtgaatgacaatgccccagaattttacatgacatctgctactagctcagtttctgaagactctcttccaggaaccataattgggctttttaatgtacatgatagagactctgggcagaacgcattcaccacctgttcactccccgaggatcttccttttaagttagaaaagtcagtagacaattactaccgactggttacaaccagagcccttgacagggaacagttttccttttacaacatcactctaaccgctaaagatggagggaacccctccctgtccacggatgctcacattttgctccaggtggcagacatcaacgacaacgcacccgccttctcccgcacatcctactccacctacattcccgaaaacaaccccagaggagcctctgtcttctcagtgacggcccatgaccccgacagcaacgacaatgctcatgtaacttactctttcgcggaggacactgttcagggggcacccttatcctcttacatctctatcaactccgacactggagtactctatgcactgcgctcctttgattatgagcagttgcgagacttgcaagtgtgggtgatagcgcgggacagcgggaaccctccactcagtagcaatgtatcattaagcctgttcgtgctggaccagaacgacaacgcgcccgagatcctgtaccctgccttccccacagacggttccactggcgtggagctggcgccccgctccgcagagcccggctacctggtgaccaaggtggtggcggtggacagagactcgggccagaacgcctggctgtcttaccacctgctcaaggccagcgagccgggactcttctcggtgggtctgcacacgggcgaggtgcgcacggcgcgagccctgctggacagagacgcgctcaagcagagcctcgtggtggccatccaggaccacggccagccccctctctccgccactgtcacgctcaccgtggccgtggccgacaggatccccgacatcctggccgacctgggcagcctcgagccctccgccatacccaacgattcggacctcactctgtacctggtggtggcggtggccgcggtctcctgcgtcttcctggccttcgtcatcgtgttgctggcgcacaggctgcggcgctggcacaagtcacgcctgctgcaggcttcaggaggcagcttgacaggcatgcagagctcgcactttgtgggcgtggacggggttcgggctttcctgcagacctattcccacgaggtctccctcactgcggactcgcggaagagccacctgattttcccccagcccaactatgcggacacgctcatcagccaggagagctgtgagaaaaaggattttttatcagcgcctcaatctctactcgaagaagaaagagaagaaacgttttctcaggtaatctatcttttcacaacatacgtactagctagtttgctgaagtaattcacttacttgtttactatatctattttgttccccatatttccttgagggtagagtcaagttttaggaagtgagtcttggtgaattatttcttggtaggtcttagtgttcacaggctgtaagaggaagaagagacgtgagaatctttgtgcaatgaatgtaaaccaggagttaatagataagattatccaaagagcactgcattaggaactagggtgtctggtttcttatactttcttctccatccctgggcaaatcatctcatccacccagatcaacaattttttctttgttaaaaatataaagattggagtttatgtttactcaagtcctttcttcttttaagttatgactcttactctatatttgaatctgtatatgaacagtgaaacatgttagttggctagttctttctcattcagtcttaatacatttctttcagtttggcagcaaaattgttttccttaacttgcatgcccttccctgttaaaaatatggaaatttagaaatatacattccttacagtgtttcaggaaggtatgtcatattattttggcttagttttaaaaatcacattaacctctaagctatatgcttcttgaagaagtgactgacttatcatctgctctataataaagctgtagagtggtaataaacaggtttctcctttttttttatctttctcatacgtgggaaccatactgtattttaatctttaaaataatatatatcctcaatatagttttgcttaaagaaaagatacaaaagattcatatcatacaattgcccagaaccaacttctttatacatctctcttctcaaggtttctactcacaatagctgctagaaatgttcccaatccctcacccaatcccagtgcccctctgatcaattttcttttcccattcctcttcctatattggcttttagtatgttggttatgtatttaataacagagaataataagcacactaatgttctatgtaactggcatcattttttatttttatttgaaaattatcatgtaccaattgagccttttattgaatgataccatatttctcaaagtgctgtgattctttccgttgcatttgatcaagaaaaaattttctgagacaaggtgttgttttggttactattacataattgtctatgagtaaaattggaactcactgtggaataatatgtcataatagctttacttgtaagtgaataataaagtataaacaggaaaattaaagcaaagttatttttagtgtgtgtagtaactccacaagaataaatgtcttatgcatagatatgtaatgcatcatgattgaaacgacaaatatattgtatttatatttctgtgcttggaaacttatggggaaagagattctggaacataaaagcttatttctactagtttcagttggttttgaaaaaacatccttacagtctagatttaaacaaaggaaacttctttcagtaccctgaaggtctgtgatttctctctcacacctaggcattgtcatgctgttctctcccacatccaggccttttcactgatccactcctctcatgtttcctgggaaagcgtttgctaacattaaaggcccaattgaaggcccccctaacccccttggcttctcccattatggtaattatctcagtacactgcaattccctgtttgcttttatatccttataatctctgtgaaggaagctactgtgtctatattgttcaccttaaatccccaaacatattgtctgatgcctaattatgtgtttgtttaatgaatattaaataacaacaaatatcgaaactaagttatcaggtcaccaagaacaaacttaaagaaatataatgtataaatatggctgatttctgtgtgtttcttttctttttttccttgtctcagctcttagagagttaagagtatagagagggaaaggtcaaagaggaggtggatatcttatcaaataaccctgataaatgtagtaagtataagaataaacacattatcaaggttcagtggtggaagaacaagtggtggtcatgtcttttaatagttgtgttggtccttacggccagttctttgttactgtgtgtttcttaaactgaacaattcaaaaaagttaactccactatgtttgaagcaatattggtggcattaaggttagtgcatggattcccaagaaagataacttgaggtgacactgtttaacatatatcgattcaattatgttcaatcaacactagtcctcttatctctgacaagaaggatttcagatcttggataattcaaaaataataatgtgtctgagaggatgcagtaaacggttaggcctcttagtgtcgctgttgaccactcaagaaggagaacgcagctggagaactagtccaccatttccttgctcctaaaatgcaaagaaccagcaaatcagactcagaagatccggggcggctgccaacctcacctcttagtcaaccagctgtttgacctgtgaattaggcccgtaaaagacttcgtttcttgagaaaataagattggagtccgtcgtaggaaactggaaccgaattcagagaaagcgattcaccgaaaaggaaatgaccaattgcctgagtttccgaaatggcagaggactggccctgctgtgcgcgctcctggggacgctgtgcgaaacaggatccggtcagatccgctactcggtgtctgaggagctagataaaggttccttcgtgggcaacatcgctaacgacctggggctagagccccgggagctggcggagcgcggagtccgcatcgtctccagaggtaggacgcagcttttctctctgaatccgcaaagcggcagcttggtcaccgcggagaggatagaccgggaggagctctgcgctcagatcccgctgtgtctggtaaaaattaacattctggttgaggataaattgaaaatttttgaagtagaaatagaaattaaagatattaatgataatgctcctaatttcccaacagaggaattggaaataaaaattggtgaactaacggttcctggaacccgatttccaattaaaactgcttttgacccagatgtaggcattaactccctgcagaactacaagcttagccccaatgactacttctctctggctgtgaatagcgtctctgagggggccaagtatccagagctggtgctggagcgggccctggaccgtgagaaaaaagaaattcaccagcttgtcctggttgcctctgatggtggcgaccctgtccactctggcaacttgcacatccaagtgatagtcctggatgcaaatgacaacccaccaatgtttactcagcctgagtaccgtgtgagtgtttgggagaacgtgcctgtgggtacccggctgctcacggtgaatgccactgaccctgacgagggattcaatgctcaagtgtcttatattctagataaaatgcctgggaaaatcgctgagattttccatcttaactcagtgagtggagaagtatcaatattaaaaagtctagattatgaggatgccatgttctatgaaattaaaattgaagcacaggatggaccaggtcttctttcaagagccaagattc

SEQ ID NO: 10527 - DNA, 6000 bp, Homo sapiens
ccctgcatgtgattgacatcaatgacaacccacccaccttccctcatttatcctactccgcctacattccagaaaacaaccccagaggagcctccatcttctcagtgacagcccaggacccagatagcaacaacaacgcccgcatcacttatgcattgaccgaggacactctccagggggcgcccctgtcctccttcgtctctatcaactccaacactggcgtcctatacgcgctgagatccttcgactacgagcaatttagagacttaaagctactggtgacagccagcgacagcgggaaccctccactcagcagcaacgtgtcgctgaacctgttcgtgctggaccagaacgacaacgcgcccgagatcctgtaccccgccctccccacagacggttccactggcgtggagctggcgcctcgctccgcagagcccggctacctggtgaccaaggtggtggcggtggacagagactcgggccagaacgcctggctgtcctaccgcctgctcaaggccagcgagccgggactcttctcggtgggtctgcacacgggcgaggtgcgcacggcgcgagccctgctggacagagacgcgctcaagcagagcctcgtggtggccgtccaggaccacggccagccccctctctccgccactgtcacgctcaccgtggccgtggccgacaggatccccgacatcctggccgacctgggcagcctcgagccctccgccaaacccaacgattcggacctcactctgtacctggtggtggcggtggccgcggtctcctgcgtcttcctggccttcgtcatcgtgctgctggcgctcaggctgcggcgctggcacaagtcacgcctgctgcaggcttcgggaggcggcttggcgagtacgcccggctcgcactttgtgggcgcggacggggttcgggctttcctgcagacctattcccacgaggtctccctcactgcggactcgcggaagagccacctgattttcccccagcccaactatgcggacacgctcatcagccaggagagctgtgagaaaagcgagcctcttctgataactcaggatttacttgaaatgaaaggagattccaacctacttcaggtgagtttatttatttctttgattattaagaacaaatatgagaatgtggttattataaagctttaacacatatgtatttgagaaataaagccatgaggttgtcattagtcctttgactaaatatttgtccccctttctttctgggcctatagtaggactgcactccccggtctggttatggttgagtgggcttagggaaaaaataatacatcgtgagtgaaagtaaagtgtcacttcctagaggaatctgccactgtgagaattttcagatctctaagttactatttgaaattgtgactgctccttctacctgggtccttgagtaactatgatgagagaaacacaacactggtttgtatacctgtgataaataggcctttttcattttaaatccctgtgctttggagtttgtcattccaacctgtatagcttatcctgatacatacaagtaaaaatacatatgaataaaagatattttatgcccatgaaattaaatgatgtttgactccttccaagacaggtgacactctttttttctttctccttccttccttcctctctctttcctccttccttccttcctctctctctttcctccttccttccttccttcctctctctctttcctccttccttccttcctctctctctttcctccttccttccttcctctgtttctctctttctttctttctttctttctttctttctttctttctttcttgacagggtcttactctgtctggagtgcagtggcatgatcacggctcactgcagccttgacctcgcagactcaagtgatcctcccacctcagcctcccgagtagctgggactacaggcacgagccaccctcccagctaatttgtttttgtttttgtagagatggggcaattgctatgtttcccaggctggtctgaaattcctgagctcaagtgatctgcccacgtcagcctcccaaagtactgcgattagaggcatgagccaccatgcctggcctgttattcttttcatctcaataacataaaaattggagaacaaaaatgtagaggctgggtgcagtggctcatgctgtaatcccagcactttgggaggctgaggcaggtggatcacttgaagtcaggagttcaagaacaccctggccaacatggtgaaagcctgtctctactaaaaatacaaaaattagctgggcatggtggtgggcgcctgtaatccaagctacttgggaagctgaggcagaagaattgcttaaacccaggaggcagaagttgcagagagccaaaattgggccactgcactccagctggggcaatagagagagactccatctcaaaaaaaaaaaaaaagtagaggctggtcaaatggttttacctatagtgcctgttacatatgcctaatgtatatgcttatgtgtgtattcattttgatttcaacattttgcctgagggtggaaagctcacctagctaaattattatgagccttggagtggtatttcttgtccttgagaaggacatcaaaaacatgtaaaggaatatgtctcagcctctgcgggagatttccagacaatctcttccaacaatggaatagaagtcccttcttttgtcatgttctacaactttcttgagccagaaattgttggcttattctgcaatttatgaaattattttcactcatgaaatcatatgagagttatccaaaattagaccaaaatatgttttattagaactcaaacaaaagaatagattcctccctcaatatattaggaaaaggcacatttaaatgtatgagacaacagggccagaacacaaaagctgtaagcagagtaaggtgtattctcactgaaacatggaaatacatcacagaatttaaaaggcccatagccaggggaggacttctgagcctaggactttgagacctacttgggcaacatagcatgaccctgtctcaaaagaaaaaggcacgtaacttttaacatatcatttttagaaaaaaaaatgtttatagtattagtatcactttccctgtaaggagaaaaaaaattaattagctgtgtcaggggaaatttggatgctcaaagataatttctaagaattctatatgaaacatagcctacatatgtgtcatgaaaatacactgagagtatggaacccatacaattccacctacttgtacaggtaatggaaggtctcagacatcccattttcactaaaaaggatttatttttatttttttgaagaatgggcaagaatccactacaacagaaagggaggagaagttcatagtaaaaggaatggaaagtataaaggcatgatgcaaggaaacaagtgaaaaggtatcttaagaaaacagataataggctgtttcgaatagagtatgagtatgggtgagcactgcaaaatagtagaataaattgttgagttggatctcatttggtaatgcatttgaaataaagggatttgctttgaaccaagactggttctaagcctggaactacagaataagttccaaaattgggtgtctaagaactctgaatacctctccaatatttaccagtggtcaagtcaaactcgttttgctcattaatggtataagtcggctggagctgagaattggcattatagagaatgtttttgagacagagtcttgctctgtcacccaggatggacttcagtggcatgatctcaactcactgcaacctctgcctcctgagttaagtgattctgctgcctcaacctcccgagtagctggcgttacaggtacccgccaccatgcctggataatttttattttttttagtagagatggcttgcaccatgttggacaggctagtctcaaactcctgacctcatgtgttcttcccaccttggcctcccaaagtgctgggatcacaggtcactgcacccagcctagagtatttaatatacattcatataaaaaagaagcactggtttcataaaacaaatgtacattatatgagattccacttcataaaagcatgtatgtgtaccccaacactaaattggcccttttaacaaaatatcagactttgtcctacttaactggaaagattatctatattttataaagaagagaaataacataatagtaaggctgtgatttcctcttttttgcaaaaactatttttgaaaagtattactgaattgataacatatatatggagagatttaaaatactagataagggagcttattccaatgaatttacagaaaggtaggtattttagtcaactaaaaatataaataaaaattatcaattcacttatttggatacagcagtcatgccagagtttataaatatagtgaaatcactgaagatttttttttacccccaaaactgaaaaaaatggcagtgtaccttgtgaattttttaaatgaaaaaagaatacgaaatgatgaaggcccttatctgatgatgacaaactagaaaactgaaatgtaaaggggaaaatgtgagtatgtgtttccctccagcaaattaaagacagggtacatagattcaagaggttgcgctttgaggataaaaagctgggccctgtgcagttttccaagacaacctctgggcgccgctgtcgaccaaaaggaagtgaaggcttctcaattctgcaggagcgtcaggcagggtgccttcctgctttgtccggtgcactgagcacagacgctgctcctgttcaccctcgagcgcctaactaataagtcctaagctcaaatcacagaagtccagggtgctgccatttctttttgaaaaacatcccagaggaaagaagctccgcggagagttcctgaaatgcagagagccagagaagccgaaatgatgaaaagtcaggtactgtttcccttcctgctgtctttgttctgcggggccatctcccagcagatccgatacacgattccagaggagctagccaacggctcacgggtggggaaacttgccaaggatctggggctcagtgtccgggagttgccaactcgaaaactgcgggttagtgcagaggattatttcaacgttagtttggagagcggggatttgttagtgaacggtaggatagatcgagagaagatttgcggaaggaaacttgagtgtgcactagaattcgaaacggtcgctgaaaacccaatgaatgttttccacgtggttgttgtaatccaagatattaatgacaatgcaccacgtttcgttgcaaaaggcattgacttagaaatttgtgagtcagccttacccggggtaaaattctctctggattctgctcaagatgcagatgtggaaggcaattcactgaagttatacaccatcaaccccaatcaatacttctctctgtcaacgaaggaaagtcctgatggaagtaaatatccggtattactgctggaaaaacctctagacagggaacatcagagctctcatcgcttaatcctgactgccatggatggcggggacccgcctctaagcggcaccacccatatctggatccgagttacggatgccaatgataatgctcccgtgtttagccaggaggtatacagggttagcctccaagaaaacgtaccgtggggaacctccgtgctgcgggtgatggccacagaccaggatgagggcattaatgcagagatcacctatgccttcctcaattccccaataagtaccagcctcttcaatctcaatccaaatactggcgacatcacaaccaatggcacattggattttgaagagacaagtagatatgtgttgagtgtggaagctaaggatggaggagtacacacagctcactgtaatgttcaaatagaaattgttgacgagaatgacaatgccccagaggtgacattcatgtccttctctaaccagattccagaggattcagaccttggaactgtaatagc

SEQ ID NO: 10528 - DNA, 6000 bp, Homo sapiens
gctgccatttctttttgaaaaacatcccagaggaaagaagctccgcggagagttcctgaaatgcagagagccagagaagccgaaatgatgaaaagtcaggtactgtttcccttcctgctgtctttgttctgcggggccatctcccagcagatccgatacacgattccagaggagctagccaacggctcacgggtggggaaacttgccaaggatctggggctcagtgtccgggagttgccaactcgaaaactgcgggttagtgcagaggattatttcaacgttagtttggagagcggggatttgttagtgaacggtaggatagatcgagagaagatttgcggaaggaaacttgagtgtgcactagaattcgaaacggtcgctgaaaacccaatgaatgttttccacgtggttgttgtaatccaagatattaatgacaatgcaccacgtttcgttgcaaaaggcattgacttagaaatttgtgagtcagccttacccggggtaaaattctctctggattctgctcaagatgcagatgtggaaggcaattcactgaagttatacaccatcaaccccaatcaatacttctctctgtcaacgaaggaaagtcctgatggaagtaaatatccggtattactgctggaaaaacctctagacagggaacatcagagctctcatcgcttaatcctgactgccatggatggcggggacccgcctctaagcggcaccacccatatctggatccgagttacggatgccaatgataatgctcccgtgtttagccaggaggtatacagggttagcctccaagaaaacgtaccgtggggaacctccgtgctgcgggtgatggccacagaccaggatgagggcattaatgcagagatcacctatgccttcctcaattccccaataagtaccagcctcttcaatctcaatccaaatactggcgacatcacaaccaatggcacattggattttgaagagacaagtagatatgtgttgagtgtggaagctaaggatggaggagtacacacagctcactgtaatgttcaaatagaaattgttgacgagaatgacaatgccccagaggtgacattcatgtccttctctaaccagattccagaggattcagaccttggaactgtaatagccctcataaaagtgcgagacaaggattctgggcaaaatggcatggtgacatgctatactcaggaagaagttcctttcaaattagaatccacctcgaagaattattacaagctggtgattgctggagccctaaaccgggagcagacagcagactacaacgtcacaatcatagccaccgacaagggcaaaccagccctttcctccaggacaagcatcaccctgcacatctccgacatcaacgacaatgcacctgttttccatcaggcctcctatgtggtccacgtgtctgagaacaacccacctggcgcctccattgcacaagtaagcgcctccgacccggatttgggacccaacggcagagtctcctactctattctggccagtgacctggagccgcgggagctgttgtcctacgtgtccgtgagcccgcagagcggggtggtgttcgcgcagcgcgccttcgaccacgagcagctgcgcgccttcgagctcacactgcaggccagggaccagggctcccccgcgctcagcgccaacgtgagcctgcgcgtgttggtgggcgacctcaatgacaatgcgccacgggtgctgtaccccgcgctggggcctgatggctccgccctcttcgatatggtgccacgcgccgcagagcccggctacctggtgaccaaggtggtggcggtggacgcagactcaggacacaacgcttggctgtcctaccacgtgctgcaggccagcgagcccgggctcttcagcctggggttgcgcacgggtgaggtgcgcacagcgcgtgccttgggcgacagggacgcggcccgccagcgcctgctggtcgctgtgcgtgatggaggacagccgccactctccgccaccgccacgctgcacctaatcttcgcggatagcctgcaagaggtattgccagacctcagcgaccgccctgagccctctgacccccagacggaactgcagttttacctggttgtggccttggccttgatctcagtgctctttctcctcgcggtgattctagcgatcgccctgcgcctgcgacgttcctccagcctcgacactgagggctgctttcaaaccggtctctgctccaagtctgggcccggggttcctcccaaccacagcgaggggactttgccctattcctacaatctatgtattgcctctcattctgcaaagacagagtttaattctctcaacctgacaccggaaatggctccccctcaggatctgctgtgtgatgatccttctatggttgtatgtgccagtaatgaagatcacaaaatcgcttatgacccttctttgtcttcgcacgtgagtttctgcaaatctagttaaattttatatatggcggccgggcgcggtggctcaagcctgtaatcccagcacttaaccaggctgaggcaggtggatcacttgaggtcaggagtttgagaccagcatagccaagatggtaaaacccggtctactaaaattacaaaaattagttgggtgtggtggcacgcgcctgtagtcccagttactcaggaagctgagacaggaggatcgcttgagcccgggaggtggagattgtagtgagccaagagtgtgccactgcactccagcctgggtgatgggagggaaactgtctaaaaaaacaaacaaacaaaaattatatattgcattttcttctcattggtgtataagtaattttgattttctttcattgttctagtgatggtatctactgcgggagggggtactagatagatggagattgctttcttgattgctcagtagtcttggcaatttaattttcaatctttactgttggcatttctgtatggttggcaaatcttgctaaagagacctgtttcctagatgttaacacttagtaatagcagtgccttttcttagttgatatgcaatactatattttcaagtcattttattcttagctctttataaatgtatttagagttcttcccacccaagttaaagttcatcaattacattaattatgtaattgatgtaattatgtattaatgtaattatgtaattaatgtaatcttcatcaattacattctagtttgtctttttgcagcaacatgtatgtttaatacagccttccaattattaagactcttaacactttgtctcatcacaagtagcaaatattgtccaattttatatttgcatcactaactttgagtcaatattattcccactctataatttcagtcaatgatatttcataattttcttaaccattcctaaattatttgtttttatgctctttctattttgtctctattaaaacaaagaatgtaatgaacatttgggtttataaagcgttttccatacttcttgtttctttagtgtagatttctgaggaattagttaaatctataaacatgttgagatttttttaatgcatactgtcaaatttatttccaaacatcttatttcacctctcaatcatccgcagtttgtgcggtctttgaggattgtgaaaaacacgtttaatctactctctcaaagtctgagggtttttaaattctgtatagctaatgcccttttgtatgagtcatttctactgctaattgttaagtgaggaataagcttaagaactgatgtactgctttatctcaaattttcacagattagtaaattactgtaagtattcataagaaagaaagcgatggcacatgcaatgataatccatgttcggctaccaaaacatttccttttactggctatttctaaaatgagagctaaagtaaagttagaaattgtaaaataatactgaatgtgtcatgtgaaaaaatcactaaactattatctgcactttatagttattcagtctaacttttctttttatttcttttttatttttaagatcagagttatttacccattgttttaggctttgcatttgaactggtcattcatgaaacattgaaaggtttcataaaaattactactctatgaaaggtattgttctaaagattgagaacacattgtgaacaagatagtcatatgcatagcttgtggccaagaatctactgtacacaaaattaaggagcaaattctcttcccaaacctattatcctatttgtcaatctcatttgtacagggtaaggctaactcttgaacagtaggtgagttttttgcaagggaattgaagcattgccccaggttctagagggtcaactcctgtgaggaaacttgttactgcataaattgggactaaagccagacctccaagttcctgtcccactgtcttttcacttatctgtctcatccatttttcaagtccacctttgtctttaggagagataattatgtccctcacacaatacgctatactgagaatgggctgtggggatgaacaatgtgaaaactgaaaagaggaagaacacatcttaggaaaaaaatcgtcatattttctctaagaaaataaataacttcataaagtttattgtacaggaagacttggatcattcttgaattttcattgcaaatcaaaaacaggaatttgactttattatcttgggagaaataggaatagaaaagtgtataaaaaataaactttttttaaccaagaataaattgcagtaacaggttaagactctgggtgtcgctgttcaccaatcagggggaaaagacaaaccagaaatttaatcagaatcacaagatttctgcagcacaaagcactggctctggagctttatgaaagcttcaagcggaagccctgagagctctggctgtgaatgcactttattttggacccagaagatcctggggctcctcaggcctcgacagagggaaaaccgaagcacaggcgactccgcggcggggttgtaatggcggcgcctcctgctcgcccagaccacacccggctgctccagatctgccttctcctgggggttctggtggaaatcagggccgaacagattctctactcggtgtttgaggagcaggaagaaggctcagtggtgggcaacatcgccaaggacctggggttggcgccccgggagctggcggagcgcggagtccgcatcgtctccagaggtaggacgcagcttttcgccctgaacccgcgcagcggcaccttggtcaccgcgggtaggatagacagggaggagctctgcgacagatctccaaactgtgtgacaaacctggagattcttctagaagatacagtgaagattttgcgggtagaggtggaaataatcgatgttaatgataacccacccagttttgggacagaacagagggaaataaaagttgctgaaaatgaaaatcctggggcaagatttcctcttcctgaagcttttgatccggatgtaggtgtaaactccctgcagggttaccagctcaactcaaacggttacttttccctggacgtgcaaagtggggccgatgggattaagtacccagagctggtgctggaacgcgctctagatcgcgaggaagaggcggttcaccacctcgttctcacggccttcgatggaggtgacccggttcgctctggcactgccaggattctcataatacttgtggataccaacgataatgctcccgtgttcactcagcccgagtaccacgtaagtgttcgtgagaacgttcctgtaggcactcggctactcaccgtaaaagccactgatccagatgaaggagccaatggagacgtgacgtattctttccggaaagtaagagacaaaatatcacagctatttcagttgaattctctgagtggggatataacaatattggggggtctagattatgaggactctggattctatgacatagatgtagaagcccatgatgggcctggtctccgagctagaagcaaggtac

SEQ ID NO: 10529 - DNA, 6000 bp, Homo sapiens
tgggggttctggtggaaatcagggccgaacagattctctactcggtgtttgaggagcaggaagaaggctcagtggtgggcaacatcgccaaggacctggggttggcgccccgggagctggcggagcgcggagtccgcatcgtctccagaggtaggacgcagcttttcgccctgaacccgcgcagcggcaccttggtcaccgcgggtaggatagacagggaggagctctgcgacagatctccaaactgtgtgacaaacctggagattcttctagaagatacagtgaagattttgcgggtagaggtggaaataatcgatgttaatgataacccacccagttttgggacagaacagagggaaataaaagttgctgaaaatgaaaatcctggggcaagatttcctcttcctgaagcttttgatccggatgtaggtgtaaactccctgcagggttaccagctcaactcaaacggttacttttccctggacgtgcaaagtggggccgatgggattaagtacccagagctggtgctggaacgcgctctagatcgcgaggaagaggcggttcaccacctcgttctcacggccttcgatggaggtgacccggttcgctctggcactgccaggattctcataatacttgtggataccaacgataatgctcccgtgttcactcagcccgagtaccacgtaagtgttcgtgagaacgttcctgtaggcactcggctactcaccgtaaaagccactgatccagatgaaggagccaatggagacgtgacgtattctttccggaaagtaagagacaaaatatcacagctatttcagttgaattctctgagtggggatataacaatattggggggtctagattatgaggactctggattctatgacatagatgtagaagcccatgatgggcctggtctccgagctagaagcaaggtactggtgacagttctggatgaaaatgacaacgcaccagaagtcacagttacatctctcaccagctcagtccaggaatcttcttccccgggtacagtaattgcacttttcaacgtgcatgacagtgactcaggaggaaatggcctagtcacatgttctattccagataatctgccattcacacttgaaaagacctatggaaattattatcggttgttgacacacagaacactggacagggaagaagtctcagaatataacatcactgtaactgccactgaccagggaactcctccactgtctacagaaactcatatttcactgcaagtgatggacatcaatgacaacccacccactttccctcatgcttcctactctgcttacattcctgaaaacaaccccagaggagcctccatcttatctatgactgctcaagaccctgacagtggtgacaatgcccgaatcacttactccctggccgaagacaccttccagggtgcacctctgtcctcctatgtctccatcaactccaatacagggatcctatatgctctttgctccttcgactatgagcagtttagagacctgcagctgctgatgacagccagtgacagtggagaccctccactcagcagcaatgtgtcactgagcctctttgtgctggaccagaacgacaatgtccctgagatcctgtaccccaccttccctactgatggctccactggtgtggagctggcaccccgctccgcagattccggctacctggtgaccaaagtggtggcagtggacagagactcaggtcagaatgcctggctgtcctacagcctactcaagtccagcgagccgggactatttgcagtggggctgcacacaggcgaggtgcgcaccgcacgggccctgctggacagagacgcgctcaagcagaggcttgtagtggtcgtccaggaccatggccagccccctctctcggccaccgtcacactcactgtggctgtggccgacagcatcccagatgtcctggctgacttgggcagcctcaagccttcagcagacccagacgactcgggcctcacactctatctcgtggtggcagtggccgctgtctcctgcgtcttcctggcttttgtcacggtgctgctagcactcaagctgagacgctggcacaagtcacgcctgcttcacgctgaaggcagcaggttggcaggtgtgcctgcctcgcactttgtgggcgtggacggggttcgggctttcctgcagacctattcccacgaggtctccctcaccgcggactcgcggaagagtcacctgatcttctcccaacccagctatgcagacacgctcatcagccgggagagttgtgagaaaagcgagcctcttctgataactcaggatttacttgaaacaaaaggagaccctaatcttcaggtgagtcaatcttataatagatcataccacactgaaatatagacaaagagttgtgtaaatgtctctcattttatatgtaatatatcaaataaagttgcctcttttaatattttattgctttaaagaaaactggtggatgaccttccaataatgatcaacagtatttaccacacaaaaatgttgtttattacttatcctttttggtcttcattcagttgtagtttcagccagaattttctaattttacaactctgagccacctcatttccttaaatttccttttctgtgctgggtgtggtggctcacacctgtaatcctaacactttgggagtgtgaggaggacggattgcctgagctcaggagttcgagaccagtctgggcaacatggtgaaacccagtctctactaaaatacaaaaagttagctaggcgtggtggtgtgtgcccgtagtcccagctaccctggaggctgaggcatgagaattgcttgaacctgggaggcagaggttgcaatgagctgagatcatgacactgtactccagcctgggcaacagagcaagcctctgtctccaaaaagtaaaataaaataaagtaaaataaagaataaatttccttttctcttaggtgttcctgaaaagatacaagagacctgtaaaatagaaggcaattgtgtaaattcacatttacaatattctttctcatgaagctattgttggatctggactgagggttttttaatttcctattttcacactctaccatgctttgcttgaagtttacttttccttccttgaaagggtattttccattataacaggcaacgtcaatttaagaatactggcaatttgtgagtttaacttttagatataactttaacaggatattttctcaatgaactggtatatttcaaatattttcttgttgctgttctgagatgcaccagaagtgactatgtgtgattcctctggtgcactcctgtgattatgagaaatatttccaagctaatttcagtcatatataagtagattctaggagtaactttaataatttttaaattgcttatcatgacatcactattgagactttcttgatttccaaggaaaatataagtttttggagtcttttctcttgtcatcatgtgagcctctttcaaaggttgagttacttgggttctggactgatatgatttacgctgcttagtaaggtggcctcatccctattgctacaaattgctttcagatatttctgtcatcatgtggctctgggattattttatatgagggaaaatattttgtgtgtaggggatatacaacacttttgttctttgtgctttcatttaggttctgtgagaattcaaaattcatgaatgcatatgcttacacaaattagtgtaatttgataactggaagttgtagtgatagactgtggaatatgcctcaatttgacttacaaaggagagttttagtttctacatggttttgtattcatagaaagttgtggtgcaatacatagagtaagctggaatatgatatgatgcagttacctggcttggggagcagaaagcagaaataacaagtgaatgttgagagacaacttacatctgaggagagattgtttaaagtaattaagccataaaatataatttggaaatgctcaattggtctgaaactgtgtcaagcatattcaggtgttggcattaggaatatattccagaatgagagtgccacatgttttaaaggcctaggaaagcagtagataatttataacctaaaatcaaattttttaaaaaatgtgtttttgttagaatgggcagtgggtttcttttagcaaataacaattttgattaaacaaattgttgtatattcatattacggactactagataactatattatgggccactagataactataagaaataaataggaaagctctctatgtactgatatgatctttaagatataacaactaaaaaagcaatgtgcagaatatggtatgttgtatgcttacatttgtgtaaagaaggagacagaatatttataaaaatccgttgccctatacaagacatatctccggaaggatacctaagaaactttaacactcatttcccctgtgaaagcatttctcctcatctaaagcagagatgaaaggaagaacctatgctgaatgcatcttttgaatttggaactatatgaatatttcacatattttaaaacaaatgaagactttataaattaaaaaagaaaagaaaagaaaaaagttcttagcaaatattgacaagccattagtgcagtttcctgagaaaacctctgagcgtcgctgttggtcaaaagaacgaagagaagcgtttgggagcctcttagaggggaacttcctgcacaaaccaaccacacagagaaggccagtatagattcggaaacagaaaacaaaagcaggaaaagtgaccttagcccggattctgccatccccggaaggcttattcctcctatgggcaaaggagcaaagggagccagaagatgaaagcgagctcagggaggtgcgggctggtgcggtggctgcaggtactgttgcccttcctgttgtctttgttccccggggctctcccagtccagatccgctattcaattccagaggagctggccaaaaactcggtcgtaggaaacctcgccaaggatctggggctcagcgtccgggacttgccagcccggaagctgcgggttagcgcggagaaggaatatttcacagtaaacccagaaagcggagacttacttgtgagtgacagaatagaccgagaacagatatgcgggaagcagcctctgtgtgttctggatttcgatactgtcgctgaaaatccactaaatattttctacatagcagtaattgtgcaggatataaatgataataccccgctattcaaacagactaagattaatttaaaaattggcgaatccactaagccaggtacaacatttccacttgacccagccctggattcagatgttggtcctaactcactacaaagataccaccttaatgacaacgagtactttgatctcgctgagaaacagactccagatggtcgtaaatatcctgagttgattctaaaacactctctggacagagaagagcacagtttacatcaattggtcctcacagctgtggatggcggagacccacctcaaagtggcacgacccaaatccgaatcaaagtcacggatgccaacgataaccctccagtgttcagccaggacgtgtacagggtcaccctgagggaggacgtgccgccgggcttctttgtgcttcaagtgacagccaccgaccgggatgaaggcataaacgcagagatcacctactcctttcataatgtggacgaacaagtgaaacactttttcaacttaaatgaaaaaacaggagaaatcacgacaaaggatgatttggattttgagattgcaagtagttacactctgagtatcgaagcaaaagatcctggagatctagcagcccactgcagtatccaagttgaaattcttgatgacaacgattgtgcacctgaagttattgtgacttcagtatctactcccctaccggaggattcgccaccaggaacagtgatcgccttgataaaaacgagagacagag

SEQ ID NO: 10530 - DNA, 6000 bp, Homo sapiens
agaatgagagtgccacatgttttaaaggcctaggaaagcagtagataatttataacctaaaatcaaattttttaaaaaatgtgtttttgttagaatgggcagtgggtttcttttagcaaataacaattttgattaaacaaattgttgtatattcatattacggactactagataactatattatgggccactagataactataagaaataaataggaaagctctctatgtactgatatgatctttaagatataacaactaaaaaagcaatgtgcagaatatggtatgttgtatgcttacatttgtgtaaagaaggagacagaatatttataaaaatccgttgccctatacaagacatatctccggaaggatacctaagaaactttaacactcatttcccctgtgaaagcatttctcctcatctaaagcagagatgaaaggaagaacctatgctgaatgcatcttttgaatttggaactatatgaatatttcacatattttaaaacaaatgaagactttataaattaaaaaagaaaagaaaagaaaaaagttcttagcaaatattgacaagccattagtgcagtttcctgagaaaacctctgagcgtcgctgttggtcaaaagaacgaagagaagcgtttgggagcctcttagaggggaacttcctgcacaaaccaaccacacagagaaggccagtatagattcggaaacagaaaacaaaagcaggaaaagtgaccttagcccggattctgccatccccggaaggcttattcctcctatgggcaaaggagcaaagggagccagaagatgaaagcgagctcagggaggtgcgggctggtgcggtggctgcaggtactgttgcccttcctgttgtctttgttccccggggctctcccagtccagatccgctattcaattccagaggagctggccaaaaactcggtcgtaggaaacctcgccaaggatctggggctcagcgtccgggacttgccagcccggaagctgcgggttagcgcggagaaggaatatttcacagtaaacccagaaagcggagacttacttgtgagtgacagaatagaccgagaacagatatgcgggaagcagcctctgtgtgttctggatttcgatactgtcgctgaaaatccactaaatattttctacatagcagtaattgtgcaggatataaatgataataccccgctattcaaacagactaagattaatttaaaaattggcgaatccactaagccaggtacaacatttccacttgacccagccctggattcagatgttggtcctaactcactacaaagataccaccttaatgacaacgagtactttgatctcgctgagaaacagactccagatggtcgtaaatatcctgagttgattctaaaacactctctggacagagaagagcacagtttacatcaattggtcctcacagctgtggatggcggagacccacctcaaagtggcacgacccaaatccgaatcaaagtcacggatgccaacgataaccctccagtgttcagccaggacgtgtacagggtcaccctgagggaggacgtgccgccgggcttctttgtgcttcaagtgacagccaccgaccgggatgaaggcataaacgcagagatcacctactcctttcataatgtggacgaacaagtgaaacactttttcaacttaaatgaaaaaacaggagaaatcacgacaaaggatgatttggattttgagattgcaagtagttacactctgagtatcgaagcaaaagatcctggagatctagcagcccactgcagtatccaagttgaaattcttgatgacaacgattgtgcacctgaagttattgtgacttcagtatctactcccctaccggaggattcgccaccaggaacagtgatcgccttgataaaaacgagagacagagactctggagaaaatggagaagtttactgccaagtgttgggaaatgccaagtttattttgaaatcttcctcaaagaactattacaaactagtgacagacggcgctctggaccgggaggagatcccagaatacaatctcaccatcacagccaccgacgggggcaagccgcccctctcctccagcataattgtcaccctgcacatctccgacgtcaacgataatgccccagttttccaacagacttcctacatggttcacgtggcagagaacaatcctcctggcgcctctatcgctcaaatcagtgcctctgaccctgacttgggccccagtggccaagtttcctactccatcgtagcgagcgacctgaagccgcgggagattttatcctacgtgtccgtgagcgcgcagagcggggtggtgttcgcgcagcgcgccttcgatcatgagcagctgcgcgccttcgagctcacactgcaggcccgcgaccagggctcgcccgcgctcagcgccaacgtgagcctgcgcgtgttagtgggcgacctcaatgacaatgcgccacgggtgctgtaccccgcgctggggcctgatggctccgccctcttcgatatggtgccacgcgccgcagagcccggctacctggtgaccaaggtggtggcggtggacgcagactcaggacacaacgcttggctgtcctaccacgtgctgcaggccagcgagcccgggctcttcagcctggggttgcgcacgggtgaggtgcgcacagcgcgtgccttgggcgacagggacgcggcccgccagcgcctgctggtcgctgtgcgtgatggaggacagccgccactctccgctacggccacgctgcacctaatcttcgcggatagcctgcaagaggtattgccagacctcagcgaccgccgggagccctctgacccccaggcaaaactgcagttttacctggttgtggccttggccttgatctcagtgctcttcttcctcgcggtgattctggcaatctccctgcgcctgcgactctcttccaggtcagatgcttgggactgttttcagcctggtctcagctccaagcctggacctggggttctccccaattacagtgagggtacattgccctattcctacaacctgtgtgttgcctcacaatcagccaagacagagttcaattttctgaacataaccccggaattggttcccgcgcaagatctcgtctgtgacaatgcctcttgggaacaaaatacaaatcatggagccgctggggtcccttttgcctcagatactattttgaaggtgagctttaattaatttattttcacttctggttttattgtttcacctaatttgggtaggaagttccactgcgtatttctttgtctgtgagttagatttggccaatgttgtgccttaattgtcttaatcttatctaactgaattttaagtgttttctctctgaagtgtgagatttatttacccatgattgcaaacctttatcacatgagatattgcactgtatttctttttcttcctcatctttacattacttctctctgcagatttgttgctattgagactttaggcaattagtttcaccttcaggctctttgttattcaaattttagttttacttcctcttagaatcataatacttcagagtaaagagagtcttcattttagtaggctttggaaattgggaaacaaagaagaaagacttttgcataatggcatggcttgttaatcacagggcatgggtaggacattgtcccattgacttgaagaccaacactcagtaagctaaatgtcttggaatcacaaatgtatttctaaaggacaggcaatgtttgaggtctgaggtgtctgctagaaagagtgcatttaacaaatgtgagaaatcattctctaacatgcattttaacaaattgctcttaagaaaaactacacattgagaaaaatcttacaacctatgttcacatcattttctacaaaatattacttaaaactttgcttttgaatttcctaattatatagaatttttattttcttagttttctatgaaagtgttattaaataaaatgactttctgaaatgtccatttttttcaatcaagaggtttttctatttctgttgtcatataaagatgatagcagtaaatatctgtctcaacatagaaaggtcactcagtacttctcgacaagtatctgctcatgctttcctgcatggatgatgaaataaaaccccatcctccacagttactatactggttgtcactggaactacaaatatttgaacatggtaatagaaaaacataaaaatgcatagttaacccaactcaaacgctgtctgagatagtggagagactttctcaaagtcctcacaagtaacaaagatctttatttcttctgcatatgacagctaatataacttacataaatcagtaggcctgtttggaaaggtgcatggagaactgggtttgtttccttggtattcttatatgcaaataagcacgttttcctaaatttatcctaataaggagatgaaatcttgaatcctacaaaggtaagaatttgaatgtcctaatttaatggactaaatatagataagaggtaaataaaggacataggctcccccgatgacgcattaaataaaatttttgtaaggtattgagatctaataatcatattgatctcagggattgtggaagtcttgctattcagaattaaagctgaattaacggtcataaacaacgctacacagttaaacattaaggatatggcaacattattagaaataaaattataactaaacttaggagaaataaaaatggaatttgatgcagtcactggttaggactctgagtgtcgctgttgaccaaagtgggaaagaagctgccgcagaggcgacccgactctgctccctccatactaaacacacagaccagacaagctcctacgaaaagccaacgctccacgcccattttcgtcagggaatatgtacccatcggctttagataaataaggaaacagcaggctgaaccagaactaagagaaaattgggcagagagaaggcaatggcgagtccacctaggggctggggctgcggagagctgctgctgcccttcatgctcctggggacgctgtgcgagccaggatccgggcagatccgctactcgatgccggaggagctggacaaaggctccttcgtcggcaacatagccaaggaccttgggctggagccccaggagctggcggagcgcggagtccgcatcgtctccagaggtaggacgcagctttttgccctgaacccgcgaagcggcagcttggtcaccgcgggcaggatagaccgggaggagctctgcgctcagagcccactgtgtgtggtgaactttaacatcttggttgagaacaaaatgaaaatttatggagtagaagtagaaataatcgatattaatgataacttcccgcgtttccgggatgaagagttaaaagtaaaagttaatgaaaatgcggctgcagggacacggttagtgcttcccttcgcgcgggatgcggatgtgggtgtgaactctctccggagttaccagctcagctccaatctgcacttctctctggatgtggtaagcggaactgatggacaaaagtatccggagctggtgttggaacagcccctagaccgcgagaaagagactgttcacgacctcctcctcacagctttagatggcggagacccggtactctccggcaccacgcacatccgtgttacggtcctcgacgcaaacgacaatgcgcccctgttcaccccatccgagtacagcgtgagtgttccagagaacatacctgtgggcactcggctgctcatgctaaccgccacggatccagatgagggaataaacgggaaattgacctactcttttcgcaatgaagaagaaaaaatttcggagactttccaacttgattccaacctgggggaaatctcaactctacaatcactggactatgaagaatccagattctacctcatggaagtggtagctcaggatggaggcgctcttgttgccagcgctaaggtgg

SEQ ID NO: 10531 - DNA, 6000 bp, Homo sapiens
gatctctgaagactgtcttcccggaactgtaatcgcgctgtttagcgtacatgatggtgattctggagaaaatggtgagattgcatgctctattcctaggaatttgccttttaaattggagaagtcagttgataattactatcacctattaacaactagggacctggacagagaagagacttcagattataatatcactttaaccgtcatggaccatggaaccccgcccctctctacagaaagccacatccccttgaaagtagcagacgttaatgacaacccacccaatttccctcaagcctcctactccacctctgtcacagaaaacaatcccagaggtgtctctatcttctctgtgacagcccatgaccccgacagcggcgacaacgctcgagtcacctactccctggctgaagacacatttcagggggcgcccttgtcctcctatgtatccattaactctgacaccggtgtcctgtatgctctgagatccttcgactatgagcagttgagagacctacagttgtgggtgacagccagcgacagtgggaaccctccacttagcagcaacgtgtcgctgagcctgtttgtgctggaccagaacgacaatacgcctgagatcctgtaccccgccctccccacagacggttccacgggcgtggagctggcgcctcgctccgcagaacctggctacctggtgaccaaggtggtagcggtggacaaagattcaggccagaacgcctggctgtcctaccgcctgcttaaggccagcgagccaggactctttgcggttgggctgcacacgggcgaggtgcgcacagcgcgagccctgctggacagagacgcgctcaagcagagcctcgtggtggccgtcgaagaccatggccagccccctctgtcagccaccttcacggtcaccgttgccgtggccgacaggatccctgacatcctggctgacctaggcagtatcaagacccccattgaccctgaggatctggacctcacactctatcttgtggtggcagtggctgcagtctcctgcgtcttcctggccttcgtcatcgtgctgctggtgctcagactgaggcgctggcacaagtcacgcctgcttcaggctgaaggcagcaggttggcgggtgtgcccgcctcgcactttgtgggcgtggatggggttcgggctttcctgcagacctattcccacgaggtctccctcaccgcggactcgaggaagagtcacctgatctttccccagcccaactacgcagacacgctccttagtgaagagagctgtgagaaaagcgagcctcttctgatgtctgataaggtagatgcaaacaaagaagaacggcgagttcaggttagttttctctttcggtaaggatgaccagaacattttcatttgtttcctttttcatgtttctgtcatattcagaatcagctagttatgtaaatagtggaacattatttgctgtattggagattaattttttttatataattcatgctttctccatttgttttcaaattctgttttgggaagtctagctgatatctgtagacttaagtgaaacaaataccttaaaggaaagtggttaaatataatcattttacccaaatattttgttatattggaactgcagttctattaatagaaaagatgttttatttattcaaattgttagatatattgttctcttttgagtgtctgcctagacaccattagtgaatgtgttttggaaaggataatgtataggactgatattttagtctacctgaaatttgtttaaggaaataatttacagtatttacataaatcagtggaaaggtacagagaacttctgggtcataaatatcagaaaagaggccgggtgcggtggctgacgcctgtaatcccagcactttgggaggctgaggtgggcggatcacgaggtcaggagatcgagaccatcctggctaacacggtgaaaccctgttctactaaaaatacaaaaaattagccgggcgtggtggcaggcgcctgtagtcccagctactcggaaggctgaggcaggagaatggggtgaacccgggaggaggagcttgcagtaagccgagatcgcgccactgcactccagcctgggagacagaacgagactccgtctcaaaataaataaataaataaataaataaataaataaatatcagaaaagtagataaaatttatattaatgataacatgtagcattctaaagtctggaaagtttgtgttaagccatgtagttattggatatgtgggcttgttgagagaagaaatcagtgtaaaggaaccttaaggttgggcttcgttctgtgatgtaaagcctccagagagttacatactgctgcactcaataaatgtaaatatgtcacacacctggcatcttctgttatagataaaccctttacttattagaatcaatacctactgcaatgttagcgtttctttaagtgtaggtgcaattcttctttattacttgagtttaaggttgtatttgaaaaaaaaagaactcaacttaaagatggttcaaaattttaaatttcatatctaacgtatgtgctcatcttaaattaatagatttgtcttaatgaaatactggcctatgtgcctcaaattccaggaggatgtgttatgtaatgaaagaactactatatttcccttctgcatctgatttgctgaagatgattttcagatgtttcttattaaaatattcttaatccttcaaattttgtacttttaaaaccttgagcatcagcttcaaataatgactaaataaggggaaaaggtaataaaatattacaaatgggatagtaagctacattactcaaccacatgaaaggttaattgacacattaaagaacctaagaccacttgatttttattttttaaacactgttaaagagcattcaagtatatctatatctatatacatatacacacacatatatatacacacatatatatacacacatacacacacacaaacacacatacatacacacatggacattctgaccaaaatgtaaaatgtacaaactcaccgaatagtgaatgcatccaaagagtaacaagagaatctatacagtaggtgtcgacattattcactcctatgtgaaaacttgcttttccattttttttaaaagaaaatgttatatgcttcttagggtaaggtgtttgggaaaaaagtaaaggttatagatttgggtacatttcttctgagttaaatgttttgtgcaatggaaaaatatctttaaaccctctataaactactaacagactataaaatgcttgatccatacattttgaatgtatgtactgtatataccatatacttttaaatatctgaatctttagttttatatgtgttctgaagaataatttttcatactaattgaagtgttcatacaatgaacacttggcattgtgttggaaggcacttgctttggaatgttttggagcaaagtcttgagtcagttatatttttgatgtttgtataaaggtgacaatgagtgtctgtctagaattctggttactgtgagtagtttaagatgctataatgcttttccactataaggtgaattcggtgtggaactcattgcttattgctgcacacttgcctagttttagagtaacaatacattatgtaggctaaagataatttctttaggaagattttctggtttgaaaatggaattaaaactgtaagacacctgtcagaaacatggaaaatggcatgttattgaccagggaaaagtgtaaataacaaaaagttaggattatcagatggtaaactggggaccaaggaaaagtggacaggaagattacttatataattaaataatataattataaggacttacaattcactccccaatcctaataacgcatcattgttaggctacttgagaagaaacagtacatttcaggacaattgtgatgtagtatgaaaaaacatcctttgtaaaagtttttcatttgggccagggtggttcatgactataatcccagcaatttgggacgctgaggtgggaggattgcttaaagccaggtgttctagcccagcctgggcaacatagtgaaaccccacctctatagaaaaaaaaagttttcaatcatacttatttaattaaaagtagacacttggaaacaaaggaaaagagaccctcttgctttttactatacttctattttataaggtcaatcatttcctcattacctttaacttcttttggggggagataataaagataaaagagaagaaagtgaaacatagaataaaactaaaagctatgacattataacttttagaagttagaagtaaaggaaatagaatgcaataagaatacacgtgaagctgatatttcaagcctctttatactacgtcttctgccatcaccaaaaatagcttccatttgtatgattttctatgtattattttatttggccctcatttctactagagtaagcagagaagatattattatgaccattttatgaaaatggaaactaaaaacgtgacgggattgagcaagattatctctgccctttgacaagtaaaaggtacttgatttggatggataaagctcaaattaaaagaaataacagactaaagatatagtaagtatatttaatgttttttaaaagtccttttaaaatgggaagaaagtatcactatcagtacactgccgatttttctcctaactagctccttatttggagctgatttagtcaccattactgcagttctgcagcagaggcgccgggtgccgctcttggctagtgctgtgcaaaatattggctcctcccgctgcagccagctcggaagaaaagtgcactctctatcaggcttcctgcagcggagacacccattagagaacccaagcacaaagacaaagcaaatagttggtcctgctcggagaactcttgggattatttaaagatctcctctcctcggatttagaaaggcaaaggcgcagagagcgggatgggaaatagctccggatggaggggcccagcagggcagaggcgaatgctatttctcttcctgctctctttgttagaccaggttctctccgaaccgatccgctacgctattcccgaggagctggacaggggctcgctggtagggaacctcgccaaggacctggggtttggcgtgggggatttacctactaggaacctgcgggttattgcagagaagaaattctttaccgtgagccccgaaaatgggaacttacttgtgagcgaccgtatagaccgagaggagatttgtggcaagaagtcgacgtgtgttctggaatttgaaatggttgctgaaaagcctttaaacttttttcatgtaactgtgctgatccaggatattaacgacaacccaccgacctttagccaaaatatcactgagctggaaatcagcgaactggctctcactggagccacatttgccctggaatctgcgcaagatcctgatgtaggtgtcaattcgctgcagcagtactacctcagccctgatccgcacttctctttgattcagaaggagaacctggatggcagtaggtacccagagctagtactgaaagcacccctggacagggaagagcagccacatcaccacctggtcctcacagctgtggatgggggcgagccctccagaagctgtaccacccagatcagggtaattgtcgcagatgcaaatgataaccccccagtatttactcaggacatgtacagggtcaatgttgcagagaacctgcccgctggctcctccgtattaaaagtgatggccattgacatggatgagggcatcaatgccgaaatcatctatgccttcatcaatattggcaaggaagtgagacaactgttcaagctggacagtaaaacgggggaactcaccactattggagaactggactttgaagagagagatagctacacaattggggtggaagcaaaggatggtggacatcacactgcatattgtaaagtac

SEQ ID NO: 10532 - DNA, 6000 bp, Homo sapiens
tttctggtttgaaaatggaattaaaactgtaagacacctgtcagaaacatggaaaatggcatgttattgaccagggaaaagtgtaaataacaaaaagttaggattatcagatggtaaactggggaccaaggaaaagtggacaggaagattacttatataattaaataatataattataaggacttacaattcactccccaatcctaataacgcatcattgttaggctacttgagaagaaacagtacatttcaggacaattgtgatgtagtatgaaaaaacatcctttgtaaaagtttttcatttgggccagggtggttcatgactataatcccagcaatttgggacgctgaggtgggaggattgcttaaagccaggtgttctagcccagcctgggcaacatagtgaaaccccacctctatagaaaaaaaaagttttcaatcatacttatttaattaaaagtagacacttggaaacaaaggaaaagagaccctcttgctttttactatacttctattttataaggtcaatcatttcctcattacctttaacttcttttggggggagataataaagataaaagagaagaaagtgaaacatagaataaaactaaaagctatgacattataacttttagaagttagaagtaaaggaaatagaatgcaataagaatacacgtgaagctgatatttcaagcctctttatactacgtcttctgccatcaccaaaaatagcttccatttgtatgattttctatgtattattttatttggccctcatttctactagagtaagcagagaagatattattatgaccattttatgaaaatggaaactaaaaacgtgacgggattgagcaagattatctctgccctttgacaagtaaaaggtacttgatttggatggataaagctcaaattaaaagaaataacagactaaagatatagtaagtatatttaatgttttttaaaagtccttttaaaatgggaagaaagtatcactatcagtacactgccgatttttctcctaactagctccttatttggagctgatttagtcaccattactgcagttctgcagcagaggcgccgggtgccgctcttggctagtgctgtgcaaaatattggctcctcccgctgcagccagctcggaagaaaagtgcactctctatcaggcttcctgcagcggagacacccattagagaacccaagcacaaagacaaagcaaatagttggtcctgctcggagaactcttgggattatttaaagatctcctctcctcggatttagaaaggcaaaggcgcagagagcgggatgggaaatagctccggatggaggggcccagcagggcagaggcgaatgctatttctcttcctgctctctttgttagaccaggttctctccgaaccgatccgctacgctattcccgaggagctggacaggggctcgctggtagggaacctcgccaaggacctggggtttggcgtgggggatttacctactaggaacctgcgggttattgcagagaagaaattctttaccgtgagccccgaaaatgggaacttacttgtgagcgaccgtatagaccgagaggagatttgtggcaagaagtcgacgtgtgttctggaatttgaaatggttgctgaaaagcctttaaacttttttcatgtaactgtgctgatccaggatattaacgacaacccaccgacctttagccaaaatatcactgagctggaaatcagcgaactggctctcactggagccacatttgccctggaatctgcgcaagatcctgatgtaggtgtcaattcgctgcagcagtactacctcagccctgatccgcacttctctttgattcagaaggagaacctggatggcagtaggtacccagagctagtactgaaagcacccctggacagggaagagcagccacatcaccacctggtcctcacagctgtggatgggggcgagccctccagaagctgtaccacccagatcagggtaattgtcgcagatgcaaatgataaccccccagtatttactcaggacatgtacagggtcaatgttgcagagaacctgcccgctggctcctccgtattaaaagtgatggccattgacatggatgagggcatcaatgccgaaatcatctatgccttcatcaatattggcaaggaagtgagacaactgttcaagctggacagtaaaacgggggaactcaccactattggagaactggactttgaagagagagatagctacacaattggggtggaagcaaaggatggtggacatcacactgcatattgtaaagtacagatagatatttcagatgaaaatgacaatgccccggagataaccctggcttctgaatcccaacatatacaagaagatgctgagctggggactgccgttgccctgatcaaaacacatgatctagattctggatttaatggagaaatcctatgccaactaaaaggaaacttcccctttaaaatcgttcaagataccaaaaacacatacaggttggtgacagatggagccctggaccgggagcagatcccagaatacaatgtgacgatcacagctaccgacaaaggcaatccaccgctctcctccagcaagaccatcactctgcacatccttgatgtcaacgacaacgttcccgttttccaccaggcctcctacaccgtgcatgtagctgagaacaatccgcctggagcctccattgcgcatgtcagagcctcggatcccgacttgggacctaatggccttgtctcctactacatcgtggccagtgacctggagccgcgggagctgtcgtcctacgtgtccgtgagcgcgcggagcggggtggtgttcgcgcagcgagccttcgaccacgagcagctgcgtgccttcgagctcactctgcaggcccgcgaccagggctcgcctacgctcagcgccaacgtgagcctgcgcgtgttggtggacgaccgcaacgacaatgcaccgctggtgctgtacccagctctggggcccgaaggctctgcgctcttcgatatggtgccgcgctctgcagagcctggctacctggtgaccaaggtggtggcggtggacgcagactcgggatacaacgcctggctgtcctaccacattgtgcaggccagcgagcccgggctgttcagcctgggcctgcgcacgggtgaggtgcgcacggcgcgtaccttgggcgacagggaggccgcccgccagcgcctgctggtcactgtgcgtgatggaggacagcagcctctttcagccaccgtcatgctgcacctaatcttcgcagatagcttgcaagagatacaacctgaccttagcgaccgccccactccctctgaccctcaggcggagctacagtttcacctagtagtggcgttggccttgatctcagtgctcttcctcctcgcggtgattctggcaatctccctgcgcctgcgatgctcctccagacccgccactgagggctactttcagcctggtgtctgcttcaagactgtacctggagttctccccacctacagcgaaaggactttgccttattcctacaatccgtgtgctgcctcacattcctcaaacaccgagtttaaatttctcaatataaaggctgaaaatgctgcaccacaagatcttctatgtgatgaagcctcttggtttgaaagtaatgacaatccagaaatgccttctaattcaggcaatttgcaaaaggtgagtttcttcaaacctttccttccataaatataattgggtttcaattcattgatttagagataaaaagaatacagattaaatattccctgattacattattttattgattttctggtgtagagtagggtgtctaggaaattctttgtagaatttcctgtagaatatctgtgttgcagttgttctttcatagaaagcctccttttgatagtcttgaaacttttcttaatcctaatacactataatctgaaacatttttaatacagtattatctcacactgtcattttcagacatatctatccagaattagacccaaatcctcacaattaagtggtttacttagttttaatgcagtcaatcctaaaatatatgaaacattatgtatatcttaacacatttttaatgtaacctgtatataatatttttacttccctttgcatgtttttaaaagtatacacagatgttgcctatgtcagggcagtttttaacttctatgctaatcaaaagaaataatggcatctaaaatggcaactcttgtaatgggcactgtaatgaattggttcaaaatgtgtttgtgtagcatatgcctgtagtcccagctactcgggaggctgaggtgggaggatcccttgatcccaggaggtagcagctgcaatgagctataattgtgcccctgcactctagcctgggagacagagcgagactttgtctccaaaaaagtgtttgtggttgttggtacccttactgaaaatgggactagcataaatggtggtgaaatgtgatgataattcaaaatttacagaagattgtaatattatttctgttccccaaggtcctaagagatattttcataaaaatgaatggtaaacttcagagaacatttaaaattattcaaaataatctcttacactcttctaaatgcttcattatcttggggagggaaatattatgagtgtcatctctgcagatttagcagaaataaaatcctctgtgtgatagtttcacaaaacgatgcagtattaagttaggactctaagcgtcgctgttgaccaacctgggcaagaaaatcaacggaaactcaagttacatcctccaacaacaaagcaaattagacgggaaagcaggaaagctgtgcagaaattctgacctgaaacgcttcgcatccggtctctgcttgttgaaggaccttcaccgctatttctgagaagagcaaaagtgatgcagatctgttcttcctcttcttaatcccagagaagttcctaataagccagtaatggcgcctccgcagaggcatccgcagcgcagcgagcaggtcctgctcctcacgctcctggggacgctgtggggggccgcggcagcgcagatccgctactctattcccgaggagctggagaaaggctccttcgtaggcaacatcgtcaaggatctgggactggagccccaggagttggcggagcacggagtccgcatcgtctccagaggtaggatgcagcttttctctctgaatccgcgaaacggcagcttggtcaccgcgggtaggatagaccgcgaggagctctgtgctcagagcccgcggtgtctggtgagttttaacatccttgtcgaggataaactgaatctttatcccgtggaagtggaaatagtggacattaatgacaatacaccccgattcttaaaggaagaattggaagtgaaaattctcgaaaacgcagctccatcctctcgttttccactaatggaggtctatgaccctgatgtgggaatgaactcccttcagggatttaagctcagtggtaatagtcacttctcagtggacgtgcaaagcgaagcccatgggcccaagtacccggagctggtgctggagggcacactggaccgggaaggagaagccgtttaccgcctggtccttactgccatggatggcggcgaccctgtccgctcaagcgtcgcccaaattctggtaacagttctagatgtgaatgacaacactccaatgtttactcagcctgtctaccgtgtaagtgttcctgaaaacctgccagtaggcacaccagtgttggcagtgactgccaccgaccaggatgaaggagtccacggggaagtaacttattcctttgtgaagattacagaaaagatctcacaaattttctgtttgaatgttttgactggagaaatttcaacttctgcaaatctagactatgaggactcgagtttttatgagctgggtgttgaagcccgggatgggccaggtcttcgagacagagcgaaagtct

SEQ ID NO: 10533 - DNA, 6000 bp, Homo sapiens
cagtttttacatttttaactaattggaaaaaaaaatcaaaagaagaatactatttcatgacacataaaaatcatatgttgaggctgggcacggtggctcacgcctgtaatcccagctccttgggaggctgaggcgggtggattgctttaggtcaggagtttgagaccagcctggccaacatagcgaaaccctgtctctactaaaaatacaaaaattagctgggcgtggtggcaggtgcctgtaatcccagctactcgggaggctaaggcaggagaatctcttgaacccaggaggcgaagtttgtggtaagccaagaacatgccactgcactccatccagcctgggcgatagagtgagactccatctcaaaaataaaaaaaataaaaaaataaatcatacgtaattcacatttcaatgatcataaataagactttattggaacacagtcttgccactttggcattgtttatggctgtgttcacaatacaatggcaaagtggagtagctgcaacagagcttatggttcacaaagcctaaaatatttctatctattccttaacattaaaagtttgctaagttctaagattttgttctaaactaagttctaagcttttgtacaattatactcatgagtttgtgaaagttgtaagaatcaaaatggagtcacttattctataccccgacaaataggagtcgggaggccataaaggaggggctctcatgcacacatgtctacgttaaaatctatttttaggttacactttctgaaaaccacaaccttgaacaaggccaccacaactttacacaaagacgtctgcctaggaactgtctgttcagccttggagtgataccacccttgttattgatccttgtagccaaggttaatagtttcaaaacaacttatgtaaccttgctcattttgcctttaaaacctttgccttcctttccctctctgggtacatccatggcccttcatgaggtgcatacatatcccagattgcaatcttgaggattcacaaataaactcactgtctttggagaatctctctgttgttatttcaggttgacaactttctctcttcccatgacagcaaagcccttttatttctttctgttttttttttttagatgaagtttcactcttgttgcccaggctggagtgcaatggcgcgatctcggctcactgcaacctccgcctctcaggttcaagtgattctcctgccttagcctcccaagtagctgggattacaggcatgtaccaccacgcccggctaagttttttgtatttttagtagagatggggtttctccatgatggtcaggctggtctccaactcccaacctcaggtgatcctcccgcctcggcctcccaaagtgctgggattacaggcgtgagccaccacacctggccaacaaagcccttttctcgttcaaaaccctttcttcccaatccttacctgattatcccagctggccacataattctcttcactatctctcagcattagttaatatagctcaacacagttgtaaataacttgtaagttttatattttaaaaatgtctcaaataagtgtttactatcatctctatttcatcatgaagactccaaaggttagaactttctatctcctgtctatttatgtcccgtatttctctccacacccaaagcagtgcatacattttggagccagacaaatcccagtttgcgtttcgactccaccgctcacaaagctgagtaggttatgtaaatttcctgagtctcttcaagaatctgcagaatgggtttgttatgaagattaagcagatgatgtaccatcaggtccaagattctggaagtgctccataacagtagtaattatcagtggataatttctttatttgtaatatgaagatattaccttttgctcttaatgaaccttgtggtaatgtagtgagaattaaaagaagtagtaagtcatagaaataaaacttcatggtttaattggagccctgtgaagactagctggagaagttcaaggcctcaaatgagatattagactaatgaggcttttgtctaaatttaacacatttaacaaacccttcttggttacttactgagctctgcactacctaggtcaagcctcatgtggatatgaaagacagaaggtcacatttatcctagagatttgtatctatattgcagggggaaagggatacggacatgagttatgcttatacttgtccatgtttcttttctctctcaggagggatgattcagagtcagcaattcacatatgcagtactgcacatggaaagtattactgttattctgtggggaaataagtttctaagtgcagcaatctgaaattaataactttctctgtggaaactctcttgacaacatctcgagatgaagccaaagagcacaatttttatggctttggattatcttctctgtctgcttggcttgcaccaggcatggatctgtgagccagaaattcagttttccccttcgttgtacaatttgcctgccagctggaggcctaatatagcagtgactcaatttctcaattctccaatttatccacccatcaaatcaaggcaaataatctcaatttacttattagaggctttggggaactcaagaaaaaaaagaccaaaatctttaccgtgactacaaaacattttggttgaggacataggaaaaggagattagaagttggagatcaattttcttttactttcaatgcaaaatatttctatgataaagcctgttatttatattatgataaatatttgtgtccacatgcagggagtatatagatattgagggagaaagtaatttaggaaagaaatagaagggtagcaacatcttttccacaaaagccacagcactgcagacatgcataaagattgcagttgttgctccaatagccttatgtggtaggccgacaaattcttttttctttttctttttttttttcagagattgtgtctcactatgttgcccaggttggtctcgaactcctggctcctgggctcacgtgatcctcgagtctcaggctctcaaagtgctgagattacagatgtgagccactgtgcccagtggacattcttttttattctttcttacacgtaaatgtagacaatctggacaaagaagtctggatttctactttccactgctgacattttaaaaaatttcaaattagatttttgcaccctttatacaagactacatggcaggacattatgtttgattcactgtacctgattacatttaaatgttgtttttctggattataaacaacaactgagggacagagtaaggaggctctaaatagacttgagagcttggaatgttgctacatttgttcgctctcccagcatgttaatatgtgagactaatacttggaaatagcgacagatatagaggagtttggatgctgagagagaactcaaagtgaagatggtaaacatctagagtttttattgattacaattttctcatatatacagaaacctcagggtgtgttctaaacacagttctcttttaaaatacataattaactaaacttcaaaattagaagctaagacaataatcatattaatataacctctacactgccaacttggaaaggcaatgaagaagaaatgggaattgcaacaagcttcagagatggaagattttgtttttctctgtaggacatgtgggtagaagcaattgcagatggctgggtgtgaaagaaacagaccttgcaagcctgctatatagctatactgtgctacatggcattgggaggtaataagatttaaaagacaaatactcttgtcttcacaaagcttataatttagttgtgcaatactgggtaagaaagctggcttaatggagttgtattccagcttcaccccttagtagctctgtgtcattgggtgagatatttaatttctttgggcataacttcctcatctgtgaaacactgataattgtatctcctatatggcagctatgccagcctcctttctgttcttccacaagacaatctctctctggaccgccctttgcacctgttcctgtggtcgggaaagcctttagcatggccaaacccttcaagttttgacttcatgtcaccgagtcagggagcttttttggaaaatattgtttccgattccgcagatgaggctgttaaaatactaaaggatggcataaacatgaggatgctattataatcatccaccctaagtaggatttgagatccaagcagttctcaaggatttagggttagcaaactttttctgtaaaatgtcagatagcaagtattatagggtttgcaggccataccaaacaaatgggtgctgctgtgttccaataaaactttatttatggacactgaaacttgaatttcatgtacttttcacagtcatggtggcagaccggatttggccccctccctgtcgctggctgacccctggtttatgagtacggcagataaaagaagggagtgaataagaaccacgattctgctgccagacacgagggatcaggtcgctgctgtgaagattgtcaacctctctggttgccaacgacctcgagaatggggttgtggtccctgcgtcagggcggttgtgctgaaggctggatgagggcacgtaggtgaagctcagtgcttggcacgaggtgctcatcagcagcatcgcccttgctttgggctggcctgttagtaattcgtttttagtggaatcgaatacaacacttgagcctcggaggctcaggtcgtcggagcaactacaccagggccggtgcacctcggggcggcggcgcaggactaggctaggccgggccgggccgggcagggcggcgcgagtcgggggtggggcggcggcgcagcgccgtcgtcgtagtccccgcctcttccccaggggccgcgtcggagcctcggcggcggcggcggtgcttacagcctgagaagagcgtctcgcccgggagcggcggcggccatcgagacccacccaaggcgcgtccccctcggcctcccagcgctcccaagccgcagcggccgcgccccttcagctagctcgctcgctcgctctgcttccctgctgccggctgcgccatggcgttggcgttggcggcgctggcggcggtcgagccggcctgcggcagccggtaccagcaggtaagcggcgcccgactccagccccgaactccggtccctggctctgccctgcccgctggccgcctcaggcctctctggccggcccgcggccaactcgacgccggggcttggcaggccgcgctgggcctggaggggcgggtcgggccccgggctcggattcgaggctgccacgggcccggcctgcccgtctgcgaccccaggtgggactccggcggtggaaagtcctcctcccggcctcgtttcccgcatttcccagggcgggcgggtccctgagtcagaacccgcgacccacaggcggcatcgatctgaggcattcgtttttcatttttccacctttggtttgatgtcattggaaaagaaagaaagaaaaaagcatgaaacggaaactgggtggagagaaaagattaaaatctctgctgctgccgatagctccccacagcaagatgctattgctcagggtttcagagcctagtttgtcgaaacccatccccctcgcctccgttttaagacaaaagtaaaaaatgaagcaagagacaagcccgcagtttgcagtagatttggaagaggcgatgtttggctgtggtgatgccccaaaagggagagctacgatgaagtctgcagggcgtgtgccgggtgtattttaaatgcttggaagtgacgttttaagagatttgatggcatagctggggaggaaatgtataggaaatgattggatcattttctcgggtttgatttaatacattgaggccccagggaaaagagctgcttgtttcactccgcgtctgtagctaagttcccccaggaaatttagagaccttctgcagggtttttggaagtgttaa

SEQ ID NO: 10534 - DNA, 6000 bp, Homo sapiens
agtcaggagtacaaggccaacctgggcaacatagcaagactccacctctacaaaaaatacaaaaattagccaggtgtggtggcacatgcttgtagtcccagttacttgggaagctgaggtggaaagatcacctgagcctggggcagttgaggctgcagtgagccatgattgcaccactgtactccagcgtgggcaacagagtgagaccctctttcaaaaaaaaaaaaaaaaaaaggaaaaagaaaaaaagaatatcctggatagctttttttatcttttatttttaaaatttatttttattttagattcagggtgtacatgtgcttgtttgttacatgggtatatacatactggagggaattgggtttctagtgtacccaatacccaaatactcaaatagtgaacattgtacccaacaggtaatttttctttttttttttttgagacagagtttcactctttagcccaggctggagtaaagtggcatgatctgggctcactgtaacctccgcccctcgggttcaagtgattttcctgcctcagccttccaagtagctgggattacaggtggccgccaccacgcctggctaatttttgtatttttagtagagacgaggttttaccatgttggccaggctggtctcaaactcttgacatcaggtgatccacccgtcttggcctcccaaagtgctgggattacaggcgtgagccaccacgcccagccccgacaggtaatttttcaaccctcgtgctcctcttttggagtctccagtatctgtaatttccatctttatgatcttatgtacccattgtttagttcccacttataagtgagaacatgtgtctttggttttctgtttctgagttgtttttcttaggataatggccttcggctccacccatattgctgcaaaggacgtgattttgttcttttttatggctgcatggcaggcttttaaaaactatcaatgtctgagtcaataccaataaaagtatatctggtagtaggacctaaacattaccatttttttaaaagttccccaagagactctttttttttttttgagatggagttttgctcttgttgcccaggctgaagtgcaatgttgcagtctcggctcactgcaacctccacctcctgggttcaagtgattctcttgcctcagcttcctgagtagctgagattacaggcacccactgccacacccggctaattttttgtatttttagtaaagacagcgtttcaccatgttggccaggctggtcacgaactcctgaccttgtgcagaactgagaactgctggtatagaataaacctggaaagcaacacaggaaaatgggtgctgtgtttgcctctagaaaggtacaccagggtaagaataggctatgaggaagatttactttttactgtaaacccttgacctttttaatttgtttactttgtgttacctatttccaagaacaatcaagctaacattttacaaaatgttttgcaaaaaagtaaaatggcccaggcatggtgtctcatgcctgtaatcccaatactttgggaggccaaggtaggaggatcacttcaggccaggagtttgaggccaggagtttgagatcaggctgggcaacatagggagacccccatttctacaaaaaaataaaaaattagctgggtgtggtggcgttcggctgtggttctagacactcaggaggctaaggtgggaggatcacttgagtccagcagttcgaggttagagggatctataattgcgccactgcactccagcctgggtgacagagcaagaccctgtctcttaaaaaaaaaaaaaaaaaaaaaaaaaaagacacttatagcagtgaaaatgaagcctgaatagcacactaggaatagttcattcaatagtgggaatccagtgggagttcaaggtccagtggggcctcagaggaagtgactagtcccacctgggaagaatgggtggtcaggaatgctgaggaggtaaatcctgaagtggccccaacctgaaaggacttatttgctggcccaccatgcctccagtgcatacatcattagttacgctttggaaaagctgtttgggaagagtaatggctataaaatgtggccctccggctgccagtcacctctgtgaaccctgagaccaacaggagggaaaaaatgcccaggctaggaggcgtaaagagatccaagtgctgctgatgtgatgtcatcgaggaaaagctaattattggccagctttccagtagcagggatttagttattcacccccaccccccaccccacccctccacccgctgcctttgattcctgttgtggagcactggaacatcggtgaagggaaagtagcatggcagaccaaagtctggctccatggagctccttgggatgtgtgtgtggagatcagcgagggaccacaacagtaaacagcagccagggatgctgaactaggaggcagagaggcaccaatggccaacctaaagcttctttactagcaccttctcctggccccgggccatagcttgcatgttcttgggtgctggcatgtcacagctcccaggtcaaaatccacctccatcccatctcaaaatctactgcttgttagctgaataaacttggtaagtaatactattctgagccccaatttcttcgtctgtgatgcagatgaatatgtatgaaataaaatcaaagaatgataggcagtattaaatttgactggtctggttttttatttttgcttttgtttttatttttgagatggggtctcactctgtcacccaggccggagtgcagtggcacgatctcggctcactgcaacctctgtctactgggctcaagctgtcctcccaccccagcctcctgagtagctgggactacaggcacatgctaccatgcctggctacttttttctatttttggtagagttggagtttcaccatgttgtccaggctggtctctaactcctgagctcaagtggcttataggcatgaaccaccatgcccggccaaatttggccaatctttattggtgcctgttatatgcaaggtcctggcttccccacacagacaagaaaacaaacaaataaatgaataaatgtcagctgcaaggattggagtggattcttgcatttgcatagcacagtgagtgtagtggttaagagtgggctttgcagtcagacgtgactgtgttaaaatcatgctactgtcacttattaactgtgggacgttgggcagatcacctaacatctctgagcctcatttcctcaccaaaaaaaagaagaatcataatatggcacctcctctaaagctgttgtgaggattaactcatgtaatgaatgtgaagagttctgcgcaggcacgtgataaacatccagaaactgtttattctgcttgttgtgcagtctttagggcttaaacaaagtactttacactgattgccttacctgaccctctccaggactctgggtgctagggcattaactaccctttgaaaggtgaaaacattgatgcccattgaggtgaaatgatttgtcttcagccacaaggggcagcatcaggagtagaacccaagtgtttgtgttctgattcccaagacagcttatgacgttttggaaactctgaatctgatgggtgacagaaacttggggatcatctctagataagaaagggagttccttgaatgactgtgaagacgttcaccggaaagggaaggaaaggaagttaatcatgcttccttcacaggccctccttcacccccatctagtgggcacatgcaagctacaaacaaggtgaggaatgaacaaattaatacatactcaatagtggccagttcgaggcagataattaaatcaagatgacctgaaaggatgtgactggctgtggctagtttacacagggtggtcagggacggcctcgccatggagagggctggtgttttggctgagacctgagagaccagaagaaatctgatggccagaaccaatgtttaggtccctaaagagaacaagcgtggcgagcaaagggggccagtatgggtggagatcagcgagggaggggggcagagatgagtgcccgaagcacacagtaccttggcatagggagggtttgattttacctacaaatgccattaaacccactaaggattttaacaaaaactacaattacattttaatttacattttatgttttatagagacaaggttcggctatactgcccaggttgatctcgaacccctgggttcaagcgatcctccctactcggtcccccaaagtgctgggattacaagcgtgagccgctgcgcccggccttttaatttacattttagccttccggttactggaatctttgatggggaatgagttatagtgaggcaagagcctctaacattctaggagctcttttcccgttcggggcctcaatttcccgttctacaaaggcgggtgggagggaacggggtcccaagtagtactggataaagaggtggccgatcgcaaacgctgagcacttcaaaactctgggcagagcgcttccgcgcctctcctgctatttcaccctggccacaggctagccgccgaggccggtcatccgctctctccgcggaggagtcaacgccacggaagcagcggcggaacctctctaagaatccttccagcttgtgctcttctgtccagggcagccaatcgcgaggaggagagtagtcagagggcggcaccctccccggtctgggccgagttattggctggtggtagcgtcgctcgcccggcagtaccacgtgacggcctcggccgcgggcgtttacactggctctgcctccggcatctcttcgccggtgcgtcctcgccgcgcccgtaggtcccggcagccgggccccgcctccttcggagtccgagcgatgggcggggaaagggacaggcaggtatagctctgtcggcgccgcggtgtccacctcagtcaggccacggtggaagacgcgtgccgcggcgcctggttgcctgcagcggcccggacccgagaggtgagaagagggaagcggaccagggaagagggagggagcggtgctggccgccaagcggtcagcgggcccctcccagagtcattctgcctgggtccccgcgcggtagaatcccagatcaggggtcgccgccgtggagcggggcgtgcgtcaggttatttcccgggtggtccggggccgggcgagtggcactgcaccctggtgatccgggcctgcccgtctggctggcggctgcccacccgccctccatcccgcgtatctcgccgtatctcgccgggtgccacgcactccgctgcttttccagtcctcgttgatccgtctcgaacctagatatctggaatagggatcgaggagataggagccaccaccacctcggacagatggggaaactgaggccggcacaggcgagacggcttggttatcttggttattaaaaatcacacacccgattaagtacaaaatcaggacctgttctttcggactcacacactaagttggtattatttcactggatggatggaaacactgagaagacagagagggcccagagccttgcctaaaaatacacagcaagtcttttgcagagctaggacttgtacccagctctccaaactcatagactatcagcctgggctccttccttgcacagattggggatcacagtgagttagaaacattcagaacttaaattgccttccggcgcccattctagttaacctgtcttttctccttgtccccaacagttctttatgtgaaatctacaactaatgtgatatgcaatactagattaagcagaactttttgtttttgaaaattgaatcaataagaaatggagggccaaagctgtgggaaaggaatggaccctttaaaatcaggaatctcaaggcaggatatagcaagggacagagactaatagctgtcgtttattgagtaaatgctatgtgccaggcactgtggtaggtagttgtgttagccttacaaacca

SEQ ID NO: 10535 - DNA, 6000 bp, Homo sapiens
acccggggccttctctccccgggggctctggtgccagctgcctgcccctctgtttactgttctgggaggtggccaggccataaaaagtgtgcacagcctgcctgacatcgccctttgctcccatgataacagtgcacaaggtggatcctggcctggcacaggcccctgaagtgcagcaggcacttctctctctcctcctaccagtggcctgggagacagcgggcattcattagtaatggtggacacctgaggcttgggaaagaaccagggttccaagagtagagggggaggggctggtgaaaaggcggctggcccggactgaatagagttttctgatcttcaaaaaaatatgctctgtgaccctagggtaactgcttcccctctttgggcccgcattgccccatctgtaaacttggggaagttgtctaccagaaagaaataactctggtcaagtaagtttgggaaatcctgctgaagccacttctctgatagagtcacagtgggccattagcacatcaaagtctctgacaagccccacagcaaagaaaccccttgaattttctttcatctggccttccccgtgctttgctacctaggaggcccctactcacacctccgagcatcccactgaactccacacactctgcagtgctgggatgttcaggctggagggcctcaccttctctgtgtctcagtatttagcagcaggttttgtcgtcaaatggcctggatttcagcgtgactacttccaaactgcaagacttcaggcaagttacttagcttcttggagcctcggcctccgcatgtgtcaaatggaaataaaatagtctaactgagcttagaattgtgtttcgctcagggcccagcacataagaagtgcctgtttttgagccacctgctcacggggctgctgctgcatcccagtgtgagaggctggcaggcgtggctgatgttctacccacctgaaggaggacaagcctgtctccgcattaggaagacctctgcccggcaggaggtcagtggccactcctctgatagagtcacagcggcgcattaccacatcaaagggtgagctgcagcagttgcccacatgggaggtcaggaggttggatgcgacccacaggttgggttggtgctcacctaccaatgggtgtttagccccatgaaaaaggaaactcatctaagacaacttccaagcagtgcaacttcctgccttgtgcctggtgagttccctgtcacccagagttccaccagagattggggtgttgtaatggcttaggaaagagacccttcaagtctagtcaaatcttacagccaccccaggggtaagaggtgttcagctctcgtatcaggaatggcccatgctgctttgcgtacagtgactttgtgctggccctccaaggcccacagactgcttacgtcttctagcaaatcagaattgtgcatgtcaacactgtttacatacaatttcagggagtccatagactcctaaccctgggctgagaacctgtcttatggaaaagccaatcccatcattgattgccgagagattggtgtggaccgagcagaacagttgcagcactactctagggagggacttggtggggaatggagtgttctgaggagggctccagcagtcaagggtgtgtgtgtgtgtgtgtgtgtgtgtctgtgtgtgtgtaatgggctgtgataggggtacaagggttagaacaggaggactgtggagctctgaggaaatcagcccggctctgagtgtttgagatgatctgccagagggatgcagagctggggagcacagccagcctccgccagggcagctttggagggcaatcccgttccaaccaggcagctctgggatcacttcctctgaaccactccagatggactagcagcctggaaccttgttttttacagtcgtcactccctagtgtgacaaaacacatgctctacagtgataaaatctgaatatttaagcaaattaaaaatgtttatttatatacatttaaaaatatctccctatataataaaaggaagtacagttcatctgacactttccttaaatcacacacacacatctccattgcacttctggtttgatatgagaccacaacagggagagaagggggaaagggagagtgaatatttaccatttggattcctaagcagtcattttgccatgaatcaaaccccctctggaatgggggagaggagatggtggtgacagcaattgtcaaatgtgcttggttgccagactcctggccagttgtatgatcataaaattggagcttcagtgggtagattgatttatgtggataatgtcttttagaaaatcttggagttttggctgggcacagtggctcatgcctgtaatcccagcactttgggaggcagaggcagaaagatcccttgatctcaagagttcaagatcagcctgggtaatatagcaagaccctgtctctacaaaaaaatacaaaaattagccagtcatggtggcacacacctgtagtcccagttgcttgggaggctgaggtgggagggtagcttgagttcaggaagcgaaggttgtggtgagccgagatggagccactgcacatcaacctgggtaatagagcaagatctctctcaaaaaaataaagaaaagaaaatctttgagttttgtttgttttatgaaagggcagactttccccaccagggctgtggggatggaggtgatggtggcagagaggtatgagctagagggcagagcctgggtgaggtcagactcctaggttatagacatgatcctgtctttactgaatcactgagtgattttgcaaatcctgcccctctgggtctcagtttccctatctgaaaggcatgggcctagatccatttgcacctcacagtcccagtgactgccacagtggctcagtggtcaccccctgatgtgtctgctcaagggaagctaaagccctggtccactcccttcttctcccccagggctgggtccgtgaagtgggaggagcaggtgctgctaggaagggtcataaagaggccagtcttcttggctcctgagccaactgcctcatccctgctcgctgtccctgtggccctctgtgccttccaaagggtctcatgaaacccaagtgccaatgggagggagtggttgagcaaggttgagcctcttttgtacaagatgcattgacaagccttgggtgagggatggggaagtttcctgcctgggcctccttggattcaggagcccttggcttctgcctttcccagccatgacccacagctttcctggcttcatccccaacgcccagtgcatgacttcactcctctgggacagtttccacaggtgtaaaatgagatgcacaaacatgtcttcccagacagttggaaagaattaaaaattagatgttggatgcaaaaatccttcataatgcacacagtagggctccataaatgctccttctcttcacactcacagccactcttggccccatatgggtcagcaggcagggggcagaggagacaccttcctcctgggtctggagagcccctggtttgccctttgtggccaggctcaaaggggagagaagtttgacaggacctgggcaggggaaggggtggactggagcctggccaggcctttacccaagtccatgctttgacttaaacccctccaaccttttttcaagctccagaggtgggagagagcagaaccttattctcatctctccccaaaggcctcccaccgtgtcaactgatagtgagccaaacagatgtatggttaatgtctaaactgggacacttgcgagggtgaaaaggacacaatttgtaatgtatatactgatccgctagtgtctatcagtcagtcccagcaaaccaacgtgtgccattgctccagctcatcatttcccatcctagccacaggctcactggaccctcagaacattctgaggcaacaatgcatgggcggctcgtggcccattttacagatatgaaattagaactttccagaagccatactgctgctggacaggaaaccagttactaatcatctaagtcacagatcacagtgacactgtggcacttgcctgtcccttctgctcacccaaacctccccattttgctttcatcttaaggaaaggaggagagttgaagactctactagcctaaaggtccatgaagcctgactctgtccctggtgtcactcattagccccgtgactttgagtaagtaacttaacttccctgtccctcagcttcctcatctgtagaataggagtaacgacacctgtctctccaggttgagaaaataggacacctagttcaggacctggcacattttaggtgctcaataaatactgatagattgaataattggactaatggtggcgtgggcaacccacagtcagtgaataaatgttaactgagcacctactatgtgtcaggctctttgtgctagatgttttctatgctccatcttcctgaattgctcacactcctgtaagagaggagagattcttatcccctaaggtcgcacagcaaagacgacgcaggggggtgggctgttagtgttccttgcccaactgtggaaagggagtcccagagagggcaggtcgcttgcccaaggtcacgcagaaagccgagggtttccgtcgcgaacccccctccccactcgctcagggctctccaatccgcagctctgcgtgcgggggcgcgcgcatccccccgccgtccgtccgtcagctgtctgtctgggtgtctatgcgggcgcagcagtgcacccttccccagcctcgggcgctgcgcagggacagacaaggcattcgcagcgccctgcccgcgctccacgcccgcagccgccagacggcagcgcctgcgtccgtgcccgccccagccggtgcgcgggagccgcgggggcaaaggcgcagtggccagcggaccatctctcgtgccctcgctctctgcgctccggggcagctgagccccggccacccgctctccaagatgaagaagctccagggagctcacctccgcaaggtagggcacgagggcgggggcgctgggggtgcacctggaggagggttggagagacccgcccccaacgaggcccctggggaaggtctgaggatgcacccagaccagcttcgggctctggggaaggcccgactcagctggataacagggagggtcagggtcacggtctgcgcccccacctctgcccctgccatctggggttcgggatgtagtatgaggggagtcctggttcactgggccaggcctatgaacaggtgtctgcagtccccggaggcgcggggtaggggcggccggggccaggcacccacctcttccccaattccaccctgctgctccccgccaggagctgattgccgggtgtggggggtattggaatacctgagcgttgagctggactcatctgaggggtggggagtgggaggcggtcatccatactgaagccggctccctgagcctgcgggaagactctcctctttcctgcctgctccctccccgcccccttagcttgcctgctgagaccccaggctgcccctcagcagggctgaagggaggcaaagacagggagggggctatcggaggcaggaggatatgatcaatgaagatggaagctggtatgggagagtggctgtgggcccagacctcaggctctccctaccttgccttgtgggattggacctctcagccaagctgtcaggatatggggagggggaatactgggggacgttttctggcttgtaccagtcctaactaaggagtcagatctcctgaatactatttctgccgctgccacttgcctggtgactttggacaagttcattctctaacctgaacctcctctggctaagccctagcctggaggcaccaaaacaggccccactgggtgtgtgaggtgtggggaagaatgctaaagggctggtagatgtgagaagactgttctcaggggctggtgttatcaacctccctacataca

SEQ ID NO: 10536 - DNA, 6000 bp, Homo sapiens
gttatgtgattatagctgattaaatgaaatttattctcaaatataactctttggatggctttgattatatgattgattttttcaatacatcttggtaaaaaggatggcagattcgttgaatctgttcaaataattacatagccaaggattcagtaaaaatatttactctcaaattctgatgggccagtgggaacaaggtatcattaaaaatatttcatttcagtttgcaataagcatagtttgttaaaatgagggttagcaatagatgaagaagaaaggacttcctcttacactcatcagaaaatgggacattaaaaacaatctaacactattccaaaacaaataatcatgattatatttcccttgttggcttattaggctaatgtgattcattcttgactcacaaatcttggatcagcagtatacttccatggtttgttgcttcaggacaaaagagtcctagcaatcctgattcagtgctgtggttcagtctatagatgtctacttgtggtcagaagtcagcgaatactgataaggctggggctgtaagtctattctagctaagagcatctgataaaatcttttccaccaaggctctggggctgtcctttgttgacctctttagcttatagcagaggtctttaggcaagcatggaagaaaaataaaaaccaccttttgttgattaaatttaaggctctattaatttattacagtaaacaactatatcagaataggggagaataaaatcttctactgtgttatggattttgtcagtgtattctcaagggtaatggggacaaggacaaatctactttaaaaagtaacataaggaagacaacttatttattaaacatcatgtgggcttaatatataatgaaattctaacaacattattgagccaattaagaaatatgaagcaggctgggcacagtggctcatgcctgtaataccagcactttgggaggccgaggaaggcagatcacctgaggtgaagagttcaagaccagcctggccaacatggtgaaaccctgtctctactaaaaatataaaaattatatataaatatatatatatatatatatatatatttgtttgttttgttttgttttttgagacagagtcttgctgtgtcatccaggctagagtgcagtggcacgatctcagctcactgcagcctctgcctcccaggttcaaggaagtctcctgcctcagcctcccgagtagctggggttacagatgtgcaccaccactcccggctaattttttgtatttttaaatagagacagggtttcactatgttggcctggctggtctcgaactcctggcctcaagagatccaccagcctcagcctcccaaagtgctaggattacaggcgtgagtcactgtgctgactccttttgcatttctttaagtggtaaaataaaacatatacgttaatataatccaaaggtttatcaactctcaaacatataaaaataagaggcaaaggtgtgcaaatggtgttcaataccatgcttggtgaccaatgtttttgtattctatctttcttagaaattatccaagcagctaagattattcaccagtttacttgatttagtatcaatctaaattctcagttaattaaagaccttggaaattaagttgatatattacagagtaacataatcattgatgatataaactatttaggaaattcagtttaactacaatctccatgataaaacactctccatcactctctcatcatcttgctttatgttcttcatggtttcgcaaaccggtatcatcttgcttatttatttgcttacttattttttgtgaatattttcccagtagatgtaagcacaataaataaagataatttgtcttccttagtgcctagaacatgtaggagatattcaataaatagctttgaatgaaggaatacagtaagtcctcactcagcctcctcaacaggttttggacactttgattttgagtgaaactatgtataaggaaaccaattttaccatagacaaatggacagaaagaagagttaagttcctacagcatatttctgataacaaaagtaccaccaaacttctaaataaagactaaaacacttccaatattgaacactgaaataattgtgaaccatacatacatttaagaaagattagtaaaaacaaggaagagaattatttacctgcttattccagtttagagttcagtggccagagcctgtcccggcagctcagggctcgaggcagtaaccagccctggacaggacgccatcacatcgcagagcagactcacccacacccacaatcgttcacactgggactacatagacacagcagtttgcctaacatgcatatcttcgggatgtgggaggaaactgaccggggtacctggagaaaacccaggaagacatggggaggacatgcaaatgccacacagacggtgatcccagcagggaaacaattttttttcctcatcaacgttataacagaaggatgttattcaggggtctgctgtatatgaataaaatatttactcatcataattgtaccagatgtgaggaataggtctcattttactattttatggagcttgggtgggctactgggtgacagactcgaaatactggttttctgatttctaatacaatatgtcatattattccccaaaagtaaataaatatatttgtacaagtgaaaaatgaaaagaaaatgtctcgtgtagatatgattcttaaagagggtatttgctatggattgcatcctaatgggggcctctttaggcagtggtttgtttgtttgtttgtttgtttgttttttggagacagagtcccactctattgcccaggctggagtgcagtggggcaattcggctcactgcagcctccgcttctgggattcaagtgattctcctgcctcagcctctccagtagctgggattacaggcgcccgccaccacgcctggctaatttttgtgtttttagtagatacagggtttcaccatgttggccaggctggtttcgaactcctgacctcaggtgatctgcccgcctcggcctcccaaagtactgggattacaggcatgagccactgcccctggccaaggccgtcttttgatggcagccaatgtcattagactacaacttcttctgtacaagttccccaaagtatcaggggctctctaagagagtattacttatttctttcaggtcctgatggttttctctttggagtggttgtaatagaggaccaaggaagttgtgagctgttttctggcttttgctgtaacaaaagcttgttgctgaaattgactatttcccccactcctgcatcccaacacagcatccattattcttcccttcagtgctctctttgcaaaatcagtctagcctaggcagcagacttaacatggtatgctcctgtggggattcatactttatttctggcttgcttttagggtcccagggcaagtcgatattaaagagatactaataaattgctaaatggaaagggagactaggactcagctggctccaggcctgagcttctgccttgtcccagagggaagccaatgttcacagcagggcacatggagttaccagttgtccacccaaaggaactctcatccccttcactaaccagggaaaatgtcatattaagattgtcctcctgttgcagtgagccgagatcatgccactgcactccagcctgggcgacagagcgagactccgtctcaaaaaaaaaaaaaaaaaaaaaaaagattgtcctccttcaatctttttttactattaaatgagagctttgtattaaactattcagaattgggttgtccttgtttttaggttcccacactatctcttttgaataaaacatgttgttgggtgacagcccttagggtttttctcaaatcatttctcatgtgaatccccttcatcctcactgtccttcccttaagaaactggcgtgtgataatgatgatttagaggtcatttctgctgacctcatccctgaatcagaggaaacagcatggagtaagttctaagttcggggcccacaccatatcaaatttaggcctggggaaggcagtatggctctttccaaaccctccaaaacactactgggctccaagactgctcaaggtctcactgatagtcaaggcttgtgctcctttttttcagaagagtaagattaaagaaaaccactgtgaattaaaaagtgtgggtgccaacatgggacgggagtcccccctcactccatggatgacatagagggggcagaagattacagaattggcattgtcctgcgtggaagctgggccacccacagtggcgtgggaagcctctcagatgctggattctaatgggctcttgatcaccttggattgggctatttcattgttatcacaaaataaacaggatgctccaagtcatgttatggcagagaaccaaccagcttcacactggtcctctaaaccaatcctcacaacaggactgggagacaggtgttacctttcccactttacagagaatgaaacagagtggcaaagcctccgaaggaccctacacttcggacatcgcaaagcaggatctgagtcccggctcctctgtccaaacctacttgctaggctttctttcccatgtctactctatagctggaaaggtcgtggaggacacattttaggccaaccctctcggtttacaatccagagaggggagaccctcagaagccaagcgacatgtccacggctacgcggcgagtgtgtggcaacgtggaaggggagcccgagacgccctggtctctcccttctctcgcaggttcctttctccccgaacgcagcccgcaggggacgctggaggaggagctgagctggagttgccggggccccgggaccgggcgttccgggggcggtccccagcagccgcgcattccagagccagcagcgcgtcctggccgctcctgcgctctcccgcctcccggggctcggaggagccggggcacgttccaggagctgcctagggctgaggttccaggcctgggggtcgcttccagctgccagatcccgtgcagtcctggggaccctgagaagcaccgagccatccctgacccaggaactttccgcagactcgccgccatctggggtgagtggggccaccgggggattgtttgtggggctctggcagagcggagctcttcggattcgcgacctacctctagtgcggcccctttccccgggctcccaacgttcttctttatgtccggtctctcctccccatttctcccttttcatcacttttgtatttcttgccctcaccccctcctttttctcctgctgtcagctcttaagttcgagcctcctagtgcacagaattttgggcctgggggaggcggagcttgggtgggcgaaccccagccccactcggagactggcttctctccgggtccgctgcccttgccttctcgggaagcctcctcctcgggcagactgccacctcctggctctccaggcccagcgtcagggttcagcgcccgggcctgagcacctgcttgggcgctgcgctgggtttgggtctttgcacttacctgtcccgcttttctcgaggccccgtgtagaaggcgccaggagtttggagtcaggagtggcgggttccagccctggttctgtcactaactgcttcaccatccttgtttttccatcagtgaaattgggaaaacattttctgcgtgcagaaagcaaaggagaaaggacatgagcaaagtatcttggagagaaggcttccttcaagctccctcctgctggttagctgtccctttcctgaggacgtagttgttccagttgctggttgttttgctccctagtctcccccatgccagtttcttgagggtagggactgcctgtctatcgtcatctctgaggcattctcagctcttggagcagggcctggctaacagtaggtgctccatacatatgtactgagtgaaaggatgaaaggtgtaacccc

SEQ ID NO: 10537 - DNA, 6000 bp, Homo sapiens
agctactagtaacctctgttctactgtttgtacagtacaattgtataacctatagtccttatgttgtccctttgagctctagacttatggatcctacatatctgctactctgtatcctctcagctgcatttctccacttccttcctccagcactcctgggccctggtcaccactgtttgattctctatctctgtgtatttgacttgaaaaaaaagattccacatataaatgagagcatgcaatattttttctttctgtgtctggcttatttcacttagcatgatgtcctctagtttcatccatgttgtggcaaatggcaggactcctttctttttttagaaaaatgtttgtatatataccacagtttctttattcattctgctgtcaatagacacttggattgtttctatatcttggctgttgtgaataaagctacaatgaatatgggcatgcagatatctttatggggtggtgatttcatttccttcgagtatatgtccagaaaggggattgatgggtcatatggtagttctatttttaatttctttagaaacctttatactgttttttttaaaaaaagaaacttttacactgttttctataatggctgcaccagtctacagtcccaccaacagtgtactagaattcccttttctcgacatcctcaccaatatttgttgtcttttgacttttttgataatatccaacctaacatgtatgaggtgatatctaataatgattttggtttgcatctccctgatgattaatgatgttgaacactttttcatatgctcactgagcatttttatttcttctttggagaaatgtttattcaggtcctttgcccatttttaaattgggttgtttttctattgctgagttatatgagtttttgatacattttggatattaagcgcttattagacatagggtttgcatatatgttttccaattcataagctgccgttacactttgttgattacttcctttgctgtgcagaagcttcttagtttgatatagtcctatttatttatttttgcttttgtaatctgagcttttggtctgatatccaaaaaaatcattgccaaggccagtgtccaggagcatttcccctatgttctcttctaggagttttgtagtttcagatcttacatttaggccttttatccactttgagttgatttttatgtacggtgtaagataaacatccaatttcattctttctcacataaaaaccagttttctcagcaccgtttattgaggagactgtcttttccctattgtgttctcttgatgcccttctttaaaattagttgaccatatatgtttgaatttatttctgggctgtctattgtgttccattggtctatcatatctgtttttgtgccagtactatactgtttggattactatatctttgtaatataattttgaatcgggaagtgtgatgcatccagtttgtttttctttttcagaattgtcttgactattcagggtcttttgtggtctcatgcaaattttaggattgtttcttatatctcagtaaagaatgccgttgggattttgatagggattgcattgaatctgtatattgctttggatagtatggacatttccacaatgttaattcttctgatccatgtgcatgggatatcttttcatttatttgtgtcttcttcaatttatttaatcattgttttatagttttcagtgtacaccctattcatgtccttggttaaattgattattgagtattttttaatgctatcacaaataaaatcattctctttatttcttttttaggtaggtaattatttgtgtataaaaatattattgattttttaatttttttttgagatggagtctcactctgtcacccaggctgaaggggcgcgatctcagctcactgcaacctccgcctcccaggttcaaacaattctcctgcctcagcctctcaagtagcttggactacaggcatgcaccaccatgctgggctgacttttgtatttttagtagagacagggtttcaccatgttggccaagctagtcttgaactcctgacctcaggtgacccactgccctggcctcccaaagtgctgggattacaggcatgagccactgagcccagtcatgtatgttgatttttatgtcctgaaaatttactaaattcatgaattataacagtatttttttaatctttggggttttctacatataggatgatgtcacctgcagataaagataattttacttttttctttctgatttggatgcctttctttcttttgcttttttggctgattgctcttgctagtacttccagtactatgttgaatagaagtggtgagggtgggtatccttgactgctactggatcttggtggaaaagctttcagtttttccctattaattaaaatgttaactgtgtgtttttcataaacgaccttattatgttgaggaatgttctttctatacctaaactattgagagtttttttttatcaagaaggtatgttggggtgggggttagggaaggaaaagatgttggactttgtcaaatgcttttgccaggccaattgagataaccatgtggttttcatttttcatcctgttaatatgatgtattatattgcttgattagtgtatgttaaaccagccttgcatgccagggataaatcccacttggtcatgatacataatttttttgattgttgttgaattctgtttgcaaatattttattgaggattttgtaccaatgtgcattagcgaaatcagcctgtaattttcttttcttgtggcgtctttctctggcttaggtatcaaggtgatgctggcctcataaaatgtgtttggaagtattccctctagctccattttttggaagagtttagtaacaaaccttcttctttgaatgtttggtagaagtcagctgtgaagccatctggtcttgttgggaagtttaaacagaaaaccagaaagtcagatagtccctgtctcatcttcaatctctttatttgttattagtctgttcaggctttccatttcttcctgatttcaatcttggtaggttgtatttttctagggatttctccatttcatctgggttatccaatatgttggcaaataattgttcacaatagccccatatgattctttttatttctgaagcttctgttgtagtgtcttcactttcattttttattttattagtcttcttttttttcttagactagcaaagggtacgtcaatttaattttttccaaaaaatcaactctagttttattgattttgtctgtttttttttctgttgtctatttgatttatttctgttctgctctttcttttcttcttttaactttgggtcttgtgagctcttctttttccagtttcctgaggtataatgttaaactatttaattggtctctttcttctcttttaatgtaggcatttattgctataaacttctctcttagaactacttttgctgcattccataagctttggtatgttatgtttccattgtcaattgtctgaaaatattttttaaatttcccgtttgatttcatctttgacccactggttgtttcgaagcataggactgggtatggtggctcacacctataatctcagcactttgggaggccgaggtgggcagatcacctgaggtcaggagtttgagaccagcctgaccaacatggtgaacctcgtctctactaaaaatacaaaattagtcgcgcgtggtggcacgtgcctgtaatcccagctacttgggaggctgagacaggagaatcgcttgaatccaggaggcagaggttgcagtgagccaagattgcaccactgcactccagatggggcaataagagcgcaactttgtctcaaagaaaaaaaaaagcgtgttgtttaatttccacatatttgtgaattttccaagattcctcctgtcattgatttctagcttcatattattatggtctgaaagaatattaatatgatttcaatcttcttaaatttaaggcttgttttttggactagcatatggtctattctagagaatgtttcaagtgtgttagagaaaaaatgtgtattctgtttctgttgaatggaaagttctgtatatatctgttaggttcatttggtttaaagtgcaattcaagttcattatttccttattttctctctagttgctctatccattgttgaaagtgggatattgaccctcctactattgtgttgctatctatttctcccttcatggccattaatattagttgtatgtatttaggtgctccaattttgcatgcatatatatttacagttgtgtcttcttgatgaattgacccctttattattaaacaatgatcttctctgtctcttgtgacagtttttgacttgaagcctatttgttacataattgttaaaggaaaagtctgtaacaaggaggtaaaaggagaagcctagataatacaatactgaaatgttgccatccatttaaaaatgttactttaaaaatttgaatgtattaaaagataatgttgccctaccccacagttccatttccagtagcaaccacagatgatagtttgtgtatgcttctgaaaaattggaagttttaaaaatatgcatatttcttattataaaagcaatacaaactcatcgagatgtgtaaaagaaaatacagccagtgtaaaaattagcaatatttcacaaacccacaactcaagggacagtgctcttcgactggactctgccccatgcccaagatcaatgccctgttcagttcctattcgcagtccccagcgcccaggaacatagtccttccagcagtggcagtaataggtcgccaggtggtgctgtggagcagagctccggagctcagtgagaaaaaaggcgcggccgctcaagggagcacgtgacctcggcctctggcgtgggcggtgggatcacgtgatgaggtccggaagcggctgccgggcagcaaaggaggatggcgaggggctgatactgaacccgggaagggtgggctgtgctgaagccagagccggagccggagctggggccagaacccgagcagtgagttcctccactggctgccggctggcggcgctcgccgccttgggcaggacccacctcgccttcctcccggcgtggcagatgctccaggtcaggcactggatccgcccgggctgtgggtccgcgactccttggcgtccccgggccgcagctgcggtacgacgctgacacccctctgtgaattgggcgaagcgtggagatcccttgtccctcgcgctatctcccttgacctcgtggggttgggatctcaccgtcctgtttgactgacaggtgggggaaactggggtagatggtgaagataacccaaaggaccatctagggcgtctttcacgcttcgcacaggtctccccgtttccagcaaatgtcttgcccgctgcgggagcgctgcttgagacaggctcataatgggtctttgggtcagaactgcaaggacgctgggaagtcgtctggtgcagctccctcctaggacagttggagaaactgagcccttactccgggaaggggtaagggcttgcctaaggtcatccagtgagttaatcggagacccggagacctgcgactagaatgcaaatgttcctaagcttcagcagctgtttgcttttcgccacaccgcctcctgcgggaaacttcacctgtgaaaaggcactcctttctgtccctttctcttttagtcctctccctttttagctgtctgcattttccaccgctggggttggatttgctctgggtgtggttccctgtttgttcattatttttctgcaaactcatccttctgtaggtttggtttctaaccttcctgcattctatgtaagtcacaccaaaatatgaaatatgaatcggaatgtgcttctgggaagataggtggctgagccgaggttgtggagagccctgacgttaacttgaagaatgtaaagacctttgctttatttt

SEQ ID NO: 10538 - DNA, 6000 bp, Homo sapiens
accccctgcctggtgcatcccatattgtacaaagtgatcaaagagtccctggattaaagctgggttcttgggctagagtcctcattggggccagactgggctggcatgcagctttgatcaacaagtgacatgagaaaaagctcaaatccaattttgtgcagaatcttctaaggagctagaagaggggatgggaaggagagagatgctgagtatcttccctcctgtacttgatcttcactgctatacagtacttcactcaacaggggcttattgaacacctactgtgtgccagacccaggaaaggccacagcttagtttgtgtggctgggtgggaatatgagttgaaatccacacaccttggctctgttctggctgctttagcacaaggagaggggggatcctttctgtaagttcttctgcctggaaggagcaccagttttctgattcacaatgaagggaaatacaattgtgcatggcttagtgatggggatacgttctgtgaaatgtgtcaataggtgatttctcatagagaacatcataaagcatacttgcacaaactttgataggatagcctaatacacatctaggcgacacggtatagcctattgctcctaggttacaaacctgtacagcatgtttctgtactgaatactgtaggcaattgtaacacaatggtatttgtgtatttcagcatatctaaacatagaaaaggtatagtaaaaatagagtattatagtcttatgggaacaccattggtatatacagttcattgttgactgaaatgttgttgaacagtacgtgactttatgtgctgacagaggcacggaacaccatagaaggcaaatacaaagttcctgtctgtttggaactcacattctagacagggagaccaaaaatgatacctgctttggagaaaaatcaagcaaatggagatggtggtggtgctagttgatatcttagatcagctggtcagggaagctctctctgaggcaggacccctgatctggttcctgagagaaggcggagagagaaccatgcagaggggtagaggaagagatttctagacaagggcacagtaaatttgcaaaggccctgagggaatcatcaatttggtatacatttgaggaacatagcaagaccagtgtaactagaagagaaggaaagaaggcaaaaattagaagttgggtcaaataatgtaaggccttatgggctgtggtaaggattctcatagattgtaggttgttttctgtttatttgttttgagagacttggtcttgctttgttacccaggctggagtgcaattctgtgatcatagctcactgcagcctgaactcctgggctcaatcctctcacctcagcctccagagtagacaggactacagacacatgccaccatgcctggcttcatagacatattctaacatgaagagaagccataggcaagtcccagcagcagagttagccttgtgtgtgtaaaaagaacattctagctgctctgttaccagcactgtgctcagtgctatagtggcacctaaaagttttttgcaacattatttaattacataaatactgtgtatccactgcagtatagaagacatagggctattcatagcaacattattcacagtagccaaaaggtagaaagaacccaaatgtccatctactgatgaatgaataaacaaaatgtggcatacatacaatggaatagtattcaatcttgaaaacaggaatggaatttggctgagcgtagtggctcacacctgtaataccagcactttgggaggccaaggtgggaggatcatttgaggccaggagtttgagaccagcctgggaaacatagctagacccggtctccacaaaagatttttaaaaaatcagctgggtgtggtggcatgggcctgtagttctagctacttaggaggctgaggtgggagggtggcttgagcccaggagtttgaggctacaaccagctataatcctatgactgcaccagtgactgcaccactgcacacctgcctgggcaacataataagacactgtcaaaaaaaaaaaaaaaaaaggaatgaaactcagatacatgttacaacatgggtgaatctaaaaaatattatgagtgaaataaactggaaacaaaagaactaatatgatatgattccacttacatgaggtacctagaatagtcaaattcaaaaaggataaagtagaatggtgggtagttgccagcagttgtggggagagggtaatagggagttagtgtttaatgggtacagagtttcagttgggttgatgaccagttctggagatagatagccgtgatggctgcagaacaatgtgcatttacataatgccgctgaattgtacactttaaaatagttcaaatgatcagttttacaaacgtttatcacaaaaaaatgtgtttaaaaaagacatagagttaggagctagaaatagaaaaatggccattctaggcagaggtaacaacaggtgcaaaggtactgaggcaggactgtgcctgcctgagggatgctctgaggaacaacaaggaagccaatgtcactggggcacaataaggacagtaaggagtgagagctgatcacatatgggcttgtagggtcctgtactttcttaggaacctaatgagaggtgggaagccactacagggatttgagcagaggggcgatacaatctaaccttggataaaacaagatcattctggctgccacattcttttatttatttaattaattaattaatttatttatttatttatttttttgagatagagtctcgctctgttgccaggctggagtgcagtggcacgatctcggctcactgcaacctctgcttcctgggttcaagcgattctcctgactcagcctcccaagtagctgggattacaggtgcccgccaccacgcccagctaatttttgtatttttagtagagacagggtttcgccatgttggccaggatggtctcgatctcttgacctcgtgatctgcccgccttggcctcccaaagtgctgggattacatgcatttttaaatctgactctcattcgccaatgggtataagaaaagcatgtacctcacagggtaactgtgagcatttaaagaggtaatgcatctcaagggctgcctgacatagagtaagcactcaataaaaggtaagcattattgtgatggaaatctaaagaaagaaaacagttccctgaggaggagttttagaaggcttcgtggaggaggtggcagtttaactagacacggaaggatgaacaagatttccaccgacctagagaagggggttttatgggtagaaggagctgcgtggtcaacagcacaagaaggaaaacacaaagcctgcaacaggctaagcgaagctcagggcagggcagggcagggcacggcaggagacagaacgtttgatcagccctagcaggtcataggagaggagcatgatggactctagagccgaggtgatggaagccttgaaggttttgctgcagaaatcaagaactgagctgtgatgtcagaaaactgaatccccatcgctcagcctggagctggaagaacttggaggcaagagttgccagaacgctggtcaaggactagtggcagctaggcacgaaggtcagcggctgagctagagaagcagagaatcaagaggacgaatgtgggggtggcagagagtaaggtagccaagggggtgctccgttccaccgcatcagggaggaggcagctaagtgaccagcgtcgagcgccccgaggaggagccgctggctggcatcaccgtcggagtccggctccacggccctccgcatcgcccagaagcccgactcctctgtcaaagccctcgccacagttacagacacattgcctggtctagtgaaattacgtgtttcatgtttcagctcccagacgtcagggctcaggtctgttttcatttcatcccagagcctggcacagtgtttggcacatagtggcgctcgccaacggtttgctgagagctttccgggaagggctcagtgcgcttaggatccaaaagcacgcgtgagaatgcagggcattctaactccaagggggttggacttgcgtgaggaaaggtgctgcagagaggctaccgtcacttacccacccgccggtttgcaggatctacagacgggcggcggccgggcacagctccctacagtttgcagagggcgttcacacctaacgccagggcccccctagaggaagaaaaccagggcccgcccgcggaacagtgagcgtgcagcacggctgtggccccgtttcatggccgggaacaccgagtcgccggggtcaaagtaggtccgcaggtcctgggggccgagcctaggtgggctggaagtgacagccccgggggctccaggctcagaacgcccggcggggccccagcactatttgcatatccccagggaggcagcaaaggttcggctgcagtcccgggcggaggttgccgggcggggcggcagggtacccgggcgagcggacatgcaccccacccagcggtgcccagcccgcaccagttagcgcccaactcgccaactccgggactttcgcaaagctccagagggcgggggagccgccgaggagtgggacggaccatcgcggctcgagaggggggaagcgctccggcccggcatcctgcagcgcccgggcgggccgagacgctccgtgagagggccgagcctgcagcgcagagactcggcggtcgacgcgggggcaggcggcgcggggcgggcggctcggcggggcccgggggcggtggcggcggcgacgaccccctcgtggcggcggcgtggtggcggcgcccagctccccggccggcgagcggcggaagtgccgcggagttggagcggggccggcgccgcagccgcttctgctggctgagctgctgccgccgccgggcggacgggcggacgcgcggagctgggggcggcgcggcggggccggcggggcgcggcggggctgaccggccccgatgaggcggaaggagaagcggctcctgcaggcggtggcgctggtgctggcggccctggtcctcctgcccaacgtggggctttgggcgctgtaccgcgagcggcagcccgacggcacccctgggggatcgggggcggcggtggcgccggcggcgggacaggtgagtccccccgttgctacaggccgggaacacccccttcccgaattcacttttagcctgtggttccttcctccaccttctgctgtctgcctcctcagagtcagctccgagactcttcagctcttcccattttccggatgggaaaattaagtcctgtcgggacttgtccagggtcccacgccagtcagagactgagtccgaactagcactcaggacgctatttctcaccacatgttaccaccttcctttctgtccccgtctggtattccttgacgtcttccagcggatctcttttgaaggatcctatctgcatccctgtatcccaggatgactcctgccttgtgccaataggaatgaagattctggttcttctatttggtgtccaggtcctctctgcttccctcctcccacccccccccccccacaacccctacctgctgatcccagtgttctttgctcaggtcagcccttttcctgatttctcatctgcccaacgagacacccgggccttcctcctctccccatttattcaacacccccgccccaactctagccttttcctttctcagatcctgtggattccttgcagaatgtaaagatcatgctccctttaaagcttcaagcccctgggggtggagaagggggtaagctcctggtccttgagggacctgctgcctttgaccttatgggagtccagaggtggggctctggtggggggacccccaaaatgtcccagaggctattggtgcccagtgtcctgaggatggaacaccagaagccttccctatctcttctgaacttgtctagtctggttagttgtagtgtttattgcagccaaaac

SEQ ID NO: 10539 - DNA, 6000 bp, Homo sapiens
gcctccactggagcagaaggatccatttccaaattcattcacagggttgttgtcaggccttagctcaaccttgtccaatgtgtggtctgcaggctgcctgtggccccggatggctttgaatgcatcccaggacagctttgaatccagcccaacacaaattcttgaactttcttaaaacattatgagattttttgtgatttgttttcctcatcagctattgtttgtgttactgtttttttgtttgtttgttttttgagatggagttttgctcttgttgcccaggctggagtgcaatggcgcaatctcagctcactgcaacctccgcctcctgggttcaagccattctcctgcctcagcctcccaagtagctgggattacagacacccaccactacacccggctaattttttgtatttttagtagagacggggtttcaccatgttggtcaggctggtcttgaagtcctgacctcaggtgctcggccatggcctcccaaagtgctgggattacaggcgtgagccaccgcacccagcccgtgttactgtattttatgtgtggcccaagacaatttttctatttttttttttttttttgagacggggtctccctctgtcacccaggctggagtgcagtggctccatctctgctcactgcaacctctgcttctcaggttcaagcaattctcctgcctcagcctcctgagtagctgggattacaggcatgcgccaccatgcctagctaattgtttttgtttttagtagagacggggtttcagcatgttggtcaggctggtctcaaactcctgacctcgtgatccacctgcctctgcctcccaaagtgctgggattacaggcgtaagccaccacgcccggcccctaagacagtttttcttcttccagcgtggcccagggaagctaaaagattggacacccctgccttagaagaatcacttgcaaactcacccacaggggcttttccttagggcacagaagccacacacagaagccagcttatccagggtgactgatccaagagatagcaagagagtgtccaagacagaagtcaccatctcttgataacctaatctcagaagcaacatgctcatcacttctgccatattttgtgcattagaaatgagtccataagtccagcctacacttgaagggaggaaattacacaagggtatgaataccaagaggtgggttaattgggacaatttcagaggctacctgccacaggtaaggtattattatccttcatttcatacctagacacccagctagttaagcaactggtccaggtcacccagcagagagtgatctgagtccaaagtggttttctatttccccaggctggcggggggtgagatggaggaaggcagggagaagttactggtaggaaaaaaaaataatgaggatggagtctctgttatttatctactgctgtgtaactaattacccacaacttaatggcttaaagcaaacatttattatcttatagtttctatggatcaggaattcgggagcagctgagctgggtgtttctcagggtctctcaagaacctgtggttaagctgtgggctggggatgcagctttgaagccctgaccggggctgagccgctacttccaagagagcccactcacatggctgttggtgggaggcctcattcctcaccgaccaggcccctttataatcgtgcttgagcctctttaggacaggcagttggcttccctcagaacgagtgattcaagagtggctaagcagagcctcagtcttttgtgacgtagccacaggagtcataactgtcgtttctgcaatatcctgttgattacacaggataggtcagccctattcattgtgggaggtgattctagaagggcatgggaataccaggagatcagggtcactggaggctggctacctaccacaggcttccacaagattgataatccgaaaacttaacttgtattgttgttccctgctcaaagagacccagagccttcccacgtactgcagacacaatctgattttcttagctccatctcccactggctcttgagtggatggaccatctgggactgacagcctggtctgctcacagacctcaccagtcccacagcggaggcccatgttgatacctcccctcccatccgctgttctgttggtaaggcctgcctccgtgggaaggcctgcctccctgggaagcctctattcaaacttcaacgcatagttagtgcatccccagcatgtgcagggtctggctggatgctaggatatgatggtgataccaccttgtctcagggaactttcctttttttttttaaattatactttaggttctgggatacatgtgcagaacgtgcagttttgtcacacaggcatacacgtgccatttgtgtatggcatcattgtttgtgtacccatcaacccgtcatctacattaggtatttctcctaatgctatccctcccctagccccctaccccccgacaggcccctctcagggaactttcactcagatggggtagtagttactagcgaattaataataacctaatcacacgtcatgcccagttctcccaaggaaacctacaaggtaccatgcgattatgtaataggggactggcctagtccatgagcattggggcagtcaagtagctagccaggctgcataggtgtatcagcattgggtttaggtgtaagtgtctgaaaatacagaataacaatagcttaaataagatagatgtttgtttctcttgggcaggtgtttgaggacaggtattttgccacttagagacaggaactcaggttttttttttttttttttgagacagagtctcactctgtcgcacaggctggagggcagtggtgtgatctgggctcactgcaacctctgcctcccaggttcaggcgattctcctgcctcagcctcctgagtagctgggattacaggcgtgtggcaccacgcccggctaatttttgtatttttagtagagacagggtttcaccacatgttggtcaggctggtctcgaactcctgacctcaggtgatccgcccacctcggcctcccaaagtgctgcaattacaggtgtgagccactgtgcccggcaggaacttaggctctttttgtcttgttgctctgctctgtggtggcctccaccttatggtccaggatggtgacgcctacattcctggcagccagatggagaaagggacacagagggtaaagcagacataccaactatcccagatgccccacaagacacttccctttacttctcaatgccacatctagctacaaaggaagctggggaaatgcaactttcactgtgagcacccacatgcccagccaaaagttgggagctctatccccactcgaaaagagcaatgatagtcaaccctgtcttgcatttactctgtgccaggcatttgctgaccttggatatcatcccaaatgcacacttgattcagtaggtctggcctggggacaagagtctgtcctgtgatggccatgtggctggtctgtggaccacagtttgaggagggaggattcgaggtcaaagatccatcattgcatgtttcctcccacacagggccaacgaatggctgtttggaagcagtggctgctcaagatcccttaactctccctgctgtccctaggtttccagttcaggctgagatttccttttctcccccaacagtgtcagaccactgacactgaatgaatgaatgaatgaatgagtgaatgaatgaaaagggaacgcagaggtcaggtcccggcatatgctctaggggaaggctttggttcaccacgtcaccctaccccagaccccgtgctagtgttgtcccttctgaatcctcccggaggaaccagcactgctgttcccctctatttacacagggggaaactgtccattgactctgcttttggaacccgagccctcaccattctcccctgggttttttgaagccctgtcccaccacaaccttggagaaagggccagtgacagaacctcggggaagttcagagtgagtttcccctactcaggtcttgtgtgacctcaactaccatctcctctaatccagcagtcacggaggcagctgctctgtattcctgaggaggaaactgaggctctaagaaggagacaatcggcacagtccacgttggccaagtcacagtgcaggtcccatctgcctctgccacaaccctgcatgttctcgatggacctggttcagagcagatgctctgtgaatgcccactggagtgaacgacaggggcagatggaagcagggacagccactgccagcctcaatagtttcaggtgcctggcactgtgctaagccagtctcctgtttctcagctgatccccaggaaaaccccctcaagtaggtgtcatcgtcctctttgtgcagatatgcaaaaggggcggggcggggggggggcgctctgagaagcccagtggctttcccagagagacacggcaggggcagaggtgagtccaccttaacagcctaggatggccgacctcttcccttcccccacagtattaggccctcactcagagctagacgctgtgcacggccaaagtctgtatcaccccgccccccgcccccaactcaatcacagttcagtgaaactgtttacaaatgcaaaaaactgggctcggagaagcagagaatttgtccgagggcatccaaagagatggagaaggaaatctaagtgggaggcttgaaggaatgagtactggagtctttgggggactcccttcccttccgacagcctcgactctccgccccttccctgcctgcccgcgggcccctttaaccgggtggcggaaggggcggccgggcgggcggcgcccaatgggctgcgcggagcgtcacttcccggcagcgggaggcgagtggcgagtggcgagtggcgagtgtcaggggggcggccggcgggggcggggcggccggaggaggcgttggcagcgggctcggacccacgcggcgccgcggcccgcctggcctgcagcgctcccacccccggcggcggcacgatgccctttgacttcaggaggtgagtgtggcgaccccggccagtcgggagttccctcagcgggcagagggagcgccccggcacgccgcggacccctcccgccctgcatgcaaaagcggctccccgccctgtgcatgcctccgcaggcccctagggaccccaggcgagccccccccctgccgcacacgaagccagccagagccgcggaggccccctcgtgcagcgggagacaaatccacccaccttccctccgccgagccccctccccagcctgcccggataccttgcattcccctcccccacactaggaaacatttcctccctcctcccagatgggaacagcccataacaccccagcatccctctcctccctctactgagcctccttggtggaccccacctcagctgacaggtggggcagggcacctggaatgagtccggaggggcctggggccccatgcagcctgccggcagctggagggttttaagtttctatagcctgaggctcccccaggccgggcagatcgggaggcctgcccccgcccctccctccctcagccccagccctgtccgctgggtatgggggcaccatgggaaggggaggaggcgccttgggcaggactctgcagaagggccaccggggtctggccttggctttctgcagtcaccacaatgggtcctttgtggggtccagctgcctcatggtctaggttgcatggggcattctggaagcctgcgggggaagagatctccaccagaggttcccttgaggtgtggagccccaggggatgtcctggcctgaggcagccacacttggtgtctggctgggaaaagagcagggctttaatgcagggaggagctggattagaatcctggctctgccctttctactgaacagctcggtatattctagaagttaggggcaaaggctctgggttcagaactccctgtcgcc

SEQ ID NO: 10540 - DNA, 6000 bp, Homo sapiens
ggcagacagtatctcttcatttgatgggtcactgaatggggacagttttcatttggtgtgtgataaaatgcttttgacagactggctgatagagggagctataggctaatgctagcccacatatataatactgagatactaacttttctcctttcacagatgaaaccaacagatttagacagaattggtgtctaaagagttacatccagccgggcgcggtggctcacgcctgtaatcccagcactttgggaggccgaggcgggcggatcacaaggtcaggaaatcgagaccatcctggctaacacggtgaaaccccgtctctactaaaaatacaaaaaattagccgggcgtggtggtggctgcctgtagtcccagctactcgggaggctgaggcaggagaatggcatgaacccgggaggcagaggttgcagtgagccgagatcacgccactgcactccagcctgggagacagagcgagactccatctcaaaaaacaacaacaacaacaacagagttacatccctggccgggtgcggtggctgacccctgtaatcccagcactttgggaagccgaggcaggtggatcacctgaggtcaggagttcgagaccagcctggccaacatggcaaaaccccatctctactaaaaaataaaaataaaaataaaaattagctgggcatgtagcacgtgcctgtaatcccagctactcagaaggctgaggcagaagaatcacttgaactcaggaggcggaggttgcagtgagctgggatcgtgccattgcactccagcttgggcaacaagagcaaaactctgtctcaaaaaaaaaggaaaaaaaaaaaaaagagttacatccttgtacttccagacattgcttctcaaagaggctgcccagaagataaagcaaaggttagacacaaaaagggatcaatttaagacaaaaatttccacttgtttaagaaatgggaaagaattcacaatagccaaaaagtgcaagcaacccaaatgtccatcgatggatgaatggataaacaaaacgtactgtatacacacatggaatattattcagcctttaaaaggaaggggacattctgacacttgcacaacatggatgagtcttgaggatattatgttaagtgaataagccagccacaaaaggacaaatgccgtatgattcctcttgaaggaatctagagtagtcaaactcacagagacagaaagtagaatggtgcttgccatgggctagggggtggaatatgggaggtggttgtttttttgtttgtttgttttttgagacagagtcttgctttatcaccaggctggagtgcagtggcgtgatcacagcttactgcagcctttacctcctgggctcaagcaatcctcccacctcaccctccgcagcagctggaactacaggcatgcaccatcatgcccagctaattttttgtttaaattttttgtagagatgggggtctcactactgcacctggccagaagtggttgttgaagggatatgaaaaagttctgggctgggtgcagtggctcacgcctgtaatcccagcactttgggatgccaaggcgggcaaatctcctgaggtcaggagtttgagaccagcctgggcaacatggtaaaaccccgtctccaactaaaaatacaaaaattagctgggtgtggtggtgcatgcttgtagtcccagctacttgggaggctgaggcaggagaatcgtttgaacccaggaggcgaaggttgcagtgagccaagaccacaccaacctggatgacagcgagaccctgtctctaaataaattaataaaaataaattaaaaggttaagatagtaacttttatgttacctgtattttaccatttttaaaaggaaagggcctgactgcggcagctcatacctgtaatcctagcattttgggaggccaaggcaggaggattccttgaggccggagttcgagaccagcctgggcaacatggtgaaaccccatctctacacacacatacacacacacacacacacacacatacacaagcacacacacgcacacacacaattaggccagcatagtggcatgcgcctgtagtcctagctactatggaggccgaggtgggaagatcccttgagcccaggagttcaaggcagtagtaagctatgattgtaccaccatatgccagcctgggtgacagagcacgactctgcctcaaaaaaaagaaagaaaggggctgggcatggtggctcactcctattatcccagcactttgggaggccgaggtgggcggatcacttgaggtcaggagtttgagaccagcctggccaacatggtgaaaccccatctctcctaaaaatacaaaaaaaaaaaaatagcctggtgtggtggagggcgctggtaaatcccagctactcaggaggctgcagcaggagaatcgcttgaaccagggaggtggaggttgcagcgagccattgtcatgctactgcactccagcctgggcaacagagtgagattccatcaaaaaaagaaaaaagaaagaaagaaagagagaggaaggaaggaaggaaggaaggaaggaaggaaggaaggaaggaaggagaaagtagaaatgaacttctttctctaattttgttctgacctcatcccttcttagctactcaattcagttgcacagttatttattgagcacattctatgtataaagtcctcccggaaacaaagatcagtgaaacagtgcctattctcaaggagttggccctctagtagagggttggtcaagatacatatacaacaaggccaaagagatgcgctaacaggatgaaatgggtcttggagaaggcggtgtttgggctagaacttaaggaccataggatttctgctggggctaagttttggggaagcattatgagcacaaaggagacaaactagttttctacattgctgatcaggttaaaggcttagaatcatgtccgaaaagttggtacagatgttgaagattattggtccagtttcccgtttaatacaggaatccattctacttgatgaaagaaatcaggagttaatgcaatgtggctactgcaaggaaaccatggtccctggtaaagcacattgcatttaaagacctgctttctatcttgctttcacctgtaagctttatcatcaagctcctcaacctctctgagaactggcttccttgtctattccaagcttggcgcatactataactaacatatgtgaaaattctcagcaagcgttctaagccctgtttatcagctcagcacggtggcttatgccagtaatcccggcactttgggaggctgaggtggaggatcccttcaggccaggagtttaagacccaccggggcaacatagcgaggctctgtctctacaaaacattttaaaaattagctggtgtggtggtgcacacctgtagtcccagctcctcaggaggctgaggcagaaggatggcttgagcccgggagttccaggcagcagtgagctatggagcaccactgcactccagcctgggtgacagagcaaggccctgtctcaaaaaacaaacaaacaaacaaaactgttttacctttctttttctttctttctttttttttttttttttgaggcagagtttcactctgtcgccaaggctggagtgcagtggtgcgatctcagctcattataacctctgcctcccagggattcaagcggttcttgttcctcagcctcctgagtggctgggactacaggtgcatacctggccaatttttgtatttttagtagagatgggatttcaccatgttgcccaggctagtcttgaactactgacctcaggtgatctgcccgcctcggcctcccaaagtgctgggattacaggtgtgagccaccatgcctggcctgtttttcttcttaccattctggctaatttctacttgtctttcaaggctcagcaaggacgagttgggtagaaagccttgcagggtcgtccacttactttcacactgcattgagtcgcctgtttgcaaggtcatctgctccccagaatgtgaactccctcaggggtgcctgattgacttctgtaactccagagcctggcacagcacacaagataaatagtggtgcgctagttaagagctctggccttgaaaatcagataatcaggggttgaatcctggccctgccacttactatgtgactttgggcaagatccttatcctcttccctgggcctcagtttcttcaactgcaaagtggggataataattacaattacctcataggctgaagtgaggagttcaacacgggctcatgcacttttttttttttcttttgagacagagtgttgttctgttgcccaggctggagtgcagtggcgcaatctcggctcactgcaacctccacctcccgagttcaattgattctcctgcctcagcctcctgagtagctgggaccacaggcgcgcaccaccacacccagctaatttttgtatttttagtagagacagggttacaccatgttggccaggctggtctcgaactcctgacctcaagtgatccgcctgcctcagcctgccaaagtgctgggattacaggcgtgagccaccgcacccggcctggggctcatgaacttaaagatcatggcccagtgccaggcacacgggaattcagaatagtaagggacaactattgttaagttctctatgtctgttgcataagtagatgaggctgtagataactacactctttgtctaaaagggccaagttctcatcagaacactttgctgagccccgggtgaccgaatccctagctctggggtgagcgacatgcctccaaggagctgcagccaggagacagccaggcgaaggcggggctctgcctctgggctccccgaggggcggaggccggcgcgcgggtcacgtgggggcgcgggaggcggggcttgcacacgctggtcacgcggtcagctattgacacttcctggtgggatccgagtgaggcgacggggtaggggttggcgctcaggcggcgaccatggcgtatcacggcctcactgtgcctctcattgtgatgagcgtgttctggggcttcgtcggcttcttggtgccttggttcatccctaagggtcctaaccgggggtaagtgcgtgaggcccgccttgggaggaacgggcggtgaggagctagcaggccggggcggggaaaggcacgacccccacacgggtcagagaacgttgcatgggcgccccccgcgctgcagagtcaggcccccgacccggcggaactccttgtgttccttttcgcagcagcttcagtgtcctccggcctgagcgagtggagggtgacctttggtggaccccccttggaaacgagtttcaggggaattttttctcatcatagtcctgtgtggggaggtgcagtcggaaatgagcaggccgaatctgggagaaactggggtttgtccctagtcgactgtccccctttagccctgccttccacccacatgaggcctcgtttgcctgaacttaaggatcaaataaataaaacagaaattggcttctctgcctcccatgctgtcgcggttgcgtacagaacaagctccttcgacaacattgagcccaggccttgcatctagtgggcgccaggaggcggttggggcctgatctaaagcgagattaattaccaaagagcaggaggtattgttgagaaacccctgcgtcatgccttttggagggcgctccggctcttgtatgtgagtgtaagaagtgcttagaatgattggctaagaaagattttgtttttccagacttctttgttggttagagctttgtctcttttggaattaaactttttaactgtagtataaaatagaggcttaatcttcaaaggagccttggaacaccctcttcctggttcctcttttgcttctcagtcatttttttctcagttcaagatgatgagaggtgaaacttcgactgaagtcagtttgtcagaaacaccatctcttgctttattc

SEQ ID NO: 10541 - DNA, 6000 bp, Homo sapiens
agttgtcttatatattactctacatacattgaatacctcatcagaagatgttataatttttgttttcaactacaaacatattttaaagaaatccaggccaggcataggtggctcatgcctataatcccagtgctttgggaggccaaggcagaaggatcacttgaggccagaagtttgaagctgcagtgatctataataggattgtgccattgcactccagtgggggtgacagaacgagaccttgtctcttaaaaaaaagatcattacatagcagaaaaatagtctattatactataatggtctattgtattaagaacccctcacagtagagtaactatgatttataaaaatctattgtatatttcaaaatagctggaagaagaaaaaataggacctcgccaaccaggagaaaatttcccatatcacttcagccttctgtttcttcctgcagcttctctcctggcctcacatatcaggagacctgaatttcccactgccttgagataggcttggaccttactaaactcaatacaactggcttgaaattattttttgaaattttgcttttaattaacacataataattgtacatatgtatggaggatggtgtgatgttttgatacatgtatacattcttttttttttttttttttttttgagacagagccttgctctgttacccaggctagagttcagtggcatgatctctactccctgcaatctccacttcccaggtccaagtgagtctcctgcctcagccttccgagtagctgggattataggcacctgccactaagcctggctaatttttgtatttttagtagagacagggtttcaccatgttgactgggctggtcttgaattcctgacctcaggtgatccccctgcttcagcctcctaaagtgctgggattacaggtgtgagccaccgtgcctggctgatacatgtatacattctacagtgacaaaatcagggtattttgcatgttcatctcatttatttatcatctctttgtatgagaacattcaaaattcttttagctcttttaaaatatacaatacaatattgttaaccatagttaccctactgtgcagtgtaaaagcagatttttttttttatttaaaaatatttattgaacaccttctctttacttggcaataggtgacatgctggatatacacggtgaacaaaacaggcacagtcctcactttattgggttctcattaaccaaagaagttttattgatggaaaggattcacacatataatgttatataagttatttaacccctttgagtctcagttgtctcttctataaaatggggttagtaatattttccttccagaattattatgttcccatcttgttcataatgcatatccctggttatctgccatatagcgggtactgtatgtttattacagaactaacgaatacataaaaaatgaatatataggtcccttaagcaatgggtccacattatacagtagccaatattatggacaatattttctcctcctttttaaaagtcagtgtcacagataacaacaataagtgtgacaacttgtatttgtttactctcactttttttccttgctaatttttaaagataatatgtctttcgtagggacatggatgaagatggaaatcatcattctcagcaaactatcgcaaggacaaaaaaccaaacactgcatgttctcactcataggtgggaattgaacaatgagaacacttggacacaggacggggaacatcacacaccagggcctgtcgtggggtggggggaggggggagggatagcattaggagatatacctaatgtaaatgacaagttaatgggtgcagcacaccaacatggcacatgtatacatatgtaacaaacctgcacgttgtgcacatgtaccctagaacttaaagtataataataataataataataaaagaaatgagccaggcacagaaagacaaatatcatgtagtctcacttacaggtgggaactaaaaaagttgaacttagaagtagagaagagatggtggttaccagagactgggggtagggggaagacattggtcaaaggatacaaaattttgattatatagaaggaataaggtaacggcagtatttattcttcctgtctaacagtaactttgtacccctggaccaatctcttccccttcttccccactccctactatctccagccactgctaagcactattctactctctactactatgagattaactttttgttttttgttttaagatttcacattagtgagattgtgcagtatttatccttccgtgcctggcttatttcattttacagaatgtccaggttcatccatgtagccacaaatgacagaagttattttttgtggctgaatagtattccattgtgtatctatatatcaccttttctttatccatttatttgtcgattgcacacttgggttgagtccatatattggctattgtgaacagtgctgtcgtaaacatgaaaagtacaaatatctctttgacatactgatttcccttcctttagatgaacatccagtagtggaattgctgtatcatatggtagttctatttttaaatttggaggatcctccatactgttcttcatgatggctgtactaatttacattcgcactaacagtgtataatagttcccctttctccacgttcatgatggcatttgttatttttgtcttttaatgatagccattgtaactagggtgaggtgatatctcattgtagttttgatttgcatttccctgatgattagagacattgagccctttttcatacacatgttagcaatttgtatgtcttctttagagaaatgtctattcaggtattttgccattttttttttttttttgagacagagtctcgctctgtcgcccaggctggagtgcagtggcatgatctcagctcactgcaacctgtgcctcacaggttcaagtgattctcctgcctcagcctcccaagtagttaggattacaggcatgcgccaccatgcctggctaatttttgtatttttagtagagacgggatttcaccatgttggtcaggctggtctcgaactcctgaccttgtgatccacctgccttggcctcccaaagtgctgggattacaggcatgagccactgctcccggctgccaatttttaaatcagatttttgttttttggctgttgtttgagtttcttatatattctgggtattaacccctggtcagatgcatagtttgcagatattttcttccattttgtaggttgtctctttagtctgttaattatttcctttgctgtgcagaagcttggcttgaaattattaaaagtgtgatttctatgtgtgaatcaatcacaagacatgtcaaaaggaatttctttttcctctggaggaaaaagattaaacacaagggttcacaattgactccacgtggttatccacattgtgttgtcacaatgattgcacctgaaaactcatctaggtctttggaaagaagagaatggaggactaacatttactgggacactcccatattatgtatctgcctacttctattaatatagccctgtgcagctcagatgtgctagcttttgttgtctcagaaaatgtctctctctctgtctctccacacacgtgtcccccccccccacacgtttcattactgaacaatatatataatacttacgttttctcctgaccttttagctagcagagtgtatgctcagcacatgagcactaactagggtgacctaacaatttatcacataaactagaatacttttgaaagcaaaaggggaccctatgacaaatgccaagacagctgggcctcatgaagtgcatcataagcagcactgcagctgggaatgaacaaccatcagtgacttgaaccacagcttggtgaagacagtggcaacagccttgacctcagaggatttgaagagaatctgtgagcaatccccggggatgaaataatgcagccattcagaaccttgtccctgagcagtaaggggtttccttgagcacaatctcttctcatatttacaatcgctctcctgagcaataaggggtttccttgagcacaatctcttctcatatttacaatcgctctgcaagagagatattattattcttacgccagagaaaaggaaatggaggtttaaagaataaatgcaaaatgtccaaaatccatacagccagaatttggtagagcagacactaggactttgccctgtctgattccaggcaccaacttggaagccatgcaatgtcctgggctggatacaaattttggtggccaccgatcagggttcaaattccagctctggttaccgtggctgccctgtatgatcacagtgcaatgttgagtgtagtagctcatgtgaatacagtgcttgccatagtccctgctctgtactacatgcattccctatgctatcccatttcatgctttgtactaaccccatcatgtgtgtactattagaaacaccattttgcaaatgagggagatagtctgaaagaggctggaaaagtgcccactgcatgaaagatacacaataaatatatttcccttctgtcctgaccacagggtcagagcacagtagaggtcttgaaccattctgtgttttatgatattgttctggaaggtcttaggaggcaatgccctctcctaatgaatgtgcctgcttttccagtttttccaaaggctcaaggattacttgttatatggtgcatattaattatttttttggtgtggccaaaatccttcccactttcttgaaaccattttgtcccgtgcagtggttgtggccatgcataagaaacagcaggtggtgccagatgacagatggtgtgggagcgcgttccccggtaggagggggcgcgagcgagcaagcaggcaggcagctgccaggagctcttccctgctcgctcacgcctgctctcagaagctccgatccagacacacgcgaggcgctgtcctttcagcaccacaagctcgggctgaggagggaggactcctggccgtcctcctcctcttcaaattggcttgaatctgctctgaccccccacgagtgcagcacagtaagtaggcatttgtttttgctataaccactccccaatatcctccaacccctttcacccccacaacaaccctgttttgtctaaacgttccatcagcaggattgagagaagaaattcagttgtgttgagcttctgggggtgggaggggagcaccatttgacttctaagggatctggagatgaataaatgtgatttgtttatttagttggcaatcctgcaatatgggggctgctaactttccatggaaccaaaaaaaaaaaaaaatggcccttcgctattgaggaaatggaggcattccatggctgaataacaggatcaggttcaagctagccttttttttgtttgtttttattttaggaaattgcacctcatgtacaatccacatatgatgtaacagggtacacattgagacgttgaatgtatttattgtgttttagggtattgctgatggaaaaccaacataatagaatagcaaccagagtggtgaggtgaaatttatcatactgcaggcggggggggtggtataataggacttcattttgcactaagtataatctttttactggcattgtgtgagcactttagctctagtgtcttgggtatttgttttacacttatattttttgtgtgtataggtttaggattttccttgaattccttaaatttgagtgctgttgaaccccatgggaaggtggcatattttgatgattaaagaagttttgttggacaatgggaatcatgtctggaaatctagtggaagatcaatgactgatcactagattgaaagccacttgagtggagctgttgaggacagtgctattttctctgtcgtcagccctctctttctgcctcacctcctgctgtaaccagaatcccactgcttgccttaggtctgggaaga

SEQ ID NO: 10542 - DNA, 6000 bp, Homo sapiens
tggctccctgtcacccccacacccccttctttatttccttataggacttactaccttctaacatgctatatattctacacttttttttttttgagacagagtttcgctcttgttgcccaggctggagtacaatggtgcgatctcagctcaccacaacctccgcctcccaggttcaagcaattctcctgcctcagcctcccaagtagctgggattacaggcatgcaccaccatacctggttaatactgtatttttagtaaagacagggtttctccgtgttggtcaggctggtctcaaactcccaacttcatgtgatctgcccgccttggcctcccgaagtgctgggattacaggtgtgatccaccatgcccggccttatatattctacttattcattgtgtttattgtctgtcttcatttcctacacaatcaactgcatgagggcaaggggctacatgtgttccattcaccgtagactccttagcacttagaataatgactaatgtagaatcagccactgttcaataagcatttagtgaataaaaagcataaaagaatgaataatgaagattatgatgtgacttgagaacatgtttataaaatataactttgagtgaagaaagcaaaacataaaacacatggaccaggattctcaccacatatttaacaaacaaatacagcattcactggatgtcctgctagacaccagggacagaaagttgaaggacagagtttcttgtttgaaagagttcatgggctagagagaagacaggactgtaaaactatgcagagagagtttatgaagtgctgcaggagccatgaagctggaactctaagaaaaacagctctcaattaacaaggctcaccattgaccaggcaccctgctcatctctgcacatatgtaatctcaggtaacggtcacgatggccccaggtaagtgttagtcttaccccatttagacataaaccaatgcacagcaagatcaaggaactaatttgtgtagggtctaacacccgatccaggcagaggtggaatcagaacccaggcggacccgtctgcagatcctgtgtgcttaagcactgtgccacttgcttctgggtttctgcatacagagagctgaaactcaagcatgggatgaacagaagtttgatgggtcagaaaaggaatgaaaatattggaagggaatacactaaaaatctagcagggagatttctggggagtagcattgagtgtacacttgtacttttctgtacttttcaaattcatttgattacgtatttcttttataatcaaaaacaacgtggcggccgggtgcagtggctcacacctgtattcctagcactttgggaggccaaggagggcggatcacaaggtcaagagactgagaccatcctggccaacatggtgaaaccccgtctctactaaaaatacaaaaattagctgggcatggtggcgtgcaactgtagtcccagctactcaggaggctgaggcagaagaatcacttgaaccagcgaatcagaggttgcagtgagccaagatcgcaccactgcactccagcctggtgacagagtgcagcctgatgaggctctgggaaaaaaaaaaaggctaatatcatctggaatttaaagttttcattaaagagttcatttaaacaaacaacaaaaaatatggttctcattggattacctgtcctgtcctgatgaaaacttcactttgtgatacattcagcaagatctttccttggctccctgaacttttgctatgctcagaaatgctcccaacctttgctgatttaagcattgttttgtttttgctgttccctgaatggtcaaagtccatattaaaatgcaagggttttgcaacttttgttgatgcaagcctagcaagaattcccaagcattcgttttctgaatcaaagagaaatgtcatttcagctttatggaagctgtttctgaaatggttgtaattgaaacaatgactggaaatcatacaaacccttgctttccacttttaattccctctcatttttcttccttcatccatctgcttttcccactttttcaaatttggtcgcactagctcagatgtcaccacctctatgaacatctcctctcctgttagtcagggatggaaattcaactcacaagagcttaagattttaaaaagaaggaaaaaggaaaaggaagggaaaagaaaagagttggggtgggggatgggggttattgactcccatagctggaagcccaggaggtagaccaggaggcagatctagcctcgggcttggctgagtgtagggcctgacatgatgtcatctgacttctgtctctctcacatcttttagcctggcttcacctccacagctctagcagcccttaatccacattctcttagattagctgtctcaatatatgtgtgtggtggggaagggaggcggggaggagaggttacttctcttccccagtgcctacatataaattcagggcagaattctgtttggcccagcttgggccatgtacccatgactgtggcaggcaggaggagatcaagtaccatgattgataatcagacaagatcaaatgaaatgtggcaggggaattccccaagagaaactgagatgctggaaagacaaaaactacatgtgacagaatttttgaagaaaaaaaaaatccacaattctccacgagtctatatgtctacacctgcttaccacgtttcttggcagctcctctcagcaaaagataaagtctatttcaccctgaataggggctggccttgttgacctgctttgaccaataggatgccttggaaatgaaggtttgccagtttcaagccttggcctcaagaggccttgagtgcatcaactctctcctttctctgcctttgccatgtgaacatttccaggccagcctgctggaggaatgagacatggagcggagccatccctacccagttatcccagctgaggccccagacacatatgagagagcactgccaagatcagcaatgccactgatggcccaaaggtgaccatagacacatgagcaagctctgcagagcccagctcaggtcagcagaacctcccagccaacccatacactcaagaaaaaaactaaatgtttactgttgcatagtcccaaggttttgcagttgtcttatagcattactgtggcaacagacaactgacacatttgtatctactaaacctctccacatgcccattctgcaggcaactagtcaatcccttctgtgtgttctcatggcacttagttatacaatatattccacattctactgttgcaagttttctattgaattgttaccatttatttcaaacaagtatttacatgtctatctccttgctcacaagctctttggagaaactggttttgttctgtttttttaataattgttagttttcttttgtgtgtgtgagagagacagagacagggtctcactctatcacctaggttggagtgcagtggcacaatctcagccgactgcaacctccacatcccaggctccagcaatcctgctacctcagcctcctgagtagctgggaccatacgccaccatgcccaggtaattttttgtatttctggtagagatggggttttaccatgttgtccaggcttaaacttcttagctcaggtgatccacccactccggcctcccaaagtgctaagattataggcatgagccacagtgcccagccaagaaggggcgatcttttatatatctttttgagcccagcacttggcacagggtatggtacagagaaaaagctagttaaacattcataggaatttggaggatgaggaatagcactcaaaatatctgtgacatattgcttaagttttagaagttttgtttttcacgtttggatcattaatccacctggagttgagtttcatgtattatacaagtagggatttggctatcccagtactgtttaatgaatatctaacctttgtcccctgacctgtgatgccaactcacagcaggtttctacatgtgcaggtttctacatggatggcaactctatttggctccgcgaggctctttgttgaccccggagcaaacacaccacctttgttatttaccattgttttataacaagttttgtatctgcaggacaagtcactctgccttgctcttttcttaaaagcttgtttggctgtttctggctctttatttttttcatgtacattttgcagtccgcttgtgcagttataacacacactccaccaagcacactagtgttgtcgaatttttttttattgtcataggtcatttgggagagaatttacatctttaaaaatggaatcttcctatgcaatttatgatgtaattcaccatttattagatttcatttgccctttaaatatgcccaggttacccacctggtccaaaataccatgattcctctcctggataaccacagcatctggctaaacagcctctctgcctccacatcccctcccacgcagtctgttctccataaagaagacagagtgcgccgttgttgttgttgttgtttaagacataaatcaggtcgtggcactaaagtcctaaaatcgccttgtagcgccagtcttgccaagctccacactttaattgggtaaatgactgcgtgaacggatgctggctacgccaaggccctgggaataaagaaatgataaagaagcagtcccttaagggaaacccaaatggaacatagtggccccagcccgcgcagagccccacaccaccgtgaggatgggcttggagttcctcttggacccggggcgcggtcgctaagccagaagcggagtcgcgggcgcggggcggggcctggacccgggcctggacccggagggcgggtccctgggcctcgtagctcccgggcccggacgcgcgctcacaggcgcgcgcgaggacgcgctccggggacgcgcgaggacgccgtggcgggagaagcgtttccggtggcggcggaggctgcactgagcgggacctgcgagcagcgcgggcggcagcccgggggaagcggtgagtcgcgggcggcaggcccagccaggtgggtggggaaacgcgcagggggcccggcggaggcgcgcaggcttgggcaggctcgggccgtgcacccgcgggccggctgcggggagaccccgggctcggaggtcggaagcccctttgcgggccggggatgcctcgggccggggggggggtccctgcacctggggatccctggcatcctgcggccggacaacaccacgcttccagcatcccgaggcccagcatcccgtgggcctcgtccccggtgggaagggccctccgccgcgtccccgcgcgcctggccgcgctgtcttcggcgcctgcgtggcgaactcgctccggggacaccaagatggctgcctcgggggcagcggcagccaggtggcccagtgcctggcccagcgctccgcgctctcggctttgcctcctggtgctgggggtcggaggggagaccacctggttcctgccctagaactcgcaatccagtagggaggtgatgtgcaaggaagtagattcttggagtagtagttggtcctacagggaccttgcattttcacgcttttctcctgaactttcacgtctgtcacaggtctctaacctgcccagaatgacaataaacagtctactaagtgcgtgccaggtgacttaggtccatatacttttacactcttccggccctgcgaggtactgggtgttggctctataatccacatgagaaaactggggctctgagaggttgagtgcccaaggtcacacagctggccatccatagtccaaggccatctgagtctcagtcgtaaatactgcgttctcaaagacgcttttccttggctatgctgtctaaaattgcaccccccatccccccacacaccctttgtaacacaaactctgggttttttctctttagtgtcttttgtcactagttgaaattaaaggtgtttacatgttttcttctcctcatgtgaac

SEQ ID NO: 10543 - DNA, 6000 bp, Homo sapiens
agggactcccagccccgagacctttccaatgcctctctcaaggttctcagtacacgacagccaggaaatccgcacccacacagcccaaccacagttcaggtgccctaccacaaacccagagctaccacacagcacaggatgcagacaagaaataaccaatgacaaaaaccagtaggtttttatcagaattttccacagaccacttaggtaaaagttattaccataccatgtcattcagtatcttaattgttgggtttatgggtttttttggtggttgttattttgttttgttttccgatttcaagcagtcagactcagcagggattactcattccaaagaaagtacgtttttctattttggtccaatagtggtttggatttcctcagaatgagaggcctcttccggcttcctttgaaagatggttcttgttacatacagagagccagaagggatttcgggccatcagatcccaaagccctccggcaaggcagggagcctcaattctggttattcgtaacaacaaagactccttttatgatgaagatgcttaggagcttccaaaggttttcagatctagtacagaattggaaattttgagagctggacagggtcaacagtgctgtcctgatcagatgggtggccaaccatgaactgcttccagcagtaaatcactttacagtgtgtgaaggatatcactaccctattagaacctctacagctccattgcatttaggatgaaatccaccaccttaccacggcctacaagaccctgcaccaaccccatctctggccattgtccctcttcttcatacacccggccacaccgactttgtccctgttccttgtcaaggccaagcttgccctacgctagagcatttgcacttattggtccttcaaaaggaggctgctcccccttctcaacaaatgcctggctcagtgcaaatgtcacaggctcagaaaatccttccccaagtatcttaaacaaagtgctagcccagtcaccctccatgacattaccctgttggctttccccaaagcaattatctgtagctggaattattgggctcatttcatctacctctagcgtggcaggtccttgcttattttgctcattgctgcatcccagagtagacccagtgcctgacacatacgcagtaggtactcaatacatgtttgttgaatgaataaatgaattttatatcctttctttaaaaaaacctgagcctcatccacacactttacaacagacattgtctctttacaaggttaatgttactgttatgcgtattttatggtcaaggaaatggacttcaagatgggtgctgattctcccaacgccacttacctagtcattcactgcagcataacaaaccactcgagctagctttaaaccacttgaaaccactccactagctttaaacagtgcttcttgtgctggccccacctgagcttattcacgtggctgcattcagctagtggtctgctgtgagggctgcaactgctgggcatctctctccgtgcggcctttcatcctagatagcttcacagcatggtggtcttgggtatttttcggagaaggggaaagctaaggctgccaggtctcttaaggcataaccttggaagccacactgcatcacttctactgggttctatgggccagagcaagtctcaaggccagtccaaagttcaaggagcaatgaaatatactccacctcttgataggaggtgctgttccattgtaaagaagcctgggctgaattgccaggtttgtctttgaaaatccatcacagctagtgagtattggaaccagcctggctgagcttgtgactcactaaggcagaccaagggaccgtgactatccagcaatatcagatgactctagaaaccgcaatggcctacaacgtgtaatgtaagtatctctcacttacacatgtccactggcggccggctgggcctctgcagtttcactctgggacccaggtgatggagcagcctctcccctggcacaacgcctgaatggttccagtcttgtggcagacaggaaaggaacgtggcaggcactcgctggccctaaagcctctcctcagaagaaatacacatcatttctatcagcacatcagtagccacacaagtcccagacacatcatcctctttccgggagggtcactgaagatgcatggatggtgattccatcaccccggagcccgttttcctcttcagctcctttaaaaacacattctttactgagtggaaatgcatctcattctatttctaccattagcctcagtgctgctctctcatctgttccctctgcacagaggtccttcatagagatgaaggtcactggagccttctctactccaggatatacatcccagactttccagccctcccctgcttaaagacctgccataatccccctattgataacaggatcaagtccaaactgtcatctgagtccttcaggcctcccccgatcaggttcccactggcctctccagccttgtctcctggctctgtctgtgctccccacaccttggcttgcagccctgctgaacctcacgcctcagttcctttctctgtgctgtgacctcaacctgcacagcccttcccctcttctctagcttgtgaaatgttgctttccttttaggattgggctgtaaagtaatctctttgaagataatcctgtttttcctttgtcaggttcaatcaactttttcattttctaaacctctttgttatagcatttttttcattcactcattcagtgaacatttattgagtatctactatgtaccaggtaccattctaggctctgcaaagacacaaggaacaatacaggtaaggtctcaatccttcctcagttgtatgctggtgagataaagtaggcaataagcatataagcaaatgaaaaacaaaataggccaggcgtggtggctcacacctgtaatcccagcactttgggaggctgaggcaggtggatcacaaggttaggagtttgagatcagcctggccaatatgctgaaaccccatctgtactaaaaatacaaaaattagctgggcgtggtggtgggcgcctgtagtcccagctactcgggaggctgaggcaggagatttgcttgaacctgggaagcagaggttgcagtgagctgagatcacactgctgcactccagcctggcgacagagcaagactccatctcaaaaaataaataaataaataaataaataaataaataaataaataaataaataaaataaaggaaaaatgaaaacaaaataattttagacagtgataaatgtgttaattacaataaaaggggcttctgtgaaaaacactataggcaagaaggtgattcctttagataagttggttaggggtgggttcactggagaggtgatgctcaagcagctatgggaacagaggagagctttcctggcagaagaaacaacctgtgcaaatggcctgtggtatggtgtgcttggcctattccaggaacggggaggaagccactgtggttgaggtgcagagagagaggtaaagagtggtgagtgatgagatcagacaggtggctcttgcaaaccacgtggggtggggcctcttagcagtgacaaggaacttggattttacctgaactacagcaagaagtcacaggaggtctggaagcagggaagtagaaaggcacgatccaatttacacttttcagagattctctgagctgctttgtgaattgcaggtgagcaagagaggcatccagaagaccagttcggaggctcttgtcattccaagatgacaatgacttggatgcacgtgcaataatagcctccccagaaggtgtgaactgagacctaggggaccatggcccctcatcctctgcatcgcagcccctggcacagggctggtccatggtgacagaatggcttgaggtggtgcatcaatcagcagtggcatgtgtctgaaacgcatgctagctgaaccctcctcgctttcaccatcctttgccaagcttccacagaaatccccctccacacaccaggctccccaagcaaaccggggcagcccagctgaccgcctgcctcccctgcactgggctgctgtccaggcctggcgaaaatctctcaccatcctgcccacccaggctccctccacggagatctgtgtggttagcacagtggccttgatatcttgatatttaggagacggcttttcccatctgagcctccattttctcatctggaaggtgggtgttattctccctacccccaaaaccccttttcccaaagcccacttccttacttttctctctcttcatccgttccttcaaccaaaacaaagccactgtagggtttttgaagtttcctgattttttttttttttttgtgattaataacccctggactaattaatttctgcatttgtgtttctagatttcagattccagaattattcaagcttttccctcaaaactagctatttcccccttctagcctgactctagctgggtcctgggcgcccaatgtgagggatgtcacctgacctcctgggtctagcgcccacccggggcaggtcctccagctgtggccactcagccaatatctgcacaggtggcggttgcccggtcaagggcgggctcacaatctgcggggcggggagagggaaggagccagggagaaaagggagagaaagagggggcagtgtggcagaaaggaagaggaaggggcaagtgtcagagtcggcgagatgaggagggagggtgtaggagaaaggaaaatagaaagtgggtgagaccgtgggagagggagactgggggagaaaatgtgggcgtgtgcgcgctgagagagagagagagagagagagacttggagagggaaggaagggaaggagcgttgagagcaaggaggagcgagttgggggcggagacgaggaagtgggtgcgaggcgcggggcgcaggccgtgcgcgcgccgcccgctgcatccctgcccggagcgcagccggcgcgggcgcgggaccgaggcgaaccgggtgcggagccaatacccgcggcagcagcaccaggtaacgcggccgccgcctccccgcggggcctcggctcggggtggggtcccaggcgggcttggggacccggcgtgggctggcggagccgcccgaggggctgctcgggatccccggcggccgtcgtggccccgaacccgggttcgagcctcggccccaccgctccctggctgtgcctgaccttgggcaggtgcctccgcctggcctgcgagcctcagtttccttgtctgtgaccgcgggggtcgtgccttccccaagggggcgttgagagctcgggatgcagccccggtgcacagcagtgctcgggacgcgggtcggctttatatcccctttgcccgcgaagggtggatttggaaagtgcacttgcgccgaaacagtccccgttttgtctccgggtctgggtggtggcattttctcgcggcgatgtgtctgtcggagcatggagcaactttctgctaaagggaagccagcggagagcgggggctgctggggaggaggcttctatgtctcaggaaaccagaacgacctgccttcatcccgctgggctgccgcccgctgccggatgaccgatgaccggagccacaacaggcagcgctcagcgggtgggagtccttgctggggacatctggacgtggatttgcctgtgggatgagcagagcaagtggcctctgataggaatcccaatctgggcagtgaccttgagcttgagagcctcagtttcctcctccatgaacagggccatgctaatcccccaccccgtccatgaggtgttgtgaggcgaaagaggtggggcaggaaagtgctgtggtgtcccccagtggcagctgtcatgccctagatcagataggcccagtcctggaggcggttgcctcttgggaagtcatttgtatgcctcaggtcccctctgtgccctttgccagagagggtcaatcggtgaagctgggtg

SEQ ID NO: 10544 - DNA, 6000 bp, Homo sapiens
gagccatcgggatgaggccagaggccgtgcctagaagagcaagtgaacgtagcacttgctgacaggcgggatggcctctcagccccggtagaggtggttttcaccggggcagccccagggtttggctgagagcagaaaaatacaaaatcatcagagaagtaaaatatatttgctttattatgtacacactatatttacatcacccaccctgaaaacagcaggttctggcttttccgtgaacccccagatgaatataaattggagcctctgagaacagttccttccccagagcggggagtgtgcacgtgtgtgtaaccttctgattccatgggacctggccagctcctctggagccacacagcacctccttgccttacaccctggctccagcttcactggtccgggggacgcctcagcctggggcagctgtgatgtaaaccagtcactccacctccatcttcctcttctgcaaagaatcgaggaagtcttgccactctgctgggtaaaagcgtttatagacgttgatcttactccgaatctgttttggggtatcttgatagtaattcttctcatcacgggccatggcctaagaggagaagggctactttaaggagggctagacaggcaaaggctcaaatctgaactcatcctgaattaggcaagccacttgctatctatccctgaggtccagaatcctgacctcaaaggctgtggtgcaccgggcacagtggctcatgcctgtaatcccaacactctgggaggccgaggtgggaggatctcttgagcccaggagttccaggccaccctgggcaacccagtgagaccctgtctctccaaaaacaataaattaaccatcctgtggtcccagctacttgggaggccgaggcaggaggactgtttcagcccgggaggatgaggctgcggtgagccatgatcacaccactgaactccaccctgggtgacagagcgagattctgtctcaaaaaaaagaccaggaaggcctgagagtccagcgggccagggaggagctggggccagctgaggagctcatgacccatcatagccagctaatcctacttgggcccaggggtccagtgtagccggatctttcaactgttaaaggaagccaaaaatagacttccatcctgggtgactgagcaagactctgtcttgaaaacaaaaacaaaccaaaaaacaccatgcgagcaaaacatttatctgtgagtgagactggaaccaaggtcactcagtctatccttgccataagcattcattcaagttagatccctgtcaatgggatccatttcctagagtctcttttgcctccctttctttgcactcggtttcaggaaacaggtgctgcgcaagcagatcaagccgcgaatggtccagggcgccttcccagccagcccacggggcctgagccgctcaccttatagtcctccccgtggttctctaccatgtagcgtacatagtcaatgaggtcccgagacagagtatttcctttcttttctggaaggctggcttctgcctccaggtctggagtgatgagagaagcggggagacagggaatgaggctttgctttctgtgctctttgagctgtccaatcaccccttcacccactcccaagccacaagacccaccacaccaaccacctgggggtctttgcctccccattcccaaatccattgttggaacctccttcagccccttggatcccagactctgtctcctatgacccactcatctaccagtatggcaacttttggaaagggaagtcacttctctccgggcctcaggtggatttacaaggaaggtaccagactaataacctctacttagtggcaggtctcaggacagagatgaaggcacatacctgcccacaggacagggctcccttccagctataagcctctcagagaagctcttgatgtattattgcaacacatgaaatgggacggtctaaatacatgagatctagagctgccgggtctggggcctgaggctgggccccagcaccttactagtgctccatgggagagaaaaagccaggatgtggagccaactaatggcttcacttttaaaatagacaggcaaatcctactccatttctcatctagaaagagagagaaagagctacctcagagaaatgaagtagtcgaatcatatccagaggttaggtcctcatattgtatatagtcaaaattatctttgacacggttgccaggggctggaggtagaggaagatggggagttgtttaatgggtatagtttcagttttgcaaaatgaaaaggttttagggacctgttgcacaacaaagtcaatatcctttactgaacagtgcacttaaaaatggttaggatggtaacttttatgtgttttttaaccacattttaaaatttttaaaaatgttcctctttgactacagtaagtgcctatggcttggtatatacaatcctgtgcagtaattcttatgagaaccactgagataaaagacaggaactcaaggaattctgtatcaaatgtctggccattcaaatcctttatctttaggggagctgcttaaactccctgacaggtaaggggaaggatgaatgaagaattctagagtattcccactttcctgtagggtttactctcctccgttttagcgttcactctctatagccttaatatacataaaatcgattttgtcattggaacatttattgagatggtggaatccctaaaaatcagttcatccttaaattcatgagaagccatacccatgccagagatttactggtttctcttctattctcccaggcacctgggtacatcctccctaaacatctctgaccttagttcacacagtaaggtcagggtttagtcagtacaatgaaaaatgagccagccaggacacagtcctaactctgtgaactttgaaccagctcacttctcccctctgaaacttggtttctccatctgcaaaatgaggacatcttagggcccttcccagcttcccacagtgcaggacagtgacctaaaggaatatatggaccacacccaccattcagcacatagggcttccgtacaagctctttaggcctctcctctatgtccacctccatggccttcacctgcagagaacagagcccttgagaccagaaggatctttgatgagggaaagttatagactcctgcttatcccaacacaactactaacccataagaatccctgcccacggttaggtagaagtaggtaacaatgagaactaatgccctggaggctttttctctctctctctctttttttttttctttttctttttgagacagagtctcattctgttgcccaggttcaaatgcagtggcacaatcttggttgactgcaacctccccccgggttcaagtgatctcctgcctcagcctctcaagtagctgggattacaatcatgcgccaccatgcccagctaaattttgtgtttttagtagagatggggttttgccatgttggccaggccggtctcaaactcctggcctcaagtaatccgtctgtgccttttacccccaacacaatcttggtgacaaggactttgtgttttgttctctattaaatccccagggtgcttaggatgtgacatgttctcaataagtagttaacctaatgaatgggcttcgcgaatgaatttgttccattgccttaggcaagtttctttttattctttcatgccagaggaaaatggcactaccatttcttgaataaatgtgaggctacagccacacagttagatagtccctaaggcaaggagtgttatacccattttatagataggcaggcagagaaagatgaattgcttgcttttcttttgggaacctggattcttttaatagttgttgaagcctccagggggccaggcggatcacttgaggcccagcctggccaacatagcgaaaccctgcctctactaaaaccacaaaaatcagccgggtatggtggcacacgcttataatcccagctatttgggacgctgaggtgggatatagcttgaacccgggaaggagactgcagtcagggaagcctagggaagcctcagaccaaggatgattgaataacaaagaaaaggtgtaagtaaagatctccaactcttagggagtactaattaggaaagttaagggtagaaaaagataaattaaggaaaataccgttgagatgctaatgggttaatttcagagaaaaaagactgagtagagggggtatggggaatgtgtgctggggagggagtgtgacgaaggtcgtaaagagacccttgctcaacgtcagttgagcgttctgactgtggggaggtcgaaaactcggaagggcctgagggaaggaatgggcagtaccacgttctgacacctaggtcagtatggcgggggaagagtaaagaagacaaggaccgagaccctgccatgtcagtacctttctcttacggaggggcaccgccctgttggggtccacagccaaccccatctcggccaggttctgccgtaccgatttagcgtggtcccaggcatgtcggatgtgggagctaccggcaaagagagacatcgcggatccgtcatctcgcggaccgtcccggccgaggcccacggccacccggaaccccagccccctcaccattcgatccgcggcgctgccttccgtcgagcattccggttcagacgctttcggttgacactgtaaccaaacttctgcctccgggttttgcccttggccttgggcatcgcgctgaccaccgcaccagcagctcaaacacgctgcctctgtctctcagacctcgtgtaacaaactccttccggaaggcgtgcacaaggctttgcgggcatttggggaaatgtagtccttttgtagcactaccgtgctgagcactacgactcccaggatgcaacgagcatttgcgcctgcgtacaaggctcaatttattcgtttccccgcccctttcatgaccttcaccgggaggctgaggtcggagtcccgattttctcctgctgctgtggcccggacatggcgactcccggccctgtgattccggaggtcccctttgaaccatcgaagcctccagtcattgaggggctgagccccactgtttacaggaatccagagagtttcaaggaaaagttcgttcgcaagacccgcgagaacccggtggtacccataggtaagtgggtgcggtaggaactgcacaaggagaggacagtgatgtcggagggaaggaagtagagaaggaccagagcgctagcggggagcggaaggagagcggactagagaagagacgagggggcggggcggtgaggggcgaaactgattggagcgggagcagcgggtttagggggcgggatttggggcctaagattgggaggactctgtaactaggaagacctcgactcgacctaccctcgccgccctccctccgctgtgatccagagatcttggctttggggaagcgagacccaaagcggggaatgacctgcggggcccgacctgctgtttcccagttgctttgtcccctcctcaggttgcctggccacggcggccgccctcacctacggcctctactccttccaccggggcaacagccagcgctctcagctcatgatgcgcacccggatcgccgcccagggtttcacggtcgcagccatcttgctgggtctggctgtcactgctatgaagtctcgaccctaagcccagggtctggccttgaaagctccgcagaaatgattccaaaacccagggagcaaccactggccctaccgtgggacttactccctcctctcctttgagaggcccatgtgtcgctggggaggaagtgaccctttgtgtaactgtaaccgaaagttttttcaaaaatcctagatgctgttgtttgaatgttacatacttctatttgtgccacatctcccctccactcccctgcttaataaactctaaaaatccacttgtatttaattcagtatcatccccatggtttttggt

SEQ ID NO: 10545 - DNA, 6000 bp, Homo sapiens
tttttttctttcttctatttcctttcttcttttcctttattttctttctttctttctctctttcctttttttgacggagtcttactttgtcgcccaggctggagtgcagtggcgcgatctcggttcactgcaacctccgccatccggtttcaagcgattctcctgcctcagcctctcgagtacctggggttacaggtgtatggcgcaacgcccggctaattttttgtgttttagtggagatggggtttcaccatgttggccaggctagtcttgaactcctgacatggtgatccgcccgcctcggcctcccaaagtgctgggattacaggcgtgagctaccgcgcccagccccgagttctttctagggtgggaggctgtgagtctgtgacatcacggggatattcttgggctggttccttgtctgtaagagcaacgaagggactttgtaccctgcaaagtgcaacttccggggatgattgggaagttgaggggttgaatgcattcacaccagagtcactctcagcccagactctccgggtcacctctaaggctgtgcactaggtgggcgtcagaggtattacaggtaaagaaatggcggctcagagggaaggagagacttgcctaacttcagggcaagctaacgcttgatttcaacttgataaatttctgagtatgcagtgggtgcacatagcagagacaggtaatgagaagttttcttttttccttttctttttttgtggggggtggggacagagtctcactctgtcacccaggcaggagtgtagtggtgcaatctcggctcactgcaatctccccccaccccacctccaggttcaagcgattcttgtgcctcagcctcctgagcagctggcactacaggtgcacgccaccacgctgggctaagttttgtatttttagtagagatggggtttcaccatgttctacgtttcaccatgttggccaggctggtcttggactcctggcctgaagtgatctgcctgcctcagtgtcccaaaagtgttgggattacaggcgtgagccaccgcactcggccgagaagtttttctgattaaaaaaaattttaaggcacacacttcagacagtggctgtgaaggaaccctgatgtgtatctaaactgtcgcctcgtgcacatcaccccattacttactctgtgctaagtgctgtcatgcattacatcattactccttagaacaggcctatgaggtggagtctgcattaggcccattttggacaaggacaccaatagtgtgggaggtggtgtaccttgcccaagcccccagcaggtaagtggtggtggggattaggacccaggtcacttgagtccatatcctgggctcttagtcccactctgcctggctgcctgctgctccgtgaagccaaccctggacctagacctggacctggatcgtcatagcccagatccctgtgtgcttcccaggctgccttgtggcaggtggatggtgcccctcgagatgggcagggcaccatctggccacacgtgcctcatcgtgatgggtccaaaggtctgggcaggccaggacacacctctgtcaaccagagcagtgactcagagctgtcggcctcagccgtaagggcagggagagggggcaggggcttgggttggggtctgccctatttggggcacagcagagcgaccaggctgactcccatggtctgaggcagagcggggagcctggagccttgggtggggtcacctgcctctcttcttactggttaagccaccagcgatgactagtgcctacttccttcagagaggaatctgacggctgtggcaggaaagtcaggggcaagaattgttgcacagatatgctaatatctcagttctgccactttctgtaatctcgggtggtgatctaatctgtctaaggtctattttcccatctgtaatggggaaaaaaatcatccctggagttattggcaggattaaatgaggtgatattagtaatgcaatagtcaccaccatgcccccacgaaaactaacattcattgagaccttattgtgttgggcattgtgctcaggacttcaaatgggtgacttcattacatcctcaccatcacctgcccaggtaggcatcatgtattacctgcaacttacagataaggaaaccgtcttagagaggttatgcaacttgccctgccaaaattgaacccattgtgaatatacagtagataaaaaaaataataaaaataaaatgaaattaaaaattgtggctgggcagggcggctcacacctgtaatcctagtactttgggaggccgacacgggtgggtcacctgaggtcaggagtttgaaaccagcctggccaacatggtgctcaaaaaaaaaaaaaaaaaaaaaaaaaaattgaacccagcagtctgaccccagaggagcctggtctctggtctcttaacccctgcattgtaatagtcgcatcgagcgctacccagtgtctgcagcatcctttcctcagaaacacttctcaaaaagaggaaaagcctcttgggtatcaaaactcagaactgcatcatagctcccagagcctggctatacgcaaagtggtctttttggtctttttttttttttttgagatggagtcttgctctgtcacccaggctagagtgcagtgggacaatcttggctcactgcaacctctgcctcccgggttcaagtgaatctcctgcctcagcctcctgagtagctgagattacaggcacctgccaccgtgcacagctattttttgtatttttagcagagacagggttttaccattttggccaggctggtctcgaattcttgacctggtgatccacccgcctcagcctcccaaagtgctgggattacaggcgcgagccaccagcctatgcaaatgttttaaaatggatggatgctggactcaatggatctcaattcccttttttctttgcctggggggaagctcagaacctgattcatgacccatctctacaattacccagaacttgaaggcaaatatatatatatatataatttgtttattttttgagagagaagctcttgttgtctaggctggagtgcagtagctattcataggcacagtctcactactgatcagcacctgaagtttgacctgctctgtttctgacctgggctggttcagcctttctgaggcaacctagtggtcctctgctccttggggttcaccatattagtgctgaatttagtgtggacaccccatcagcatagtgccctacagcacagaaatcctggcctcaagccatcctactgctgcagcctcccaagtagctgggactacaggtgcacagcagtgcccccagctcaagacaagtattttatggcctcaattcaggcgtagattacccttatttttctcacttgacttcccttcatctgggtttcttctttttatgctggtggcgtataaattttgttactatgttttacatttggagagttgggaagcaaactattaaaatgcctgactatagcaactgcctgatatacagtcaacacaacccttaacaacggggacaccttctgggaaatgtgtcatcaggcaatttcgtcattgtgtgaacatcacacagtgacttacacaaacctaggcggtaccacctactacacacccagtctctataccaccgcctgtgctcctgggctgctaacctatgcagcctgggactgtaccgcacgctgcaggcaactgtaacacaggggtaagtatttgtgcatgtaaacacagaaagggtgccatgaaagatgatattatactcttatgggaccgctattatatgtgtggttcgttgttgaccaaaacacagatatatggtgcatgactatatatctattgtgaattagacatgtcctctgcccacaagaagagggccacccaatggtgacgactcagtggtgtgccttaagaaagttgtgcccagggtcccctttctgtgtcaactgtgatggctgggccaaagtgaggataagaaggacttgtggctgagccccttcgggaggccaccacatcgggcagcgcttaaagccagcctgggggccgagctccgtggctcatccctgtaatcccagcattttggaaggccgaggcaggcggatcgcctgaggttaggagttcgagaccagcctggccaacatggtgaaaccctgtttctactaaaaatacaaaaaaaattagccgggtgtggaggcccacgcctgtaatcccagttactcgagaggctgaggtaggagaattgcttgaacccaggaagcagagattgcagtgagccaagattgtgccacttcactccagcctgggtgacagagcaagactctgactcaaaaataaataaataattaaaaaaaaaaggcaacttgggagtggatgaagcccctggggacgggcagatgccttttgagggtctcaatgcggggtgagatcagtgtcaacaggctcgaaagtgggttgtccaggctcagctagcccccagtcctccacgagaacctcacaggggctggtctggccacacagtgtttgattgttacactgttttaccacttccctctcctgactcaatcccccacttgtccacagatcccctgtcactgaagactcgtagcagggaggggacgggggctctggcatcaccttctgactgtcaccgtccccgcctccagcctgccccagtgttgggccttgttcccaggtcctctgggctcagggtcggccaggccccttctcctgtggtgtgggcctccagccccaggagcgccaggagctctggcgccttggtcccttcctcctgtccggcgcccccagctgtactctgcctcattaggagtcgacccctcctgggaggtgtggtctctggcagggttaatgattgctcagtggaggtggagatggtgccaaagtctgctggccacatagctgcaggccgcagagggtgcccacctgtgtgccagcgcctgtccggcgcctgcctgccgcctccgtggcgaaggggacacaggtagggactatccagctcatcgggggtctctgggccagagaaatgtgggggttggggggatccctagagccaaggcaagcttgggggtctttaaaagtctcccctgaagctgggcaggggaagtcacacgctagatggggcagagccgggtcaggtcccagcctgctgtgaggcctgtttctttggtaaacatgggataataatacctccttccctgggggctgatggcccccttcccatccaagtcctcaagggatgattcttcagaggatggaagggaggcaggcaccccagggaaacgaggtaactggcctgaccccttcataggatgctcaggggttgaggacggggaagctgacctgggctcttaccccagctgctcggttcacatcccagctccaccctgaccttggtgggctacttaactcttctgggcctccgtttcctcatttatcaaatggggatgagaagagttccagaaagggcctgaaaagccctgaggcaaaggtgagcatgtggcctatgaccgagcccagtgccacctcagccagtgctaggaagtgtcaggcagggactgacccaggctggccccagctctgcccagtccgggccttgcacatctctctgccctggtagaggaggtggtgacccagctgagagtcggggccatgctgcgtcactcaggcaggcctgtgctgggttgggcaccaggcacaaggcagggtcccagtgagcaccgaggtccggcagatggaaacaagtcatggcccgtgtgtagaccccttgatttttatcctcactctgcttctcagcaggggaaactgaggcctggagaggggagagggcttgcctggggttgcacaacaaatatgtgaaatgctgccatctgaacccagggctgtttgagtctgtatgtgtctgctgggccaggtggcctgggccataggcactgggagggcccgtggcggggagc

SEQ ID NO: 10546 - DNA, 6000 bp, Homo sapiens
cacggccatgtcagtgtctctgcttctgccatcggcagggccgtccacctcacattctggggtcaccctccacgggatgcagaccttgctttcccttcgagcaggctccaaatattgacgcttaccttcaggtcttggcccccatggtgtggggcttggtcacagctgcttccccagccccaggcctgcacgaagaaggcactcactaaatgcttgctgttgaggtaatcagcctggcctctctacccccagtgcaccatggccccgccctctccccccccccccccgccccaggtgggcggggcaggtgctggtgggttaaaagctggtagctgggggcttttcagatgctgggtcctccatggagtttgagctgggcatggctactgaaggccttgtgagtcccctgccttcccctcctggagcaggggatgggcagggtgggcacagggacagccagggccagagctcacaacccatcctgactcctttttttggctcaggtgagtgaagctgagggtggaatccgagagtgggaggaggaggagaaggaggaggaggcagcagagaggacgcccacaggagaaaagtctccaaactctcccaggactttgctgtctctgagagggaaggcccggacggggggccccatggaagtcaagctggagctgcaccccttgcagaacaggtaggcaggagcctgcgagtggaacacagccccttgctttcaggccagcctctgtgctggcagcgtggccttgggcaaccccgcctctcttggccctagctcttcatccgtgggaggccagggctgacctaagccttgggccctgttggcccttccagccctaaccccgcagagactgtgggtcaaacacccccactcctcccctgcccttcaggacaactgatttcattcacctgagaggggaatgctgtgccccaaatctcatctcccagttcgcccttgaaggggagggtcctccctgtcagtccaggtgccccgggggtggacttggctctctgcttcctcctggctgcctcccccttcccctaccaggtgggctctgtggttcttcaagaatgaccgcagccgggcctggcaggacaacctgcacctggtcaccaaggtggacactgtggaggacttctgggcgtgagtgtctgtccccagtggggctagagttggggggctctgagctctgggctccctctctccgggttgagccagccctccctagggcctttcagcctttgtgagggctggggctttgtgggttctgcccagggggtatagggcacaaccaccccccaccccaccaccttctttgggctcagggagagagcctggggagcaggagaagcaggaagctgaccttgactcggccactccagggctttgtgacctgggcaagttccttcccctctctgaacctgtctcagctgcaaagggaggactcggctgcctcagtgtccgggtgctcacgggagtggctctgaaaagggctacacaagccctagggagggtgagaaggcctcggctgtagctggaggggggagcaccagggggtctaaaaccctccccaggggttggctcagccttcactgggaaggctctgtggaaaaggtgggtcttgagagtttggataaacgggagtggaatcccaggtggcaggccagtgtaagcaaaggcttggaggccatggggtcggatgaggagttgggagggctgaacccagttggaaccaggccctaaaaagccttgacttttggcatggggtcgggggctctgtccaggctatacagtcacatccagctggccagcaagctctcctctggctgtgactacgccctcttcaaggtaagctctgctctcctctttccctcccgcaaagggacaaggggttgatccctcccggactccactgcgttaatccctcagaggggtgggggtggggagctacgggccacctctcagcagagttgtggtttctgactggaggaaatgctctacaggagcccggacagagtaggtcaggcccaagccgcaccttggaggaccttaagaggcgggaagagggagagggagagatttctgacctggctccttaactagggaagggcatcagaattgcttgaggacactcattgatgccacacccatccctggagggctgacattgtgtttagagatctccccagtgacttctgccctgcctgggaaccatgcagccaagcctgggatgtcccccttgcctgcattggggtctgcccctgaggcttccttaatccaccccgatttgaatgcttgtcttaaggaactcagtaaaagagacatgcacatatacaaggctatacaaggtgaccagtgctgtctgtcggggggagctgagtggctgggggtggaacctgcttgcactgagggaagggaggataagagaatctggcctacttagggcctcagcagagagcggataaggccgggatggtgggtgggtccccatttccctttgaacacagggaggcagttgacttgccatctgccttgcaggatggcatccagcccatgtgggaggacagcaggaataaacggggtggccgctggctggtcagcctggccaagcagcagcgccacattgagctggaccggctgtggctggagacggtgagttggaggaggagggtcctcaggggaagagacgggctgtgtgggtctcatggtggcagtggtctcaaggatggcaggccagtccctatgtcccagccggtgatctcacaaccccctacttcgggtccagctgctgtgtctgatcggggagagctttgaggaacacagcagagaggtatgtggggccgtcgtcaacatccgcaccaagggggacaagatcgctgtgtggacgagggaggcggaaaaccaggcgggcgtgctgcacgttgggtgaggagggtctctggcacagggtggggacttgggtctctgctagagggaaggtgggtggagggggcttggcctgcatgggagacctctgaaagtctccatagcctccctcccttctgccttgcccacctgtatggaaggtctggcgttcagatttctaactttctcttacggcagtgcagctctccttttgcattaagggggtcatattttgggtttccacatgggtaagacacaacaggtgtggctgtggccagaatgagggtaggagtctggtggcctaagttatctctaggaccctctgatgactacctgtgtctcttttcctctgtgtcccccgcacctgcaggcgtgtatacaaagagcgcctgggcctctccccaaagaccatcattgggtaccaggcccatgcagacacagccaccaagagcaactccctagccaagaacaagtttgtggtgtgaggggggccttggcacccctcctatgtaatgggacagccgccactgagcctcattactttgggggatggggcgggactggggatcagacagcctagttcttacctgtcctcaagtgaacaggaatgcaaacactctttaacatgagttggggcctgagccttaggggctagatgggggtagtggtggcagtctgaggacctagcttgtcctggggccacaggacagcagcagggtggaaaaaactcctgagggtggggtgagtcatggcggggaaggagggctctatggtaggcggagaaacccatagtccagcgtttactgtttccacccaggaaggaggtgaggtggcctgagagacagactcttccatgggtggtgggctcaagggcacagacattctggagggtgaacgccatcatttgtacagagggatacgtgggttgctgaggactgagagagccttgcaaggccgctccccttctccccagctgtgaccagggctgtctgggccttgcctgcctcagggccagactgaagtggaggtggagggatgctgggctaggcctcaccaaggttctggtagaagtggtggaagtggataaacttgataataaaagcttaagcatctttctgttcctgttttaaataaatacttctgaacaaagttggaattatttttaagagggcttcaaactggagtaagattcaggttcccccaaactttgatctgcctctgtcctgtcttacaggggctcatgtgagatcactgggtaccaaggagcctgaccgggaccctggccagtatggaggacagggggtgtggctggggaaactcagccaccaagggggcttgagccaggttccggggggcatatgcccctggcagggcgcagccggcgtggcaccaaggcccaggccctcgtttggcctgagtttgagtcaggataagtagagctggatttccgctgggtgaaggtgagcctgatgcgactccacaatgacaaaacgtcctgcacgtgttaaaaactcaatccggaccagcttccccattcgcctgccagagcagcagttaaccttcccctgggatgggctccaacagcaggctggggattgggatggcgctggtacccagcaggggaagcaaggcttctacaccccggcggcctccggcgccatcagccggcgtcccgggcgggtctgcaggacgctgggaaacgcggcggcggcctgcgcgggggcggggcctggccgaaggcggggctgcgaggaggtccgaatcaggctgtgggggcggagctcgggaagcggagccaggtccagaggcggggctcaggcgggactgagttgatctatgggggcggagccaggtcaggaggcgggactccaaagggactgagggctgtgggggcggggcccggtccagaggcggggacagcagggctccgggcaaggaggtctggatgctgagggcggtccctgaggggcgggcggggcccgaccggcgctctgtgtggccgaggccatgaagccgcagccgcccggctaggccccgggcggctctagcccagggcggcccgcggggcgctgggcctggctcccggctccggtttccgggccggcgggtggccgctcaccatgcccggcaagcaccagcatttccaggaacctgaggtcggctgctgcgggaaatacttcctgtttggcttcaacattgtcttctgggtgagcgcggggtctgcgccttgccctgtgctggggggtggtgggagagggagattcagtcttttgctgggggagaccactccctgccccaagagtttggagctcgggaccatccccccacttctgccacacccacgcccacttccaggaccacccgaggtagctacagaggcccggattgctgggggcgggtcctagcgacagcgtggggtcggggttggggtagggagtctccctaaataatcccgaggcctggtggagaaagggaaggtgtttccttgaagaccccaggggcgtgctaggtgcaggttgccccctctcgcccagccctccttcctaccctgggatgtgggatgcgtgccaagccccacccctggtttagccggtaaggagattctggcgtgaagggagccgccaggccccttccccggcctcctttcccttccagtagtacctgggtcaggtgcctcaccttaggctcctgcagagtggggtgggtcacagtcctctgcccaccccagtcccgcacaaggaggctgacctgccaggaggggcagggagggacaatggcgagtccttggcggctgggagaggatctccccggttgagagcctgggagctggccttggggaacagaattcaacattccacagctgacaagctgaggctcctgggcgggtctgcccctaccggggaagggagctactagtgcccctcccagggtggcatctgtccccctgggccctgccaggtcatttttcccatctctccaaagccgtggccctctgcagtctctgctcctgaggccttgggtcaagatgccaggccttttcccttgtgttcagcaagactcagtggcactgccccccacccacg

SEQ ID NO: 10547 - DNA, 6000 bp, Homo sapiens; identical to SEQ ID NO: 1179

SEQ ID NO: 10548 - DNA, 6000 bp, Homo sapiens
aagaacaagactgggcccagagttagggccaggcccgggctgcagtggggcctgggcaggggccgggccggctttagtggcagcccttctgcacaagagccccagtgttccctgggcccggctgccatccaagagcaacatcgttggcaccaggcaacgtctgccctctaccccccgatgactctgcccccaggcaggtggggggtaggacctggcctcaggagaccctcctggcccagcccagcattccagaggcacagagtctgcaaacccctgcctgggcctggtgtctcctcaggactgctggctaaaaggtcaaggagtgcagtgctcagtcccagcccccacacctccctccccaacacactcaccttcaggtgaatctgcaccttcccgggccacagttaaggatggagacagaaagcatctgatgcagtagcatcaatgatcccactctggagagttatcccgagctctccatctttgccccagaagacaggggttcgagttctgcaattcacttgctagatgacctcaaataagtaattccatctccctgagcttgtttcttcacctacaaatcagagctaaggattcctatgccatttggcttggtggaagaattaaaggatataacccatgtacaacacccagcatgatgcctggcatgtaacgggagctgaagagtcacgagctcaggaacaggaacacgttcatttcccccaacactcctaggaagaaagaagctggagcagccgggagccgttgctcacgcctgtaatgccagcactttgggaggccgagacgggtggatcacctgaggtcaggagatcgagaccagcctggccaacatggtgaaaccccgtctctacaaaaatacaaaaattagctgggtgtggtggcaggcgcctgtagtcccggctactaggaaggctgaggcaggagaggcaggagaattgcttgagcctgggaggcggaggttgcagtgagccaagatcacgccactgcactccagcctgggcaatagagcgaggctccatctccacaaaaaaaaaaaaaaaaaaaggaagaagaggaagctggagcatgacggctttctgggtggggaaactgaggcagaggcaggttaacagcaggatcttagggtgacaggctcttgcctctgctaagcgagagagagagagagagagagtgtgtgtgtgtgtgtgtgtgtgtgtctgaatgtatttttttttttttttgagacagggtcttgctctgtttcccaggctagagtgcagtgcgtgatcttggttcaatgcaacatctgcctcccaggttcaagtgattctcctgcctcagccaccccagtagctgggattacaagcgtgtgccaccatgcctggccaatttttgtatttttagtagagatggggttttaccatgttggccagggtggtctcgaactcctgacctcaagtgatccgcccacctcagactcccaaagtgctgggattacaggagtgagccactgtgcccagtcgtgtctgaatgtctttgagaaagagactgcaaatgtgactggtgaaagattgcgtgtcagcaagagagtgagacagtgtgaaaggcttaggtgctctccctgactggctcagcttatctcccaggctgtaactgattacttatctgtctgtccccactacaatgtcagcagccccttgaagggtagaagtagggtccaggccaggtgaggtggctcacatctgtaatcccagcatttgaggaggctgacatgggcagataacttgaggtcaggagtttgagactagcctggtcaatatggtgaaaccttgtctctactaaaaatataaaaattagccaggtgtagtagtgcacatttgtaatcccagctactcaggagcctgaggcaggagaatcacttgaacccaggaggcagagcttgcagtgaactaagatcacaccactgcactccagcctggacaacagagcaagacactgtctcccaaagaaaagaaaagaaaaagagtccaattcggggctttatccccaggatttaaaacagtggatgccacataatgaaccttcaataaataatcattcagatgaatgagtgaatgagtgaatgactttgtgagggagcatcagcctctgtggagggtcagtgtgaaaggttatgagtgcggggagaggaggcagacaagggatatggggaacatatcctagggacatcagagggttgcaaatctgagggatttgcgcatctcaggagacaaggaggttgcaagacctgagctatgaaaacttttagtttgtctttggctctggtaaactcaggaaatgcccgggaaggtgaatgaaagccatgtggggtccagctccagctggcggctcaccctgtctccccccacaaccacattcacaaggggagccagcagagggccagaggcagggagctgaacccctccagcagtccgggaggtctggcaaggtaccctctgggcaggcagctcccagggccaggagcctcatctgtcctgggagctccagcaaggcaggactctagagaagggaaccaggacaaattgtttttaaaagataaccaattaaaaaaaaatttataatatacatatatatgtgtgggtgtgtctgtgtgtatgtatatacacacagacacacagacacacacagacacacacacacacacacacacacacatatatatatatatatatatttttttttttttttggagacaaagtctcactctgtcacccagtctggagtgcaatggcacgatctcggctcactgcaacctccacctcccgggttcaagcaattctctgcctcagcctccctagtagctgagattacaggcacatgccaccatgcctggctaatttttttgtatttttagtagagctggggtttcaccatcttgccaggttggtcttgaactcctgacctcgtgatccacccacctaagcctcccaaagtgctgagattacaggcgtgagccaccgtgcccagcctaatatatatttttaatagagacgagatctcactatgttgcccaggctggcctcgaactcctgagttcaagcgatcctcccgattcagcctcccacagtgctgggattataggcatgagccaccatgcctggcctcaattattttctgatttatctttgggaggagaccattctttcgcttaagaagaaaaagaaaaaaacaattttaagtctctttaatgggccttacagttatgcaaagatatgccactatccctttgggagtgagggtggaaagaactagacttgcctgcgtaacaatgagaaaggaagttgcttcttaagacagggtctacactagctagaggggacaaccaggacctgagcctcagacagggtctcgctccatagcctgttgcccaggctacagtgcagtggagcgatcacggctcactgctgcctcgacttcctgggctcaagcaatcctctggcctcagcctcccaagtagctgggaccacaggtgcacccagcccatttcccttcctctcaaggtgccttaagagaaggagaaggcttgagattcaggtgagggatgggcagagatcagaggctgcctggcctcctggtttggccacagtctagatgctcaggagagaagtgcttacaggtgaggcaaacatgagccaggtgggcacggagctatctgggagcacctactgtatgccagacacttgaactctaatggtgaggtctgaggacacagttcctctactgaaaaatagagacagggcaactatgttgccagggctggcctcacactcctgaattcaagctgtcctcctacctcagtctcctagtaactagaactacaggcacccgtcattgtgcccggccattccacagctatttacataattaactgttcagttacaattctggcaagcgtgctgaagaaataacaggtcctaaataattacagctagtattacaaagcaagcgctgcatgccaggcttacacatactgctaacatgtctactttttgcaacaacctcttgtgggtgagactatcatttgcctgttttactgaaaggacagtgaagactgaggccttgtgtgatggtgctgagagctgggcctatgacgtccagccctgtagtctgtgctctgaaccacttcaccctgtttctttctccatcctcacagtagagacgtcatctaagaggagcttgcaagtccagagggcttcctgaaggaagtgagctgagaataatatgaaattaaccagaccaagggccattccaggaagagagaatggtacgtgaaactgcccaggagtagcagggtgggagccaggaggcgtgggtcatggcaatctatgtataaagagctatgggaatctataggaaaatttaagggagtggctgacacagtcagatttgtgttgtaagtatcactccgcaggttgcgcagggaacaaatgagggagcagaaggaaggggttctcctatccgctgcacggcactgcgcagaagacaggggagccaggcattccctgaagggtgaaaagcaaggagtagagctgggtagtagactagaatttaggagcctggcctggggcctgggtggggcgaaagaggcggagcctgaatggggtgtgtataggggggttgcgtgtaggggtgtgtgtataggctggggcggggtcccgggagtgggctgactgggtcgggggcggggctctccaggtgggcggggatcttggccacccctggccacacctctctccggctcgagctggtctaggcggggcgggcccgagggggtgtggcaggaggtgggcgggcccgggtggggggggggggggcgtggaaggaggggcgggcccgagcaggagggggcgggcccgaggggcggggtgggacaggaggtgggccgctcgcggccacgccgccgtcgcgggtacattcctcgctcccggccgaggagcgctcgggctgtctgcggaccctgccgcgtgcaggggtcgcggccggctggagctgggagtgaggcggcggaggagccaggtgaggaggagccaggtgagcaggaccctgtgctgggcgcggagtcacgcaggctcgaggtgagccggaacccttgtgggcccgggctgcgctcccagccgccagggggcgagaggcggcggggctacggggactgcccctcccggcgcaggggacctgggcgtccgccgggcggcagggggtggagggggcggtaaatcagtaacccgcagtgcacacagggccttttgtcccgctccgtccaaagagcaccccggccgcggagctggttactcattgcccaccgaggcgggggcaggctggccctgtgcagctaccctcgggacccattgattcgcacctccccccaggctggcccggcaagggtgggggaggacaagcgcgcttgtccctgcggctgtcttcgcgccggcggcagagatgagggacctgaggccccgaaaagttcagtcacttagtgcccgggggcctccagcgcgagtgcgggaggctgaaggagaacccaggactgtctgatgcctaaggcaggccctccattcccacgtggggggtggtcggtcagcggtcagcagccatgggtgactcgactaaggactctgatatcagggcagcctggggtaggaataaactccccgggcctccccacccactcccagcccaagctgtgtacccaaagagctgccctccctgccaagccgagcttggtagggagttttaccaaggaggatccgactggattcgagagttgaggtgggccagagacagcagtatctgagtcaggtagagaagagcaatgaggggcacagagggatgggcaagagagcacatgtgcccagttttgaaagccaatggcttcagcgctcctgaaggggcagacggtgtgaccaaagagataggcagcggcagagagggagccctaggatg

SEQ ID NO: 10549 - DNA, 6000 bp, Homo sapiens
acactcgtgactgtgtgcatggcaattgtgctggtctgaatgccgggatgagacgttcactgccatacacccaacgtacagcactgtgctgactcatcgtggagcttagatgtttgttgaatacataacatgcttgtgagaagaggtaggagctctcaaactacactgatgggaaagcctgttacgctgttatgaggttatgctggttattagtcagtttcccatccccccaaaatgaaaatccaggtcatggacagaatgctctttctttctttctctctttcctttctttccttccttcctttctttctctttccctctttctttccttctttctttctttctttctctctctttctttctttccttccttccttcttccttctttctctttctttcattcttttctttctttctctttctttctctctctctctttcctttttttttttttttttttttttttttgagacagagtcttgctctgttacccaggctggagtacaatggcgtgatctcggctcaccacaatctccgcctcccgggttcaagcaattctcctgcctcagcctcccaagtagctgggattacaggcatgggccaccatgcccggctaattttttgtatttttaatagagacggagtttctccatgttggtcaggctggtctcaaactcccgacctcaggtgatccacctgcctcggcctcctaaattgctgggattacaggcgtgagccaccgcacccggtttctctctctccttccttccttccttcttccttccttccttcctttctttcctttctctctctcctctttcttgtttctttcctttttttcttctttcctttcttctgtctctttttttctcttccttccttctttccttccttcctttcttctttctctctctcactcttttttttttgatggagtttcactcttgtcacccaggctggagtgcagtggcatcatcttggctcactgcaaccttcacctcctgagttcaagcaattctcttgcctcagtctcccaagtagctgggattacaggtgcgcggcaccacgcctggctaatgtttgtatttttagtagagacggggtttcaccatgttggccaggctggtctcgaactcctgacctcaggtgatctgcctgccttagcctcccaaagtgctgggattacaggcgtgagccaccgcacccagcctcttttatttatttatttatttatttatttatttatttatgtttttgacacagggtctcgctccgtcacccaggctggagggcaatggtgcaatcacagctcactgtagccttgccttcccagatttcagcaatcctcccacctcagcctccccagctacagatgcgtgccaccacacctggctaattatttattaatttttttagaggcagtgtcttgctatgttgcccaggctggtcttggactcctgggctcaagtgaccctcccacctcagcctccaagtgctgggattacaggcctgagatttggaggggatgcgccccgacgtgtgcagtgcacactcatgactgtgtgcatggcagttgtgctggtgtgaatgccggcataagatgctcaagggttcttcttcccttgaccatcttcaactttaggtcctgcggaaaacccacatgcagcaaactgtgcatttaaggagcacatggctctgaagaattgcagaaacggctggttgtgccagcctccacagcttgctcagttcctggatgtgcacatttgttcttgggatcgttctctctctctccgttcagcagtgatgcctctcccggagaaatggttttcactggtgtgatgaaatttaatatatgtcagcgtctcatattcacgctggcgatgctgtctctgctcccccgcctcccgctccttcccacaccatcacaagctgactcctcccccaacatgccctcccaggtggctgacagcccttggttgttaaagcctctctgttctcagattacttgacatcttagcagcacttgacccagccaaccagggtgtctctctcaaaatgtggtccagcctggcttctgaggtggcttcctcctggtccgtggctgctcctctcagtctcccttaaatgtgggtgctggccaggtgccgtggctcacgcctgtaatcccagcacgttaggaggctgaggcgggtggatcacaaggtcaggagatcgagaccatcctggccaacatcgtgaaaccctgtctctactaaaaatacaaaaattagctgggcgtggtggcgggtgcctgtagtcccagctactcagaaggctgaaccaggagaatcgcttgaacctgggagacagaggtttcagtaagctgagatcgcgccactgcactccagcctgggcgacagagcgagactctgtctcaaaaaaaaaaaaagtgggtgctcctctgggcttggccctggccccttctctcctcctgtacatgtcctccctggggtacagtttctcaggcacgggttaaggctggcaaagcaggtaggaagccaagtcaccctggtccttccaggctactataggatcctgggctttatgctaagtggttagcaggggcaggtttcgaaaggaagaggaggtgacatgattaacttggcctttttttttttttctttttgagacagagttttgctcttgttgcccaggctggagtgcaatgtgcgatctcggctcactgcaacctctgcctcctgagttcaagtgattctcctgcctcagcctcccgagtaactgggattacgggtgcccgccaccacgccccgctaatttttttgtatttttagtagacatggggtttcaccatgttggccaggctggtctcgaactcctgacctcaggtgatccacctgccttggcctcccaaagtgctgggattacaggcgtgagccaccgcgcccggcctagtttggcattttgaaaagattgctgtctgctgctttggagcatggatcaggggcagcaagggcagaaatggacagagcacttgggaagtgaccgcaatgacccaggggagatgacaggcccagtccagggaggtggccacagagatggctaacagcaaaagatcagggagctcctggagcaataaaattgggagaattgaggactgagttggaaacgaggaagtggaggggaaggaaacagcaaggatgtctgcttggtgcccgacccagatggatggacggtgtgccgctcaccaagatcaggaagaaggaggaggcccaggtttggggtgagaagcacagtgcgtgcttctggcttgcagagccaactgctcgtgccagaggccgctcagaaagcctgagcagacggagcttggcaccttccctccaaaacagctcctcctgctgggttcctttctcaacgcgagacacccccaaccaggcaggctctcagcccagaaaaggtctggggaggccatggccagagcccaggtgcacagacaaggtgggactcaccacccagggggacacacagactctgtcactggccagggaggaggcaggcagtaggcagggaggtgctgaaatggcagagaggctggcaagagatacgttggtgctggaatggagctgccttctctgctgcttgtatgagtcccaacagcagctctggtcagatccagcattttctcactttcactagggctgtagccccaaaataaatctttagaagtggtggctgtgtaaatcagcagcattttggaattatatctcttgatggatttgatcgatagctaactgcctcccccactaaacccagagctccgtgacagcagggaaggcaaacttcaaaaatatcaaaaagcacaaccttattaaaaaggagaaacacccccagttcaccaggagcaccttggattcagctgctcctgccaagggtctgaactgcacgggggaatggagagaaacaggtcacgtgggccggggtctctgggcccgctgtgggggtgtcagtttgctcataggtggagacactcgatgtgacattaacagcaccttcaagcccaaggacccagagattctgacacaagaactgagaactgattgcatttccgtgactcagcgacaccctcctacctgggcatgaacccagccctagccaaagatccagagacccgactcccatctatttccttttcctctctccctccccgtcaccaattctactggtcagatgtccctgggatgcacctgtcctccccagcccctccgttcccatcggagttcaggcctcatcatctcctgcctggaccattagcctcttaactggcccctccgcttccaggctcccttccatatatccgggttccaccccgggggccattctaaaaggcagatcaggcccatcccagtctggccagcggctccacattcactcagactcacatcctggacccatggtcgggcattagagacctgccacgattcaacattccacggcctttccagcttaggtcctcatctcacactccctctcctctgagctccccctgggagacttacagacaccccgacgcttggcaaggccataggatgtttttgtttggtttggtttggtttttctgagacagtctcactctgtcacccaggctggagtgcagtggcacgatcttggctcactgcaacctccgaaggccataggatgtttgggtcattccctggggagtcctgtcaggccaggaacgaggggaccctgggaacaaggtgctgagtggcatcagggtctctgcctgcaggcgggggatgtgtctgggtcgtggttgatgggaagaacctgaccatagattccccatgcagagctgacgattagcaattaactgggaggaatctcaggggtgaggttaattgggggacagagggagggcagctagggttccagggactttgcccttgacccaagagtataaagaggagggtctcagttctcctcagggtcctggaggcttcattgagctgctgagcagaagctgaaacacagaattctaaggtgagcccaggaccctcacatcccaaccccacccccagctctgagtaggaaacagcccagcaccccagccccttcatctgtgtcctatctgcgcccacccccaccgcgccccatataacatgtcagtccagccaatcgcggtggctcccacctgtaatcccagcactttgggaagccgagtgggcggatcacctgaggtcgagtttgcactaaaaatacaaaaaattagccaggtgtggtggcaggcacctgtaatcccagctacttgggaggctgaggcaggagaatcgcttgaacccacgaggcagaggttgcagtgagccaagattgtgccactgcactccagcctgggcggtaagagtgaaactccatctcaaaaaaaaaaaaaaaaaggactcctgctccttcaggacttgaattcaactcttcacacccctacaacagccaaggacgctgggacaatgcggggagtgctgaggcagatcagggcactccaccccaatagccaagactcctggggcagtgcggggacaagggggggctgaggcaagcctgtcagtgtttgttcattgccccttgagggggtggatggggaaaggaattcattgtgaggggaacccaggaactcgggatccggcccaggggatctccgtgtgtgcccagctgaccccatgagaaggcaggtgtctgcagctcctccttgctctccaggtgggcaaaactgaagcccggcccagccccagcccacacctgcagccactgccaacaccacgtattccctggccccctccagccccaaacaggctgggcgtcctcagttctcagtgtcttttatcaatgctatatccaagcctctggttcggagcctgggctagagctcaataatactcattgaatgagtgaatggtgaatgaatgatcacctcaccaccaccacacacacccctccgagactcacatgcag

SEQ ID NO: 10550 - DNA, 6000 bp, Homo sapiens
tccatctaccttggcctcccaaagtgtggggattacaggcgtgagccactgcacctggtccataatttctttcttttaatttttatttatttatttattgagacaggtctcactgtcacccaggctagagtacagtggcacaatcacagctcactgcagccttgacctcctgggctcaagcaatcctcccacttcagcctcctaagtagctgggactacaggaatgtgccaccacgcctggctaagtagttgggactacaggtgcgagccacaacacccggctaatttttgtatttttttgtagagacaggatttcaccatgttgcccagtctggtcgtgaactcctgagctcaagcagctctcctgcttcagccttccaaagtgctgggattacaggtgtgagccaccacacccggcctatttttaaaatatcttattagtggaatagatataaatcaaagttattaaagtagctgcatctggaaagggatggagggaataaggatttaattttatttgtaataattttgttctttaaaacatacctgatagtttaggacttctgcttctgagaagatgatatagacatacttttctccattcctctggctaggtacaaccaaaatcctaactaaaagaggagtctcaaatcaataatctaaactacttctggccgggtgcagtggctcatgcctataatctcagcactttgggaggctgaagagggcagatcacctgaggtcaggggttcgagaccagcctgggcaacatggtgaaaccccatctctactaaaaatacaaaaattagcagagcatggtgacacatgcctgtaatcccagctacttgggagggtgaggcaggagaatcgcttgaacctgggaggtggaggctgcgatgagccgagatgttgctactgtactccatcctgggtgacagagtgagaccttgtctcaaaaatcaaaacaaaacaaaacaacaaaaaaaccccacaaacttctacttcaagtcactagaataagaagaacaaactaaatccaaagcaagcagaagaggaaaaaataacaagcagaaaccaatgaaattaaaaacagaaaagcaacagagaaaatcaatgacacaaaaagctgattctttgaaaagactgataaaattgacaaacctcttacaagactgatacagaaaaaagaagacataaatcaccagtatcagtaatgaaacgggtgacatcagtacagaccctgcccacatcagaaggatcataagagaataattccacggacaactttacatacatatgtgggggtgtgtgctgcagacctcaactcaacgacagatgaataatgtacactgacacagatattctgcttgtcagtcaggccgattgtccaggccccctacagactcccaggagagtgctgtacatttgcaacgtggccccgactccccgcctcctactcgctggccttctcgtcatttacttagcacacattaaacacagcaaaagtctcaagtaaacaccattagagggtaatcaacctggtcgccttcccctgcctcccccagagcgccatcctgcccgcgaatgattaaaggttacttttagaaccacatgagtaaacaagctatttagatagactcctctacattcctatgttacttacccttgctatggctcaaagaggattaggccgctttcagccaaactatctgaagctaagcaaaaaccttttggccttccaagttttgtgttttattgtataattttccccaccatcctgactgaacctctacatacataaatgtaacaatttaggcaaaatagatcaattactcaaaaagcacacactatcacaacttactagtatgaaatagatactttgaatagccctatagctattaaggaaatttaattcataattaaaacactccccaaaaggaaatttcaaggcccagatgattacactggagcattctaccacacttttgtttttttttttgagatggagtttcactcttgttgcccaggctagaatgcaaaggtgccttctcagctcaccaaacctctgcttcccaggttcaagtaattctcctgcctcagcctcccgaggagctgggattacaggcatgtgccaccacacaggctaattttgtatttttagtagaaacagggtttctccatgttggtgaggcaggtctcgatctcctgaccttgtgatcctcccgcctcggtctcccaaagtgctgggattacaagcgtgagccaccgtgcccggccaaagttgactgtttttaactgtacacttcagtgggattaagtacattatattgccatagaactctcaccaccatccatctacagaactctttttatcttggaaaactgaaactctatacctattaaacaataacttcactctccctgtcctccagtccctggcaaccaccattctgctttctgtctctgtgattttgacgactctagtacctcatatacatggaattacccagtatttatcattttatgtctggcttagtccacttagcgtaatgtttcttcaagattcatctatgttgtagcatgtgtcagaattcccatcctttctaaggctgaaaggatttccattgtgtggatgtaccatattttgcttatctattcatctactgatgaagaactgggttgcttccatttttttttttgcttgtgaataatgctgctgtgaacatatgtgtacaaatatctctttgagaccctacttttaattattttgaggatatctctagatatggacttgctgaatcatatggtaattctatttttatttatttattttgagacagtgtcttgctttgtcacccaggctggagtgcagtggcatgatcacagctcactgtagccttgacctcccaggctcaagcaatcctcttgcctcagcctcctgagtagctgggactacaggcgcatgccaccagatccagttaatttttgtattttttgtagagatggggtttcgtcatgttgccccgactggtctcgaactcctgggctcaagcaatcctcctgcttctgcctcccaaagcgctggaattataggcgtaagccaccatgcccagcctattttcacttttttgaggaatcattatacggttttccacagtgtctgtaccattttacattcccaccaacagtgcacaagggttcaatttccccacatccttgccaatgcttgtagtttctttcttttcctttttttttttctagtggccatcttaatgggtatatgacgtagtatctcattgttctttatctcattgtgatttgtgtttctctaatgattagtgatgttgagtatcttttcatgtgctcactggccacttgttgatcactggagaaatgtctattcaagccctttgttgtggtttttgaatgagattgttcttattttgttgctgagttttaggagtctctgcatattctggatattaatcctttgtcagatatatgatttgcaaatattttcttccattctgtgggttgcctctttactctgctacagagtcttttgatgcacaaaatgttttaattttcataaagtccaatttgtctattttttcttttgttgcctgtgcctttagtgtcatatccaggaagtctgttgccaaatccgatgtggtaaaccctttgccatatgttttctatgagttttatgctttgggattttaaaagttgtgggtctttttgggtgaatttttatctatggtgttagagaaggaaccaccttcacttttttgcatgtggatatccagttttcccagcaccatttgttagaaagactgtccctcctccccgcattgaatgggcttggtctccttgttaaaaattatttgaccatatatgggagggcatatcttggggctctctattgtattccattggtctatatgtctgtctatatgccagtaccacactgtcttgatgactgaagcttggaagtaagttttgaaatcaggaagtgtgagttcttcagctttattcttatttttcaggattgttttggctaatcgaaatcccttgagagtatatgaattgtagaatgagtttctctgtttctacaaaaaatgtcattgggattttgacaggaattgcattaaatctgtagattgctttggatagtattgacatcttaactatattaagtaaggatgattttttttaaattactgattcaatctcctcactagttataggtttattcagattatattatctattctgagtcagttttgcatttctatgaatttgtccatttcatctacgttatccaatttgttggcttatatttgctcatagtactctcttatgatcctttctatttctgtagaattgctagtaacgagccattgcagttgggatctggcagcagaggctgtgtgtgtgtttgtgtgtgtgtgtgatcggagaaatgcttgagagggtaacacccgatttaggagtggacagggtatgaggacaaagaagtggtaatgggagaccttgccttttatttcttttaatcttttttgataatacatttgtgcattatttggtcgttctctttaaattcatttttaaaggtagaagcaaatcaagactggtagatgctgtgccaaggaaagtcagggatcctaggttcgaatcctgtctctgttcgcaattcgctccgcaacctcaaacaaacgacctcagtttcatctatgaaaagctggtaaccatcgtcagttgccaggccatgaagagagtcaacggaaataagtttttattctagggcacccgctctctctcaggtaaaagccgcgccccaatcaggtactgccgcgccagggccgcgggacatctcgggatttgtggtccacccggcggaactcgcggtcccggcaggcaccgcggcggcggcagggcgacgtggcgcggccggctgcggctgcgcaggcaggtggagcaagatggctgtggagctgggcgtgctgctcgtccggccccggcccggaaccgggctgggtagagtgatgcggaccctcctgctggtgctgtggctggcgacgcgcggaagcgcgctctactttcacatcggagagacggagaagaagtgctttattgaggagatcccggacgagaccatggtcataggtgcgggggcggggaggaaggggcgagtttggaacgtgaccgtggtcttggggcgggggatgcgagacagtcagctctctagagccgggaggagacggcctcgccgtgcccaggcggtcgcggaacccatgccacctcgcgctcctctgacctgggctcgccctgcttccctcaaggaaactaccggacgcagctgtatgacaagcagcgggaggagtaccagccggccaccccggggcttggcatgtttgtggaggtgaaggacccagaggacaaggtgagccaaccgcccccctcctctccgccagcctctcagctaggcgggctccggtacttcctcttctagttcctgcatctgctaaagtgggagagacagttgatgttgtgggaatatcctgctgacttgcagaccccgcccggtctgtgaaatgggcggattaattgtggtgataaaaatcaaagagttttgtcaactcttaaagtcatctagactttaagatttcacagaacatgatactttccccacaaaatgagcagcttttaatcttcccaagtaaggatattaaaacgaacggcaaaacccttcagctctcaccttctgtcacttttcgttaaaaaactcatggcggggtgtggtggctcttgcctgtaatcccagcactttgggatgccgaggcgggtggatcacttgaggccgggagttcaggaccggcctgggcaacctccgtctggcaaaccccgtctctagtaaaaatacaaaaaaaaaaaaaaaaaaaaatgagccgggtgtggtggcgcacacctctaataccagatacttgggaggctaaggca

SEQ ID NO: 10551 - DNA, 6000 bp, Homo sapiens
ggcatcctcttggtctgggaatcagcagttctagcagccccagccaactcaggctcaccttatattcccctgcagtggcgagaggagcgcttccggcagaccagtgagagcaccaaccagcgggtgctgtggtggtccattctgcagaccctcatcctcgtggccatcggtgtctggcagatgcggcacctcaagagcttctttgaagccaagaagcttgtgtagctgtcccaggcgtcacaacccatcctcccaggctgggggagaaaggacctcctggaactgacttcttctgtcaggaggactggtttccagccatacctgttctggaagggagaggggctggaggcacccacaggcacaagctgaaggcagcagcttggctaatactgagcaggtagtggggcaaattcctgccctctctctctggcctctgggccgtttggtagtaatcacccaagggctggtaaagcccctcctcttggcacctcagaatcacagtgttactgatcagggatgtgaggctgctgttgggggtggggggaggggaatgggcaggcaagccagtcttctgtcttcctttgctaacttagggttttgagcaggttggggtatggtgcctgtcatacccacctgccaccctgggaacctcactgttctctctttcagcctagacctgctgatccagggtgtgtgtgagttgagggtgggtggaggggtttgcagtgtgggaatgtggccctgcagttgacctgagctgcttcacatggttgtccattctggggcttaaagaactgggaccagaccaagtagaggccttggtgctggttggggtggggcctgcagagtcttagttactgatttcattttcaataaatgtaggtttgttacatgagtttcccaataaaaaaaaaaatgacttcttgtccagtgcaagtgactcagtcatcagtgggcacacactgcagggtgcctcagggaatgccagttcttccaaagagcaaagcacttcacattccaaagtgaattcccaccagtcagcttcattctttccttcttctccaggccttcctgtggcagggaatagtgggtttgtccaagattatacaacaagtaaattgggctggggctcaaatttacaccctttcctctgtgccagctccctggtgaagttccctctttctagagtcagtaagcaggattgtcatggatgctgccaggaagtgcctggtaaggaggtgcattgagcaggggagtgctacaggacagccaccctgggctggcagggacaaggatgttgatgggctaaaccaacagcaagtgatttcaaccaggaccatgaaggagaggaaggattctgctggaaggagatggcaggacaggggtggttggagaagtggaggcaaacagctggaatggaggtgggtgggtgtttaatttcagctgcagagggtgttgtgaggaagctggaaaggaaggttggattagagaagcctcgagctccaggtaagcgatttggacatgcccacctttcaagaggggctgcaggcacccacaggcacaagctgaaggcagcagcttggctggcttaatactgagcaggtggtggggtaaatgcctgcccccctccctctggcctctgggccctttgcagtaatcacccagggtctggtaaagccactgagagccctactggcacctcagaatcacagtgttattgatcagggatgtgaggctgctgttgggggttgggggaggcaaatgggcaggcagttttgagaagaaccttctaataagaaatgtgagggaggttacagcagtgtgtgagaaagaccaggaagaaggagacaagtttgggggctgcttcccctaatgggatgatgcaatctgggctcatgctgccaactaattcttccacatgaaaaaaaaaagttttttggcgggcacggtggttcacacctgtaatcccagcactttgggaggctgaggtaggtggatggcctgaggccaggagtttgagaccagcctggccaacatggtgaaacctcatctctactaaaaatacaaaaaatgagccaggtgtggtggcgcatgcctgaaatcccagctacttgggaggctgaggcggcagaattgcttgaacccaggagacagaggttgcagtgagccaagatcacaccactacactccaacctgggctacagtgagactctgtctcaaaaaaaaaaaaaaaaaaaggccgggagcggtggctcacacctgtaaccccaacactttgggaggccaaggcgagcagatcacgaggtcaggagatcgagaccaacctggctaacatgatgaaaccccatctctacaaaaaaaaaaaaaaaaaaaaatacaaaaaattagccaggcgtggtggtgggcgcctgtagtcccagctccttgggaggctgaggcaggagaatggcgtgaacccaggaggcggagcttgcagtgagccgagatcacttcactgcactccagcctgagcaacggagcaagtctccatgtcaaaaaaaaaaaaaaaagtatttttaaagaacagctttaaaagtgcagaaaaattgtgaagacattttccctattagtaacatcatgcattactttatccagacttccttagtttttacctactgtcctttttctgttccaggattccacatcacatttagtcactgtgtctccttaggctccttttggctgtgacagtttcttagaccttccttgtttttgatgattccttgactgttttgaggagtacaggtcaggtattttgtacgatttctcagctaggatttgtctgatgtttttctcatgattagactagagttgtgggtttttgaaaagagaccacaggctgggcatggtggctcacgcctgtaatcgcagcactttgggaggcagaggcaggcggatcacctgaggtcaggagttcgagaccagccgccaacatggtaaaaccccgtctctactaaaaatacaaaaattagccaggcgtggtggcaggcgcctgtaatcccagctactcggaaggctgagacaggagaattgcttgaccccgggaggcagaggttgcagtgagccgagatcgtgccactgcactccagcctgactgacagagtgagactctgtctcaaaaaataaataaataaataaaataaaataaaataaaaaagtagaaaagagatcagagttgaagtgtcattatcaacatggctcttagctggatatcacatttaaaaattagataatttgggttttcatttgagatctgatttcttgagagtgtgaatctgacaatctgaagtagagcttcatcctgatatagtaacagctaaccggatggagtggtcccctttagatgggctgtgcattgaccacggttctggggtaggatgcagtgccctgggggagtcaacaggaaggggaatgggtggattatatacttccaggtttacggggtaaaggggttactgggaatgattcatttcccacccacggtgaagttctctctggagcagagtgattaagatcatagattgtggggaagaacaaaacaaaaaccccaaacccatagatttgcaaccaaactacctgatttgcctctctgtgcctcagttctctcaattttaacttggggataagcacctaccgataaggactacgtgagataaccctcatgtagtaagaactattaacaatgactggcacataataagaacttaatagatgtttgctatctattaggaaacttaaaagtttgcctggaagagcagaggaggtcaagtctaacaattgccgctttctttccccaggtaggaggctagtaggaggggtgggggggctgggggtgagggggatggttaagttcccacggtgacggggcagatatgggaactcagtctcctattcccttcttcagttctcagctccaccaaagtacccttttcctggatgacagctgtcatttatatggcgttgaactgtgtgcctagcgctgcacaagtgtttgcactttctccttgaatccccacagctaccatatagaataggagccattgatatacccaggtgaggaaacagatgcagagatgtggcttggtcaaaacacagctgaattggcagagtctagtttctttttctttttcttttcttttttttttgacggagtctcgccctgtcacccaggctggagtgcagtggtgcgatctcgactcactgcaagctccgcctcctgggttcacaccatgctcctgcctcagcctcccgagtagctgggactaacaggcgcccgccaccacgcccggctaattttttgtatttttagtagagacggggtttcaccgtgttagccaggatggtctcgctctcctgacctcgtgatccgcccgcctcggcctcccaaagtgctgggattacaggcgtgagccaccgcgcccggcaagcagagtcgggtttcaaattcagtcaacttgtcttcagggctcggctcctaacgcctgcgcgggctgtcagctgaactcagcgccgagccgtgagcttggctttgcccctccaagcttgcgcggagaacgcgccgcctgggccgagacggggaccccgggacgctcccgcctcccctcggaaagaggacggagatgcagattctccccgagcgttggtttgggagtctggactcttaggtccagtcccagcccagtgatttgttgggaggccctgggcctctgggcttcagtttctcgggcttccaggcgggtcccggggcggctaggaaggagccgcccagagagggaggcgcgcccgcgctgctcgcaagcagaaccttggaggcggcggctccgggagctggcggcgcggccggagcggcggacccggcggaccggggggcggggcggacaggcctgggcggagcgggaggcggaggcgccgcgtaggcccgggaggccgggccggccgggctgcgagcgcctgccccatgcgccgccgcctctccgcacgatgttcccctcgcggaggaaagcggcgcagctgccctgggaggacggcaggtgagcggcggcggtgggcccgggccccgtcctcccgggcgccgctcccttctcggccgccggcggaatctgggaacccgaggccatcacgtctccatgtctgcgggtttctgtgagggcgtgtggttctccctgtgggtccctggcgctctgttccggtttctgtctgtccctgtgggtctctgcctcccccgccccctctccctttccgcggcactcgtccttcccccagcaccttccccccggcccgtgggtccgtatttctccattgacttccctttgtgagtttctgatcccctctttgctagtctctctcgttatgtgtttcgttgtgtctgtgtttctccaccagcctccctctatctgcatgcgggtctctgactccgctgacctctcaccatggatttgtgtttctcaatttgtctctgatccctgaggacgtgtattccgtttctctggtctctgccttcctcatcacatccatatagcctcagaccctacccttcctccttaacacttccccccatccttcgcaggccaccagcagaacccaccagacagaagctccgtgctctgcctggctggtcactgcctggcacgtactagacactccttatacacgcattagtccatttcctgtgcagctgtattggccctacgtgaaagatgcgagcttggcccacaccttagctaattttgtttctcactaaagcagaatggggaaagcgatttgactgcctccattcgtggggcacttgagatgtgtccctgtaagtcttctcacagaacacatgactggatctcctcctcgtgaatgacacctcatttccttcatgtttcttaagtccgtcaggtgccataagattctggaatttagtggccacaacttgtacttttggggatttttcagacttggtgttgaaaggggaaa

SEQ ID NO: 10552 - DNA, 6000 bp, Homo sapiens
gccgggcgtggtggcttatgcctgtaatcccagctactcaggaggctgaggcaggagaagcgctggaacccgggaggccgaggttgctgtgagctgagatcctgccattgcactccagcctgggcaacaagagagaaactccgtctcaaaaaaaaaaaaaaaaaaaaaaaaaggaatgagagcgaacaatacagccaggatggctaaaggtgaccccaagaaaccaaagggcaagatgtctgcttatgtcttctttgtgcagacatgcagagaagaatgtaaaaagaaaaaccctgtcaattttgcagaattttccaagaagtgctctgaaaggtggaagacaatgtccgggaaagagaagtctaaatttgatgaaatggcaaagacggataaagtgcactgtgatcgggaaatgaagggaccagctaagggaggcaagaagaagaaggatcctagtgcccccaaaaggccaccatctggattcttcctgttctcttcggaaatccgccccaagatcaaatccacaaaccctggcatctctattggagatgtggcaaaaaagctgggtgagatgtggaataacttaaatgacagtgaaaagcagccttacatcactaagacggcaaagctgaaggagaagtacgagaaggatgttgctgattctaagtcgaaagggaagtttgatggctcaaagcgtcctgctaaagttgcctggaaaaaggtggaagaggaagatgaagacgaggaggagatgaggaggaggatgaataaacaaagtgtttatctgtcaaaaaaaaaaaagtaaatggataaaaatgtgagtgctccctctctctgtgtgcccactttctccttcaagcaaaaggtaggcatgagcaaggatgagggtggctttgagggaaggatggagagacaagctatgagaagaagctggatacgaaggataaatggatcaacaattttgtttactcttttaaacatactgcctattttgaaaaaagtacaaaagctaaagctaaaatttattccttttttaagtttttatttctttcatttatttatttatttttgagacggaatcttgctctgtctcccaggctggagtgcagtggcgcgatctcagctcactgcaagctccgcctcccgggttcacgccattctcctgccccagcctccccagcagctgggactacaggcacccgccccacacccggctaatttttttgtgtgtgtggttttttttagtagagacggggtttcaccgtgttagccaggatggtctcgatctcttgacctcgtgatccacccgcctcggcttcccaaagtgctaggattacaggcgtgagtttgaggcggagtttcactcttgttgcccaggctggagtgcaatggcgcaatctcagctcaccgcatcctctgcttcctgggttcaagcgattctcttgcctcagcctcccgagtagctgggattacaggcattagccaccatgcccggctaattttgtatttttagtagagacagggcttctccatgttggtcaggttggtctcgaactcctgacctcaggtgatccacccgccttggcctcccaaagtgctgggattacaggcgtgagccactgtgcctggcctatttttatttatttatttatttttatttttattttttttgagacggagtctcgttttgtcgcccaggctggagtgctgtggcgcaatctccgctcactgcaagctccgccttccgggttcacaccattctcctgcctcagcctcccgagtagctgggactacaggcgcccgccactgcgcccggctaattttttgtatttttagtagagatggggtttcaccgtggtctcgatctcctgacctcatgatccacccgcctcggcctcccaaagtgctgggattacaggcgtgagccactgtgcctggcctatttttatttttttagacagggtgttactctggtacagtggcccaatcttggctcactgcagccttgacctcttggccttagacaatcctcccacctcggcctcctgagtagctgagactacaggctcaagccactatgccaagctaatttttgtatattttgtagagatggggtcttgtcatgttgcccaggctggtcttgaatcctgggttcaagtgatccacccaccttcgcctcccaaagtgctgaattagaggcatgagctacctcacccggcctgattctttgttgaaaaaatcatatgcatgtttaaagaaagtgtcatttctttttttttttttttttttttttttggagacagagtctggctctgtcacccaagctagagtgcagtggcacaatcttggctcactgcaacctctgcctcccgggttcaagcgattgtcctgcctcagccacccgagtatctgggactataggtgtgcaccagtatgcccggctaatttttgtatttttagtagagatagggtttcaccatgttggccatactggtcttgaactcctgacctcaggtaatccgcccgcctcagcctcccaaagtgctggcattacaggcgtgagccactgtgcctggccaagaaagtatttctgcttctagagtttcaggccccctctccagcattaacctttcctagcagtttctcgtgtttctttctagtaagcttgtttggccaagcttacatgtatgagaatacatctcccttttcagtatgaaaggaaacacacctttctctgtgctttttcacatgacactaaatcttgactgttgctccatgtcagaatgtaaacaggctgtaaacctcttgttactgcacttccttttattggttttcacagatgctgtgtttttacaaattgaatgtggcaaccctgcatcaagtaagtctataagcaccatttttccaacagcacgtactcacttctggtctctgtcacattttgggaattcgtataatatgttttcattattatatctgtcatggtgatccaggttgatgttactattgtaattgctttggactgcacaaacgatgcccatgtaaaacatctgtttgtttttattatttatttatttagagacgggttctcactctgttgcccaggctggatgaaatgcagtggcctgatcttagctcactgcagcctcctcaatcaggagtcaaggatactcctgcctcagtcttcctagtatctgggtctacgggtgtgcaccatgccaggctaatttttttatttttatgtttgtagagacaggggtctcactatgttgcccaggctagtcttgaactcctggcctcaaatgatccacctgcatcagcttcccaaagtgctcagatcacagggagagccacctcgcccagccaattctgacctctttgccagtccattctggatggaagcagtccctccccttcagaatcccattgaattctccatagtaccacagtcttttggcacttacctttgcaggagtagctcttttgctcacaaatgtacttcctgtaactacattttaagctcattatttggatcatgtagcatccagaattttattctgctttgaatagctgcttccccaggtagacaggaaaccaaaattctcctacacaaattttggggctgaagttggggcgccgtggctcacgcctgtaatcccagcactgtgggaggcagaggcaggtcgatcacctgaggtcagcctggccaacatggtgaaacctgtctctactaaaatacaaaaattagccgggcgtggtggcgggcgcctgtaatcccagctactcgggaggctgagggagaatcgcttgaacccgggaggcggaggttgtagtgagctaagatcgcaccactagactccagcctgagcgacagagcaagacttcgtctcaaaaaaataaaaataaaaaaaatttgggggttgagggttggatgatactaactcatgcaaacaccaaaccctgcctttcttccccttcccggtggcaagagggcttttcagatcagtgatacattcgctgattctagtgttttccaccctagtagtcaagcctttgggtgtccaaacaaatagagaacaagagatcaggatctctaaaggtctagaaaaaccctgggccacttccattttgtgaggttctcagcatactgaaaactgaagatgtactaagagtgggttactaaaatggtggcgtatcttaaatctttccatggcaccatcctttctctcgtcctgtcatccctgtatctctctgccctgacacctaatctcacttcaggaaacataaattgaaagttcaaataacctcggattatattattctggactgtgtgttatgctgggcgacgaggctgcgcaggctcctgggccgagccatgactctgcaggaactgcggcgccggctcacacagcgcggagcagtgcacgccaatccggccaggcgctcgcgctgggttctgctcacgcccgtaggggcccgcgttcgctgcaacgggcccttcctgatggccgatcgtcggactcctaccccttttgccggctgccgtttgccccgtcagcgaagggcgcgcgatgcgtcccaagtctcggctccaggaaccagacgggtgagggctactgggggttgggttggaacgccccgaaggcaccacagcaaccgacgcgggaacgcctgttaaaccagccccgccccgagacgcgcgcgcccggcggtctcgatccagcgtggcccgcccctcacctcccgcccaaccaacagccacttcctgcctcactcccggccaatcttcacactccacgaagaatagccgtagggggcgtatgggacggtgcgtagagcgatgcccacgccggccaaccggatgtcggggcttgcgcgggagggcgggacttggcgccggctgtggctactcaggggccaggggcgggcacagggccgggcttcgtgcggtggggctcgctcgcgcggcagcggtggccgaggcctcttggttctgcggcacgtgacggtcgggccgcctccgcctctctctttactgcggcgcggggcaaggtgtgcgggcgggaaggggcacgggcacccccgcggtccccgggaggctagaggtgagaggggagacctgagcgcgtcctcgggcctgtgaggacctcggggggctgggagcgcctctgcggctgaggggtcgggcgtggccggcgactgaggggtcgggctggctcttgagggcccaggccctggccgacgcgcccgccgtgagcgaggaggcccgaatccgggcgtctttggttgggttgcgggcccaggccgcgccgccggggtcgggaggcgtggcaggtggcccgacagccttctttgacctctgggaaagctgacttattcctatggctttgcttctagggctttcttaggcctctttgccggctgcctgggcagccgcgaggtgggctggagtaactgggtaaaagtatagggtggaatcgggcctactaggtacccctagtagtagggaagggtggtattagaccgagagggaatgtttacaactagcgttacagtttaatatttgaaaatccaaagcggagactggaccctagttccctgaagagaaaggggaatgtaccagaaggagaacacgcagtggttgagaaacttagcagttacagcacctattctggaggcgagtaatccagttggagagggacagggcgttaaaagcaggaaagcccccgaaagctcatctaagtgcatctctttccacaccggaggcctggaggtatgaaatgactggcccaaggtcatgcgattagtgtactgatggtgctgggattatagttcagggatagaccgtgcagtggttaacgctaaggccctggctcgagtctttgattggtcattggttgctctgtgaacttcggcagttttcttaccctttgtgcccccgttcttgtcaagtaatggatataataatacccgatggatttgtgaggattaaattaagat

SEQ ID NO: 10553 - DNA, 6000 bp, Homo sapiens
ctcaggtgaggacaggcccacctgggaaactcctgtttttaaaaccatcaaatggaccaggcttggtggctcacgcctataatcccagcactttgggaggccaaggcgggtggatcactgaggtcaggagttggagaccagcctgcccaacatgggcaggctgtattttttgtaaaaatacaaaaaattagccagacgtggtggcggacacctgtaatcccagttactcgggaggctgaggcaggagaatcgcttgaacctgggaggcggaggttgcagtgagctgagatcacaccactgcactccagcctgggcaacaagagcgaaactccatctcgaaaaacaaaaccaaaaataaaaataaaaaaatttaaaaaaaagggagtgtccctgcacaagctcctctctctttgcctgctgccatccacgtaagatgtgacttgctcctccttgccttctgccatgattgtgaggcctccccaaagtccaataaacctctttcttttgttaaattgccccgtcttgggtatatctttatcagcagcgtgaaaacggactaatacactgggcatggtggtgcacgcctgtaattccagctacacaggaggctgaggcaggagaattgcttgaacccaggaggcggaggttgcagtgagctgagatcacgccattgcactccagcctgggcaacagagtaagaccctatctcaaaaagaaaagaaaagctgggtgcagtggctcacgcctgtaatcccagcactttgggaggccaaggcgggtggatcacaaggtcagaagatcgagaccaccctggctaacacagtgaaaccccgtctctactaaaaataccaaaaaattagccaggcgtggtggcgggcgcctgtagtcccagctactcgggaggctgaggcaggagaatggcgtgaacctgggaggcggagcttgcagtgagccgagatggcgccactgcactccagcctgggcgacagagctagactctgtctcaaaaaaaaaaaaaaagaaagaaagaaagaaagaaaagaagaagaacagagaagcagagagaagccaggccagctgccccagtaaagactcaggttctcacgatcccaggccacttccagactgaatcagttctcagctgtacagcaggtgatctctgccctacagggatctgcacccatttactcaggaaactgtcttcttactatccagttttgagagtttttatatattttgaattcaaagtatttttttaatcatatatatgattcacaaatgttttctctaagtctatggtttaatttttctatttttttatttttgagacggagtctagctctgttgcccaggctggagtgcagtggcgcgatctcggctgactgcaagctccgcctccctggttcacgtcattctcctgcctcagcctccagagtagctgggactacaggcgtccaccgccacccccggctaattttttgtattttttagtatagacggcgtttcaccgtgttagccaggatggtctcgatctcctgacctcgtgacctgcccacctcgtgctgggagtacaggcgtgagccaccgcgcctggccctctctgtgcctttttttttttttcttttcttttcttttttttttttgttggagacggagtttcgctcttgttgcccaggctggagtgcaatggcgcgatcttggctcactgcaacctctgtctcctgggttcaagcaattctcctgcctcagcctccggagtagctgggattacaggcatgcaccaccatgcccggctaattttgtatttttagtagagacagggtttctccatgttggtcaggctggtcttgaactcccgacctcaggtggtccacaacctcggcctcccaaagtgctgggattacaggcgttagccaccatgcccagcctggcacaatttagcataaagtttttgaggtctttgtactattccagtaggacagttggtgaaacttgaataagatccgtaaaatacttgattactaacttgtatcaatggaaatctcttggtttataactgaattttggttatacaagttttttttttttttttttttttttttttttttttttttttttttttgagacacagtctcgctccgtcgctcaggtgtgatcttggctcactgcatcctctgcctcctgggttcaagcaattctcctctctcagcctcccaagtggctgggattataggtgcctgctaccacgcctgactaatttttgtatttttagtagagatggggtttcaccatgttggccaggctgacctcaaactcctaacttcaggtaatccgcccaccttagcctcctaaagtgttgggattacaggcatgagccaccgcgcctggccgagactgtagatttttgcaacttttttgtaagtctaaaataatttcagccaagcatggtggctcatgcctgtaatcccagcactttgggaggctgaggcagaggatcacttcagcccaggagtttgagaccagcctgcaacatagcaagactccatctctggaaaaaaaaaaaaaaaattagagcctgtggtcccagctacttgagaggcttgaggtgggaggattgcttgagcccgggagtttgaggatgcagtgaggcatgttgagccactgcactccagcctgggcaacagagcacgatcctgtctcaaatataaaataatttctaaataaactttcttgttcaagctcagggtctgagttgtgcactgcctatgatccactccacagaagttctgatttcttctctgtgcaatggttctgccggcctttctgccgcccagaggtcctggtgagtgggcatcagagactccttagggctctgtggaggctcagggaggagctttcgcttccctcctgatgctggtgcctccagagctagacaggaagatggaagctgggtggcccgagcaggggtgggggcttggctggccctcctgtcagcttgagctggcttgagcccaggcagggccctgacagcctgggcaggctcagagggagggaggtgggaaccaagagacccggggagggctcccggggccaagacccaggtccctgccctgcacatctgccaagggacttcctcagaagctgctgatgttaggctttggcttcctgctgtggactgaggggatgaactccgacgggaggacattcaggccttggaggaaatgagagcttggctgacaggagggcctggactcacgaagacacttggacacccacaagcacagagacatgggtgtgtgacaactgaccaaggggcatgcaggtatgtatgcgtggtgcacacagacaccctgggcacagcccactggcaccagcgtcaacccctgcgtggtgggctgcatcccacccttcaggcaggccctgtggggcaggtttcagggaggaaggaggctgagtgggcagagtctgaggacgcggccaccatcgctccctggcactacatctgtgtccgggatctaggaggcagtcctccatcactgagccccaagatgactgtcacagcttggtctaaagcaggggccgggcctgagccctggcccctgccctggaggagctcacagagcccccagctggggcatatctggtttccgggggcaggggcgatacccagaggaggaagaagggattctgagagagcccaacaggctccgagcctcaggctggagctgagcttggggcagcaaggaaggaccaggtgcgagggcagaaccatgcggcccgacccctgcagcacggcctgtggcctcccccagctcctgcccgtgcttctgggtcagtctggactttgccacttctgaccaaaagccaccgcaaacccactcaagccaaaagaggaagtgaccgttaggcccaactgggaaggctggcggccaggggcactccaggcagggcgaggggggcggccgggggcgctccaggcggggcgagggagacacccagaactccaggcaggagtcctcgggtgccacctttcctctccacctggccctgcgtgggctctgtcctcagggtggcccgccgtagtccccctccccactctgagtttcctgtcccaaagtcctaaggaagtttccagaactacatctcaccatcttgagtcagccttggctcagtgtccatctcacaggcctggaaggggcaggagtcagcactgtccagaccacagggcctgagtgtggggagggcagccgtctaggaaggtggtggagggttgttaccttgaggcaagagggctgcggggcagaaagacacagcaggtgactgttgtgggaggcccaagagaggcctgggagagggatggcccacaagggctgaccctcccgccacccagggggccttggacaggtttcctcctggcagggtggcccttgtgcatggaacccctacaacgactaaggctggcaggcatgaggtttcctgaaggagaaagagcttgtggggcccagtgtggctgggggggcgctgggactccattctgaagccaaaggcactgggaagggcttccgcagaggagggtttggcaggggttgccaggaacagcctggatggggacagggaacagataaggtgggtggaggagttagccgggagcctggggctggctccagcatgatgtgggggtctgcaaggccctggagaaagtggggtggtgcagcagggggcacacccacagctggagctgacccagatggacagcttgggctctgccacgcgggactaggcaaggaaggggcacgaacaagcaggaagtggtgaggcggtctccagctagctgctctcccctgcccagactttggtttcctccctgctggcttggcctggctccctggctctgtgtggtatggtcacacccccgtgcaccccctccactgagatggggcggggagagcaccgaggctgctcttcctctcctgggccgtcctctgagcagcagacggggctaagcgttccccagctcgccttcacacacagcccgtgccaccacaccgacggtaccatgaaggacgaggtagctctactggctgctgtcaccctcctgggagtcctgctgcaaggtgggctggttcctatctaggaagagggtgggccttagatccctacagcttgccctctgccccctaggcccaggtggagggcagaggtggggactccagcccaggcccaagctggaagagggtggggactttcagggaactggggggcacctggctgtgagagctgtaggacttgggggtggcaagggtgccaggacaaatggtaggatagccatgggcttggggaagctgatctctgctctttccagctgtcccctctctgggcgtcccagcaagcggcccccattccctggctctgcttcaaaggcacctccatactgggaccacgtggagcagggtagaggtgggactccttcctccagccccctaaaaagagcctgcttaatgcctttctcagactggccctaaaggacacattccttggccagatatccttgccacctaagagacaccactactccacagtgtgtgggctaggataaggcacagcctggggagggggctctgaaggggctgaacagacaggccagcctgacctccagctgctcctgcactgagctggatggccaccctgtgacacccatctgcagagggcccagaaccaaaggtgccagggctgcaggactcagggggagatggtccgacgggaggtctggggagggagcgcacagccagcactggtctgtgtgtggtctggcctggcctcacctgaccaagagaagggctcctgcccacagagaaactttagggccagcccaccctctgcaactaccccagccctggggtcctggggttaggctaggagagtcccagctgcaacctcctgggagcaggagagaaggtgtctgtcagatttaggcctgggaccggaatgcaggaacagaga

SEQ ID NO: 10554 - DNA, 6000 bp, Homo sapiens
aggagaactacaaaccactgctcatggaaataagacaggacacaaacaaatggaaaaaacattccatgctcatggataggaagaatcaatattgtgaaaatggccatactccccaaagtaatttatagattcaatgctattcccatcaagctaccattgactttcttcacagaattataaaaaactactttaaatttcatatggaactaaaaaagagcccgcatagccaagacaatcctcagcaaaaagaacaaaactgaaggcatcatgctacgtgacttcaaactatactacaaggctacagtaaccaaaacagcatggtactggtacgaaaacagatatatagaccaacggaacagaacaagtcctcagaaataacaccacacatctacaatcatgtgatctttgacaaacctgttgaaaaacaagcagtggggaaaggattccctatttaataaatggtgttagaaaattggctggccatatgcagaaaactgaaactggattccttccttataccttattacaaaaattaactcaagatggattaaagacttaaacataaaacctaaaaccataaaaaccctaaaagaaaacctaggtaatactattcaggacataggcatgggcaaagacttcatgactaaaacaccaaaagcaatggcaacaaaagccaaaatagacaaatgggatctagttaaactaaagagcttctgcacagcaaaagaaatgatcatcagagtgcacaggtaacctacagaatgcgagaacatttttgcaatctatccatctgacaaagggctaatatccagaatctacaaagaagttaaacaaatctacaagaaaaaaaaatctgatcaaaaagtgggtgaaggatatgaacagacacctctcaaaagaacacatttatatggccaacaaacatgaaaaaaagctcattatcactggtcattagagaaatgtaaatcaaaaccacaatgagataccatcttgtgccagtgagaatggtgatcattaaaaagtcaggaaatgacagatgctggagaggatgtgaagaaataggaatgcttttagcctgttggtaggagtgtaaattagttcaaccattgtggaagacagtgtggcgattcctcaaggatctagaacaagaaacaccatttgactcagcaatcccattactgtatatacccaaaggattacaaatcattctactataaagacacatgtacacatatgtttattgtgacactgttcacaatagcaaagacttggaaccaacccaaatgcccatcaatgataggctggataaagaaaatgtggcacatatatactatggaatactatgcagccataaaaaaggatgagttcatgtcctttgcagagacatgggtgaagctggacaccatcattctcagcaaactaacacaagaacagaaaaccaaacagtgcatgttctcactcataagtgggagttgaacaatgagaacacatggacacagggaggggaacatcacacaccagggcctgtcggagggtagggagctaggggagggaggggtagcattaggagaattacataatgttgatgatagtttgatgggtgcagcaaaccaccatggcacatatatacctaaacctgcacttcctgcacatgtatcccagaacttaaaatataataataataataataaaggggtattgaaattccccagtatttttgttttgctatgttttcctcatgtccactaatatttgctttatatgtttacacaccttgatgttggttgcatatttataattgttacagtctgattaacttatttgcttattattacttaaagacaatcttagtctcttgtaacagtttttgacttctggcctactttatctgacataaatatagtcacccctgctttctttttttaccgtttgcatgaaaaaattctttcttttcactttatttttgtccttaagcttgatctagtctgccattgaagctctctattgtattttttcatttccttcattgaataatctaatggcaagacatctgtttaatttttcttgatgtctatttctttgctgaatttctaatttataccatgatttttttttcctgatttctttcaatagtctatctatattatcttgaatcttgctgactttttattttttatttattttttatttttttaattatactttaagttttatggtacatgtgcacaacgtgcaggtttgttacatatgtatacatgtgccatgttggtgtgctgcacccagtaactcgtcatttaacattaggtatatctcctaatgctatccctcccccctccccccaccccacaacaggccccggtgtgtgatgttccccttcctgtgtccacatgttctcattgtttgattcccacctatgagtgagaacatgcagtgtttggttttttgtccttgcgatagtttactgagaatgatgatttctaatttcatccatgtccctacaaaggacatgaactcatcattttttatggcttcatagtattccatggtgtatatgtgccacattttcttaatccagtctatcattgttggacatttgggttggttccaagtctttgctattgtgaatagtgtcgcaataaacatacgtgtgcatgtgtctttatagcagcatgttttataatcctttgggtatgtgcccaggaatgggatggctgggtcaaatggtatttctagttcaaatcttgctgacttttaaaaatgttatattattattattattattattattattattattattttgagatggagtctcactctgtcaaccaggctggagtgcagtggcacgatctcggctcactgcaacctccacctctcagattcaagtgattttcctgcctcagcctttttggggagagtcatgtttctttgctttttcatgtttcttgtgtccctgtgttgatatatgtgcatctggtagaacatttgcctctcctaacttataaagtagcttttctaagaaaaaactttcacttgttgataggtcctcgggtgctgagtagggtgtatcggctctgcttctggctggcacagtagcgtagtctctgtgaagcttctcagctataatcaatgtcagtgacaagtggatgcctcagtggcccgtactgcagtaatttgtgggagtggtggtagcaaagtagattacactgagctcaggcaccaagagagcacaactactccaccagctcaggtacagcttccctcgggtgggatgcagggctggtttgtgtgctgagggaataagaccagtgttctggcttgggcatagcttttctggaggtggggcaccaggccgctttatgtgccaagggagcacagctgctccaccatctcagacattgctttcctggggctgagtctggggcccccagttagtgtgcacacaagggggtattgttgccattctattgcgcatgcttctctggggtcaaggtgcttggctcatgcttgagagggtacaactgcttcaccaggccaggcttggcttccttgctgggttggactgtttggtccttgggggccagagcagcctgtaggttcagaagcctgggtcatgaccgttccactgggcctaggcctaggcttcgaatggccatgggtggggcatagctgccactggaatggagaggatactgtgccttctcagcagcttcataaaaaggtattttggtctatatatccttggtaaatctgtatttctgagacagcatgagatcaataattttctattctactctcttgcttacaacattcaacaactcatttcctttttttttttatcacagagtaatattccattgtatagatgtaccatagtttgtgtatacattctatgtatcattattgaatgatatctggttgcaaacatttttggcaattatgaataaagctgctataaacattcatgtgcaatttttcatgtggacatatgttttcaagtcatttaggtgaataaaaagcagtgcagttgctggattaggtgataaaagtatgtttaattttgcaggaaattgctgaactgtcttctagaacaaccgtaccgtcttgcattcctgtcagcaatcagtgagaattcctgttgctccgcatcctcaccagcatttggtgttgtcagtgttctagattttagactaaatgcagtgttttcattttgtcctattctagatgctaacttttattgtgatttagtctcgtgagttgttttaaattgttacataagaatttcttagtgtatagagtttcctatgtttttgaattactttttaattttaattgcattatgattagagtatgtttattttgatggttatctgtggaaattttcattctgatctagttaagtggtgactttgtgagtttccgtgtgcttaaaaagactgcaaatctctcattgtggctgccctggaacttagtttatataataaataagtttcctcatgtctgaacctgcccaggcacctttcccaatgtatcagatgtttaacactaaggatctgttttgttctggaaagttatttttatctggcctcatgattacagtcctggccctgaacttcagagaatggaggggtaagcaaaaggacctcagactgtgccaggaaatgtcaagtcacctgctgtaggctactactaatggagcatggcctatttacttggacaccaaactatccagtgctaacatgaggtttttcaggactagatcccatggccatacagccctgcctgccagattggacgtgaaaagtatttccgcatctgacattcctgtttcacccacacagggcatcgttttgcccaggacaaagttcacctccaatcttatccacactatttctatctttgcttccttgataagatatagacatttatgcagtggttcaaagtctagagtccctacacttctggtacatgacagctgtgtctcgatggagtagactctcagaacagcgcagtttgccctccgctcacgcagagcctctccgtggcttccgcaccttgagcattaggccagttctcctcttctctctaatccatccgtcacctctcctgtcatccgtttccatgccgtgaggtccattcacagaacacatccatggctctcatgctcagtttggttctgagtctcctcaagctgggatcaggtaagactcatctttgtttcctccttactaactaacagtttgagttctttagctacaatggttgcagcataatggaatgaaggcatctttgtcgtttccattcctttggcttctcctagcctcagcctggggaaggatcaggcgctgtggaaacaattatagtagcccccaaataatggaaacacgggtgttgaagacgcaccgtgatcgttgacggggacacacctaacgtgttaaggtgaataaattcagtgtttctcccagatgggctgagtggtgtaggcagggttattggagcaccaaggttgctgacatggatgtccatctgggaagagacacagttaggatttttggggaaaagacaatgtatccagctaaagacatgctgagttagaaatgtctgtggtatgagacacgagggtggaggaaggtgtacaggtcttgaggtgagaaattagctgaaacctggcatattctgggaagaaatccactcttctttctccttccagttactgttaacacagaacctagtatataggatgttgagtgactgaatacaattcacagaggaagcttgaggttggggtagaatgctggtggctagatggtcagtacccagccacagaagattcgattgactgtgttcactttctgtctgtgaaggttcatcctgccacctgtccacctatatcttttttgctaaatgaagctaagaaaacagaaataagggcaatcaaaacatagagcatgtttccttaaaacaaaaacccatatgtgttactaacaggagacgctctcg

SEQ ID NO: 10555 - DNA, 6000 bp, Homo sapiens
gtgcaatcatagctcactgcaaccttactcctaggctcaagctaactattcttaatcctttattattaccaatattctacaattgtttaaataaaaggaactttataatcaaacagtacagaatactggctcaagaacctatgtcaagatgagctgaattttggtacattattttaggaattatgacaagctaatagaattgggcttgtgacaatgagagtaattcacatgacaggtaaaacttactcatattaaaaatgtttagatatttgcttctatagatgtcactttaataaaataacaatttagttttacttgtggcttacctagttagcaagaactttaacagactttattgggacaagcttactgctcttgtaggagctcctctcacaagtagttgtaatgctgtaccatgatactcaggatcagtaacttcagatgttactatctttctcttcatctttgacttgcagagagcctcctctttttggatccaggcatcttttctgaatcctggttccattagtatacctgctctcctatgatcccaaatcatagtcaatggtgcctccaacatagcaccttcagttaaaggctgcctagtgctctgaggaaagcttactgattatcttcctgctctactcaccccgaaaggcagaaaagcaacatagtcactcctgtgctcatttgtaattgtaaagatcagagatatagatatttgtaatgagagcaagtatatactcattataggatcaatttaagaagtttaaaatatcccaaagtagaatttctatatctagtcttctgggtttttttcacgaatatttgcaagtgattacgcttaacttcacacatgaaagattaatctgaaaggtcagagagaccctgttattcctgaccacgatagaactgctcctgtggtttgggacaagtaacaaaacaactgcttgagttttgtttgtaaaatacactattaatatttgacctacctcaaaacgtattgaggatctgtgaaacactaagtgcccaaaataaaatattgctgattgtctttttattaaaagtaaatttcctcattaagccaaccggccttctgtaagtcacagtgctcaagtctcagggtttgtcattaggagaggtctgtcgttaaggatttgtaggtgtaattgcctagcctccattattggtgattgcgatagagaggttttacatttttctgtttttcatcctgccccaaagctcagtttattgaagacatttgtaagctattggatcatcacttgaatcaagattttgactagtgagcccaattgtccctttcttattatttcaaagctatagtctgagaaatggctaattttaataactgtcctatcataaattaatgttggaataaactgaagttggagatgaagacttcatgaaaactaactaaagtctgaaataaatcacctgttttatgtccaatagctactgcctttgatagaacagttttgaggaacatttcattcttgaaggcagcatccgacatggttctcagcaaattggaatagtaaggattgttgggttgtttcgatgagtggaagcagcgtttgtagcataaaagttattcaataatcttgtgctgttgacctgaaaatgtgtcttaactattcatcaaggcaagcctggtgaagcctttacttgttactacttcaacagttggaattagttgctctttttacttgatgaagcaaaactatacctctgaatatttatggatgctttttacaaaatcaggcttgtgttcttaatccgaattagtaaagttttatggaagctgaaatgtaatacagtagtctccccttatctgcaagagatacagtccgagacccctagtagatgcctgaaacctcagatagtactaaaccctgtatagtctatgttttttcaatctgacaaccaaggcggctactaagcgactaaggggcaggttgtatacaacctgtgtggataagcaggacaaagggatgattcacatcccaggcaggacagaggaggaggatcatgagatttcatcactacatggcttgtgatttattttattattattttttttttttgagagggagtctcgctctatcacccagcctggagtagtggtgcgaccttggctcactgcagcctctgcctcctgggttcaagcagttcttctgcctcagcctcccaggtagctgggaatgcaggcgcccgccaacatgcccagctaatttttgtatttttagtagagacagggtctcaccatgttggccaggctggtctcgagctcatgaccttaggtgatccgccctcctcggcctcccaaggtgctgagattacaggaatgagccacagtgcacaaccagcttgtgatttaaaacatggtttatttctggaattttccacataatatgtttggaccaaggttgcctcgggtaacaaactatggaaagtgaaattgcagataaagggagttactgctgctgtgctctaaaattggtgtttgggtgatcaggagtgggtagccaatgggaagaggtgatcaggagcaggtagccaatgggaagaggtgatcaggagcgggtagccaatgggaagaggtgatcaggagcgggtagccaatgggaagagcacttctgagtgatcaccaaagcagtttctttagtggtcttttcacattctccaatgttcaagcatattttccactttccattttctatttcacctcattttgcctcatcatctgccatccctgcttatttcttaagcctactgatggcactcactaaattgtgtttagggctaatgaatcattgttccttaatatccttttcaatatgccacaatttagaatgcatttaaaattttctaaaacaatatcctactctgaatattaactaatttgagccacattcccatctctaactcagcacaaagtgccagtcttccccaatatctcctctcaactccccaccgcaccttataaaattggaatcagaaatctcactctgtcattgctcatcttagaataaaaacactgattttaatactgttttactagtttcagccttctaagtacgtaggcctctaggtattctgcagatcactggtggtcttgatagccattcatatatgttcgtattatgttatttttcaactaaatcgcaattggaaaaaaacatctttaatattatgcccttggatctgttacttcattactaatacttgtgatgcaataggacacttcacctgtactaaaagggccaagagtaaatgtcttgttttgttgttgttgttaaacatgtctacagagttggcagttaatgctgaatttgtcaaatagctcttccaaaattatacttgtatttaaaaaataaatggatctacctaatttctattcatctaatttgcagttttgtcttattaaagtggtatgtttttcaatgtatttttttctgaagttgatctctttacatttcagctattactgtaggcagaaagaaattgacttgtaatctttgatttttttgcatttgtaatggctttgtacttaaggtaggattacatgtttacagattgtgggggaaaaaaaaagaaaagtgaagggagagaaaagacaaggcgagtggccagagaccctcaggatccaagagttaactctgattaactcagatgctttgttcagccaatttcagacttcttttttcctaatacaagcacttaaggataagcctttctgtaagaactgccttacatgcatcatagtattttaaatgtagtgttttcattcttcttctagtctaattaccttcaacttctattattagttctcttagacccattagttatttaaaattgtgttattaacaatttctaagttcatggggtttcctctttttaaattgctctttaccttcgttgtccttcgtggtgctctccgtggaaacctgctttctgatctagtaagtgcttattctttgtgcatgtccctagacttgaaatcactgcataatccctaactgtgtgtgtcctggcttagtgcatctaatgaatgactgaatgaatgcatctttgcctttgccttacccccgggcctgaaacatcgtcttggtccccttctcaataccttggatccttggagatcaaggtcctggttgttctggcaagttcaacacaatctggcctcatgatcagagtcctgtccctgaactcaagacaagggagggatgggcagaattacctcatgctgtgccaggaaatatgagtctcatggggcatggcctgtgtgcctgggcaaattcactgcctcactaccctgtgctgagatgatctctttttttttttttttttttttttttttctgagatagagcctcactctgtcaccagactggagtgtagtagtgcaatctgggctcactgcaacctccctcttcccggttcaagcaattctcctgcctcagccgcccaagtaggtgggactacaggtgcgcaccaccatgcctggctgatttttgtattttcagtagagacggggtttcatcatgttggccaggatgatctcgatctcttgacctcgtgattcacctgccttggcttcccaaagtgctgggattacaggcatgagccactgcgcccgtccaatctctctttcagggacagatgttcactctctcttgcagctctgcctgccagactaagcctgaaaatatctctgcatctggcattcctttaccacctatgtggggcacaacccagaacaaagtccctccaagtgtaccctactctctttccattatcatttctctggtctgagatagatgtttatgacctgccaataaatgcagtgactcaaactccagtgcccatactcctcattcatacagccatgtttagggaggctctagggagaaatgcacagtttgacatcgttcatgaagagcctctccacggctcctgcgcctgagacagctggcctgacctccaaatcatccatccacccctgctgtcatctgttttcatagtgtgagatcaacccacaggaatatccatggcttttgtgctcattttggttctcagtttctacgagctggtgtcaggtaagcctttcagtttggactgttgtttttctccttgttgaataatattttgagttcattcatgacaatgatctcagcacagtgagatgcaggaatctttggtgcttgcattctccagcttctcctggcctcaggctggaaactaccaatgccaggagctgtgggaagcacagggcagcaggaattgaggaagactccttgggctgtttctcaaggacttgggcactatcacagtagctcagaataatgggagcaggccctgggagcagggagggaacacattgagaacgccaaggtaaacacattgttctccccaggtgggctgtggggcttaggcaggggaagtctctaataaaatccccaggtttttgacttgggtgcctgggtggaaggtggcactgtttaggatgtttggagaaaaagacaatgtgtccagttatgcacatgctgagttagaaacacctgtagttatggggtagagcaccagacctttaagtgaggagtaagttggaacctggcatagtctaggcagaaacccactcttctttctccttctagtaaccatcaagacaaagcctggtgtataggatattcagtaatcaaataaattttgcagggagagataggggctggagtagaacactggattctgggtggtcagtgttaagccacaaaaagttcatttgactgtgttcactttctgtctggaacagttccatcctgctatttgtctacctatgactgttttgctaaacaaagccaacaaaacagaaataaggggatcaaaatccatgtgtgctcagagggcgtggtggctcacacctgtaatcccagcactttgggaggctgaggtgggtggatcacctgaggtcaggagtttg

SEQ ID NO: 10556 - DNA, 6000 bp, Homo sapiens
ctgtagtcccagctactcaggggggtgaggtggaaggatctggctgcagtgagcttgacttgccactgcactccagcctgggtgacaactctgtcttgaaatatatatatatatctatatatatatctatctatatatatagatatagatatatatagtatgctatatattaattatatagttatatattatataattatattagttatataatattatataattatattagttatataatattatataattatattagttatataatatatcatatatatgatatataaatatatataatataaaaataatatatattatataatatatataatatataatatattgagtaacaaaattactcatagtgagagaaaggcaaatcaaagctatgtcaaaatgcaatttttttttaactgtcagactagcaaaatttcaaaagctcttccatgtactgttaatggagctatggagaagaaagctgtcttatactatgttagtggaattcaaagttggaaagctcccggacagggaaatttggtaatacttaagaggactagctgtgtggctaccctctgacacagcaatcccacctccaggaacttactccacctccgatacctccaatatgaaaaaagcatatgtatgagtttaatctttgtaaagctttttaaaaacaattgcaaaatagtggaaaccacctaaatgtccaagcataaaagctgagtatgctctatccacccaatggagtaatctgtattatgcatctgaaacaatgatgaggtggtctctgaatggatgcagagtgatttctagtattgttaagagagaaaagtaagatgcaaggttcgataacatacacttgctttgtaagaaagaaggagaaacattgcaaaagggaacataggaaggataaactagaagctgatgagattggccgctgagggtgaggtgtgatgacgggaaggatggcgcttttttcctgatacacatttctgtacagcattggcatttatgccacattaatgttttgcatactcaaaatataatgctagttccacaaggatggagagataagggagtgtgtataatgcaggcactagagctctgggggaattcaagagaaggagaagagtcacaactctaattattagaatttagggtgctgctattcttcattctagggaaactgtcccttgcctaacatgattaaatgccaggagcccttccccacccaatgacccccttcacatttccaaatgtccctcaggggcattactgtccccacatgctaccactgatttagactgtcatttcccgtccatgggcggggagcgccaagcccacacacgtcttaatagcagtcacacttcatgatgctttatggtgactgcaaatgctgaacagtggcaggaatgttatgcgtgatttctcagaagaagcctgacctttcccactcctcctgcctccaccagggctgggctcagaccctcacctctcccttgagggcttcaaggaaggaggcattcagctgaggctcagatccagtggctggtaccccaagcctaaggttcagtggagagaccaccagggacagtgcctgcctccagagtttgaagccatcgtctgggatgcccaggacctgttcagtctggaaacatctgtggttgtccgagcgggagccctcagcaatgtgtccgtctccatccagaatctcctcttgagccagaagaaagagttggtggtccagatagcaggtcagtggctgttagctcacacccatcttcctagtcctcatgtgtacatacacattggcccaaaggcagtctataaagacacaatggtactgcgcctgtctgcatatagggtgtgttggccttgacacctgaaaagtcagcaccttggatattaggaacacactaagaacgctactgagaacccaaacagtcagtgagagaggccccagagagcccgcctttctgtgcctaaggccatacactaaaacccatcaactctgctcatcagaggcatcatgggagccaatagattcgtaatgctgtctctcaaacagtatgtattgagtttccacaacgtgaccccagtccctaccctcaggtccccatgccagtgggggatacagacaataagcaaaagaagtgcatcctgtcacatcacgttagaaggtggtaggtgcagccgggtgcagtggctcacgcctgtaatcccagcactttgggaggccaaggcgggtggatcatgaggtcaggagttcaagaccagcctggccaagatggtgaatccccatctctactaaaattacaaaaattagcccggcatagtggcaggcgcctgtaatcccagctactcgggaggctgaggcaggagaatcgcttgaaccggggggcagaggttgcagtgagccgagatctgcactccagcctgggcaacagagcgagaatccgtctcaaaaaaaaaacaaaaaaaaaaaaaacaagaagaaggtggtaggtgccgtagagaaaaatgaagcaggctgaaagcagtgaggcatgtccacagattacaaaaggcacgtccaggaagtgggcgtgtaggcagtgagctgaaggcaaggtcattattaaagtcttattatgaggcagccactgaagggtttcaagttcatggttctaattgttttacattttaaggacaaacccaacatacgggccacttttcacacgagtccaaatcaaaagctattttattataacagaaaaaaactccccctttgatatagtcagtcagatacaagccaatgcacacatgttctcaagataaatgataacttgtctgcaagtaggaggacctggcaacaccgcttaccacagcagttctaaattccgtgggaattgggatggccatctgtgtgagccaactgtctttaaccaaaggaaaaatcaagcatgtgatacgtctagggcatacaacttggagccacgcagctaagctaaactcccatgagacagggatctccacggcagtgctctctcttttatgtttacatttcaaacaagtggcccttaaggaaaacattattgggttgtaaagaaagaactgatatattttctaaggaaaatgaactaagagaggggaagaggaaagagtctctctttttgcaccaggaaaaacccaatattttctttttagcttttaatataaatcttaatttatattattgatatttattatgaaacaagtttatataaaaatttttagatgggtaaatgtttgcatgcgcggacccctctacagagggcgtgactcacatggatacctttgggaaggcattctggtggcgggaagggcaaagccaggggcctgagagggaaactgccggctgctggcagaacagcgaggaggccagagggtcgagggggagggtcacaggtcagagagacagtccgccctgagcccttgcccttgaccccaggccattgcttcagacaccatctgttgtgaggaccaatccattgtgacccagtgtttttgtaccatacaataaaaatgcactgctagaaaaacaaaattaaaaaccacagtccactgatgtcacttataagccagacacacagaacaaatgccgtctgattccacggatgtgggattacctagaggagtcaagtccacagggatggagagtatacggagggcgccaggggcttgggcgtgggaagaggaattactgtttaataagtacagagtttcagttttgaaagatgaagaaacttctggagatgggcgggggtgatggttgcacacgacatggtgaatgcacttaatgcccctgaactgtacacttaaaaatggttaagatgggaaaggttgttacgtatattttactacaataaaaagaacattttttaaagatctgagataaaagcaccattttctaataactagatgacacagacagaaagttactctattcaaccgccacagggtttgcgaagggccggtgggttctgcgcgtccctgcgccgctggtgctgtcggcgctgcccccggccacgtcctgcctgcgggcgggtcctccctggggagccgggagggacgtgggagctgcgaggccgcgcgcacgtggttcggttctcacttcttccaaaagcgtggtaagaaccgagggagaagccggatgtttgcaaacaagcgaggagacgacttgcggaccagacggcgcgggtgcgagcaggagctccccggacatccgccgccagccaagcccctgggaccctcccgcctgcggacgcggggcgagggcgggaagacgcggggcgagggcggcgctgcggccgcagaagcctcgagccgggctggggcgcggttccctcccgcacgccccgcggcgcgcccccgccccctccgccgcgcgcgcccccgccccctccgccgcgcgcgctcccgctccacgcccgtttcccaggcggctgcggtggcgcccggagaaggtcccgcgggaggtttcccggcacgcggcgggcaggccggtctcgcctctcggtgctcagcggcgcctggaccgacacggcccccgcgggtgttttccagacgtgttcgtacccggagcctctgcgtggaagagcgcgttcgtcgcgaccctgccgctgctgttggtcctcgcggcgctggcgctgggcgtcctccggaagcagcggagaagccgaggtaccggcgcgggcggcggggcggggaggggcaccggccggtgctgaaccccggggccgcggaggcgcctccccccaggacgcggcgcgggaaggcggcctggaaggggcgggggcgcgcactcagccctctccgctcccgtttcccttcagaaaagctgaggaagcaggcggagaagagacaaggtgagcggggacagggcgttctgcacgcacctgcccaagtgccaaaacccgccgtcatctaaaggctgtgggtcccgttacgagggtttattccagcgcgaggtgtcagggcggccaccggggaacggggatcggtgaccccggtggggaagggggaagatcgttcatatggacaaaagcggaggtgcggaacggctgcattttccacggaggctagtgcacagatgtcagggttgaccggctgctgtcgttacgccctcggagcttcacatcacactgtacagagggagcggtgaccagggtctctgctgccagcgccacctcgtccaggttttcatagcgcacagggagtcgggcggatgcgcaacatctccgcacagggtcaggaagcggcggtcaggcaccgagaaaacagcccagttacgtgaggcagtgtccggggcttaacgtttccgccgagctaatagatttgggaggctccgaccctgattttcacactagcaggagggagggcgctgggtcaccctcctatgcagaagggcagccaagggtgcgcacttccccatcccctgcctggagcctcacttccagcccagcctgggcccgcagaccaccgcgggtgggagtgccgcatcggaggtgaggcctcagtgttcacccatctgttctgtctgcctcattccccaacctgagagtctttccccttttcttcatcttttttttttttttttctctagagaaactcactgcagagctgggtaagttctgggtgcggggccacagtgctgcctgtcagccggaccctgtgcctgtgcagtgggaggaggggctccctttggacagcggctggcaactatctaattctaaaccatccctgtgagcctccacctcttcccttgctaaggggctgaaaggatggctgcctgccaccgtgcagctgcccgagaccctctgcacagaccctgccagctcctcccctgcaaattagacaattcagttaaaattcatcataaaacgtttactgtctccggttcatcttcttaaaatatccttttctttttaatgcaaatggcactaggaagggtggcacctttaatttgcaccaaaatgg

SEQ ID NO: 10557 - DNA, 6000 bp, Homo sapiens
aatgtacaccctcagacctttgttccttttatctttctagccaagtaaaattatttataatctctacaaagagtggcaattaaaattatttataatcattaatttctactttatttatatacaaatactaatatatgtatatacatatacagaaacaggagaagctggtctgatactgtgaaaacatttcagcaggatcttggcatagtatatgtatatatacatatactaatatatgtttttctgtttgtaaattttttatttttttcctcatagtcgttaaagatgttatgtgaatgtatttttaattgtgtagtcaaacaataagataaaagttttactttaaaaaagttgccctttaggctgggcgtagtggctcacgcctataatcccagcacttgagaggctgaggtgggtggatcacctgaggtcagccattcgagaccagcctggccaacatagtgaaacaccatctctactaaaagcacaaaaattggcctggtatggtggcacacacctgtagtcccagctgcttaggcacgaggctgaggcacaaggatcacttgaacacaggaggcagaagttacagtgaaaaagaagttgccctttagttgttctcctgttggtggccatttaggtggattgtcacttttgctttcagagtcactgctgctgtaataatccttgtacatgtctgggtgtatgttgtgagtatttctctaggtagttatctagaagtgaattgctggttgatgatcatgtgcgttttattttaaatcaccactgaagaagtacgtactgacttatgctcccactctcattagcagttgctaagagtggaggctgttgaatgggccaggaacttgaggggttggtttggaccaaggtcatgggtgacagtagaaattggaagtagttggaatcctgcagtcttagaggcagagtgcgtaaaataatctgtagcatttgttatttattttcctgttgcttatttcaagtttcatgaagttggcatttctctccattgttcatgcaaaatttctcttacggtagattcaccataaacttttgttgatcattatctgaaatgattttctgaaacatttttttttctagggaatctggaaacccaggaaaataccaaatccagatttctttgaagatctggaacctttcagaatgactccttttagtgctattggtttggagctgtggtccatgacctctgacattttttttgacaactttatcatttgtgctgatcgaagaatagttgatgattgggccaatgatggatggggcctgaagaaagctgctgatggggctgctgaggttcgtgtttgctgcttgtgcatttgtgtctgttattgtaaggagctgttattttgtgaaagtctgtgttaaggttttttttcttcatttggcaatattggcataaaaagtataaccatatgcctgcaaaagacacaatattgggttttggggcatgatttcattagtctaatgtagtggctttagagtctgtttgtgttcagggttttttttttattatttgtctgggtatatatttcgaaatttgtcatttaggctatattttaatacactcttatatgttgaatctcggtttacactacatacagaattttcaaacaactggtcatgtggccgatttaagaattggagagccagggatactgagataagaaattcactggatcctgaggttaagggagccttttgcaggtgatgtagaagccagcttttgcacctatgagagtgaaatcatcttgattataaggagagcaagaggatggaggctttctctaatttcttttttacattttatgagcattttctctgaaaaagaaggtcctgcgtagtgccatgccataactgaactgcagaaaaacagcacggcctatgtttggtgtcaaaagctggaactttcaatcagccctgtcttgtttttcagccaggcgttgtggggcagatgatcgaggcagctgaagagcgcccgtggctgtgggtagtctatattctaactgtagcccttcctgtgttcctggttatcctcttctgctgttctggaaaggtaggaagtttttttttttagaatcaattttagagacatcactctagtgattattaaaaataactaagatatgttgcctgaggttttctttgtagtggctcagtaatgaccaagccatgtttggtgttgacttcagaaaccttacttactgttcctcagtggccgtttattgtgcccagatgggagcaggatttatagccccttggttgctattattatttatcctaatctgttactctccatagtgttcggcagcaactttctaaaaaaaaacaataaacttagataccaaactagccacttgggcaataatcagctttgcctgctggcatagctatttctattctttgtaattcagtctttgattcctcattatccattctgccttcaccttccccactctcaaaacagtatgttggggtaccacagccttattgttagtttttcttgtttagcctttttttttttgcatgctatcataaaaaaagaaagtcttattttggactctacttctgctaaatgaggattatgcttcatctggcattcatagcactttgtaactggatcccaagttccttttccagcctcagcctctgccactattctgtgtatcggtgcctcagtcaccttgacttttttgacctttattttcctgcctggcccttttgtttttattgttctaccttgaaacacacaagcacatgtgcatacacacacgtacatacacgctcttcagggtaggaattacatcctattcgtttctgtatatctatccctgtatacagcctggaacagaactttgcctgtaggcattcaggaattatataacataatacatgaacatgtaaacaaaattgtactttggggaacatttcagaaacagaccagtggtatggagtataagaaaactgatgcacctcaaccggatgtgaaggaagaggaagaagagaaggaagaggaaaaggacaagggagatgaggaggaggaaggagaagagaaacttggtaagaaacagagtccagaaaatctgctttaagccaagaccctacgatgttgttaaacctttacagtcaagttaaggattgtttttagccaggcgtggtggctcaagcctgtaatcctagcactttgggaggttgaagcaggaaaatcacttgagcccaggagtttaaggctgtagtcagccaggatagtgccactgcactccagctgagcaacagagtgagaccctgtctctctctctctctcttttttattttttaagacaaggtcccactctgtcactcaggttggagtacagtggcacagtcacagttcactgcagccttgaccttataggttcaagtgatcctcctacctcagcacccctccaagtagctgggaccacaggcatgcgctaccatgctcagctgtttgtttgtttgtttgtttattgatttatttatttgatatggtctggccctgttgcccaggctggagtgcagtggtgtgatctcggttcactgcagcctttgcctcccagattcaagcgattctcccacctgggcctcccaaagtgttgggattacaggcgtgagccaccagacccagcgagatcctgtctcttaaaaaaaaattgttggccaggtgcggtggctcacgcctgtaattccagcactttggggggccgaagcaggcagatcacgaggtcaggaggtcgagaccatcctggctaacatggtgaaaccccatctctactaaaaatacaaaaattagccgggcatggtggcaggtgcctgtagtcccagctactcaggaggctgaggcaggagaatggcgtgaacctgggaaggcagagcttacagtgagccgagattgggccactgcactccagcctgggtgacagagcaagactctgtctcaaaaaaaaaaaaaaaaaaaaaattgttggccaggcatggtggctcacgcctgtaatcccagcactttgggaggccgaggtgggtggatcacgaggtcaagagatcaagaccatcctggccaacacagtgaagccccgtctctacttaaaataaaaaagttagccaggcatggtggcgggcgcctgtagtcccacctattcgggaggctgaagcaggagaatcacttgaacccggaaggcagaggttgcagtgagccgagattgcgccactgcactccagcctggcgacagagcgagactgagtctcaaaaaaaaaaaaaaattgttggccgagcaaggtggctcacgcctataatcccagcactttgggaggccaaggtgggtggatcacctgaggtcaggagttcgagatcagcctcgccaacatggtgaaaccccgtttcactaaaaatacaaaaattagccaggcgtggtggtgggcacctgtaatcccggctactccggaggctgaggtaggagatccacttgaacctggaggcagaggttgcagtgagccgagatcatgccattgcactccaacctgggtgacaagcaaagtcgatctcaaaaaaaatagtggccgggcgcgatggctcacgcctgtaatcccagcactttgggaggccaccgaggagatcatgaggtcaggagatcgagaccatcctggctaacacggtgaaaccccgtctctactaaaaataaaaaaagttagccgggcatggtggcaggcgcctgtagtcccagctattcagaacactgaggcaggagaatggcgtgaacccgggaggcggagtttgcagtgagccgagatcgcgccactgcactccagcctgggcgacagagcaagactctgtctccaaaaaaaaaaaaaaaaattgtagatctagagatgtgttctaatgctaatatataatcaccaaaaataataaggttttgctcagttgtttaacttctgtcttagaagagaaacagaaaagtgatgctgaagaagatggtggcactgtcagtcaagaggaggaagacagaaaacctaaagcagaggtaaaggaaaggggtcacacattttgttttaccaagctgaaggtacatttatgtaaagggaatattttaatagggtagtttacagtggcttatggcagtaaaaattctgttaaagccaattttgttgaagtgggattctttgtgatacaggtcagtgttttgtttgataattttaagctacatattaatctcagaagtatctttttagctgaaaatcattttctgaaataagcagaaggttatagggggaaaataaaatgcttgctaagaaggaaacttcgggtcattaacagtctatttgcctctcctcactgtgccctgaaaagtatttcttatacaaatcactgtgttctaaactttttgtccccgttgtccatagatgggttcattcattcatttaactgacatttgttgagtgcccattttgtgccaggcattgtcagtgagtaagacagacaaagatactctgcctttagggagcttaaattctacttgggggaaacaggcaatgagcagtaaacattttaaggaagtaaacaacacagcgtattaggaagtaagaaacgatgaataattaaaacaggaaaagatactaaaagtgctagaggtaggcgggtcaccatgttaaaaccttactcgaaagatgacatcgaaccaaacacttgaaagaggtagagaacttttccatggggatgtaagtgggaagagcattccaggcacagagaacagccagtattgaggcctaaagtggttgtctacaaggccagtatggtgagtggacagagagagtggagaaaagaagggtggagaaggctccaggttagacaggctgttgtgtggacttggctttccctcctagtgaagcgggcagccatcacaggctactggacacaggtgtcacaggatgatgactgtgtctgctgtgttt

SEQ ID NO: 10558 - DNA, 6000 bp, Homo sapiens
atcttcctgcctcagtctcctgagtagctggatccacaggcggatgacgctacactcagctaatttttttttttttcctaatttttcatagatacttcgctttgttgcccaggctggtctcgaactcctgagctcaagcgatcatcctgcttcctccaactcccagagttctgggattacacgcgcgagccacgatgccaaccaggagaccagaaattaagctcagctttctttctctcccttcttccctccctccctccctcctttccttccttccttcttttttaaaactttgtggtatctgtttgtgaattgcttattttacttaccatattgtcttcaaagttcatccatgttatagccggtgatgggatttccttcctttttgagattgaatagtattccattgtatgcctatgccacatatggtttaatcattcatccattgatggacacttgggttgcttctgactgttggctgttgtgagtagtactgctatgaacacgggtctgcaaatatctctgaaactctgccttctttttctgtttgtttgtttgtttgtttaaggcagtcttactctgttgcccaggcttgaatgcagtggtgccattacagctcactttattttttatttttttgagacagtctcactcttgttggccaggctgcagtgcagtggcgtgatttcaactcacactgcaaactccacttcccgggttcaagctattctcctgcctcagcctcctgagtaactgggattacaggcatctgccaccacacccagctaattttgtgtttttagtagagacagggtttctccgtggtggtcaggctggtcttgaactcccgaactcaggtgatccacctgcctcggcctcccaaagtgctgtgattacaggtgtgagccaccacgcccagcctgcccagctaatttttgtatttttagtagagacagggttttgccatgttggccaggctggtctcgaattcctgacctcagatgatctgcctgccttggactcccaatgtgctgggattattggcgtgagccaccgcgcctggtggagtggtggagtcttttttttttttttgaggtggagtctctgtggcccaggctggagtgcagtggcgccatctcgggtcactgcatcctccgcctcccaggttcaagcgattctcctccctcagcctcctgagtagctgcggctacaggtgtgcgccaccacactcggctaattttttgtattttagtagaaacggagtttcatcatgtttccctggctggtctcctgagctcaggcagtctaccagcctcccaacgtgctaggattacaggcgtgagccaccccaccctgcccaacgactcacttagcttcaacctgtcagactcaggcttctcctaccttagccttcttagtatctgggacaacaggtgtgtgctaccatacctggctaaatttttctttttttgattttttgtagagacaggataatttttttttttttttgtatagacagggtcaggctatgtttatgttggccaggctgggaaataaggtcttaatagaggaagttgaagattcctgggggaatagcatgtagagcagctatagagggagagggtgctgattactagctaaaagacttagaaatttttgcaaacatggactcatgatagtttttgggtgatgagtcttcttgtaggatagcttgaaagaggaggaggaaactagaggccctggtaatataaggtaacattaagtatcctgatgtcagtaatggagaagagtgaaagactatgattgattgggtgactgtgtgggcagaggatgtgaggagaaaaggacatcttgtgtgtgtgtgcgcacacatttttagttgtgtatcttctacttgttttctcccccaccttgtacctgtactttctcaagcccaaaaatgaaaatttacctgctaccaaccacatcatcttgtgcatctgtgtagctcagtttttatttctttagatctgtggtcctccgtggaaagagagccactaccccaagacacatctaatataatacacagggcgcttacgtggttagaaaagaagagataagccgggtgcggtggctcactcctgtaatcccagcactttggaaggccgaggcgggcagatcacgacgtcaagagattgagactatcctggccaacacggtgaaaccctgtctctattaaaaataacaaaaattagctggatgtggtggtgcacacctgtcatcccacctacttgggaggctgaggtaggagaatcacttgaacccaggaggcggaggttgcagtgagccaagatagtgccaatgcatcccagcctggcgatagagcaagactcatctcaggaaaaaaaaaaaaaaggagcttgttttggccaggtgcagtggctcacgcctgtaatcccagcactttgggaggctgaggcaggtggatcacctgaggtcaggagttcgagaccagcctggccaacatggcgaaaccctgtctatactaaaagtacaaaaattagccgggcatggtggtgggtgcctgtaatcacagctactcaagaggctgaggtgggagaattacttgaacctgggaggcggcggttgcagtgagctgagatggtgccactgcactccagcctgggcgacagagggagaatccatcacaaaataaataaataaaatatataaattttaaaaagtagcttgttcttagtttaatattctttttgagttctaaaacgctaatttgaaaacatgtctattgatgatatttgagcaaccgtatccatattaagccttaatatgagaggaattatcttctgtgttaatttttttttttgagacgaactcttgctctgtcacgcaggctagagtgtagtggcgtgctcactgcaacctccacctcctgggttcaagcagttctcctgactcagcctcccaagtagctgagactacaggcgcccgctatcgctcccagctaatttttgtatttttagtagagaagagtttcgccatgttggccaggctggttgtgaactcctgacctagtgagccacctgcctcggcctcccaaagtgctgggattacaggcgtgagccacggcgcccggccatctctgttatttcattgtaatgttttaacgggtaccccctgtaaattagtgtatgaaagggcttttgtctgttgtaaagcactttacaaatgcaaaagtttgttggaaattgtatttgaatgccccacatctgtgtaaccaatcctctctatatgaggatgttgtgtatgtttcagttttattttgaaattttccagaaatggaatcttttaactgattttagggaaaccctttaatctctctaggctgcctttctttatctatgaaatgaaatagtaagttctttttagctctgcgatttaaaagctttaattttaaatgagagagtggttagtgatcttcatgaagtttgataggtggcaatacatttaactgattttgctctttatgtgtagatcatggaagggaagtggttgctgtgtatgttactggtgcttggaactgctattgttgaggctcatgatggacatgatgatgatgtgattgatattgaggatgaccttgacgatgtcattgaagaggtagaagactcaaaaccagataccactgctcctccttcatctcccaaggtttgaaatggtctttgaatctattccttttacgtcttgagatgataaaattatgaagatacccgggtgcagggaaatgtagtctcaactactcaggaggcctaggacaggagtgtgagtccagccttggcaacacagggagatatcatctctaataaaatataaaagaaaaacatggtgaagataaatttggaacgttttcaaagggaaagcaaaattcgtgaaaatacttattgatctctctggcagcctttgtcttgctagaggccaattatatgggttgaatttgaaggccagctatgaaatttttgtgacagttgaaagcaaaccaggagaatagattctagataaaaaggcatgttgctgaaaatttaaatttttaattcatttatgtatttaacacaggttacttacaaagctccagttccaacaggggaagtatattttgctgattcttttgacagaggaactctgtcagggtaagtgttttccagagaaatatatgttagaggcagacatgtaaataagatgggatagtagattcctttttggatagcatcttttatagtgaaatgtctaactttattttattttatttatttattttttgagacagaatttcgctcttttgcctgggctggagtgcaatggcgtgataccggctcattgccacctccgtctcctgggttcaagtgattctcctgcctcagcttcccaagtagctgggattataggcatgcgccaccatgctggctaatttgtgtgtgtgtgttgttatttttttagtagagatggggttttgacatgttggccaggctggtcttgaactcctgacctcaggtggtccacttgccttagcctcccaaattgttggcattacaggcatgagccaccgcacctggcctgaaatttctagctttaatatcttcagtgttaacatccatgcaggaaaatagtcttttggaatttgtggtttttacttccacttctttccctcccccactctaccctatattttgttctttgattgaggaaaaaaattttctcttgatgttaaaacatcagtggaattatctcataggtttggtactttttcatataggtttgtgagttgaagataatgtattatcattagttgtgtgacagatttaaaggttggaagtagagtggttaaataggctaagagcagaataggtcctactttaatgagtatttacataattttccctcacaagtcaactgtcattttaagactgattttgggatttgttatttacaggtggattttatccaaagccaagaaagacgataccgatgatgaaattgccaaatatgatggtgagaatcccatttggtttagatataatagcagatagaggtttgacatgttgtctccatggcatttcctaagactagtttaaaaggacatagtaggctttaagatttttccagccaggtgcggtggctcacgcctgtaatcccagcactttcggaagccaaggcgggcagatcacgaggtcaggagatcgagaccatcctggctaacacagtgaaaccccgtctctactgaaaatacaaaaaattagctgggcgtggcagcgtgcatctgtagtcccagctgctggggaggctgaggcaggagaatggtgtgaacccgggaggccaagcttgcagtgagccgagaacgcgccactgcactccagcctgggtgacagagcgagactccgtctcaaaaaaaaaaaaaaaaaaaagatttttccatggaagttttgccacctttgtgtgttgcctaattttttttttttttttttttttatttaaggttcaggggtgcatgtgtagccttatatttaataggattagatctgtttaatcacctgtgctactgaatgttggaaatttctagacagtagtataatacactacagttttaaaaagccatatctgaataatatttgccaaataaagtgtgtttatttattatttatttacttttttgagacggagtctcattcttgccacccaggcttctggaatagagtggcgtgatcttggctcaccgcaacctctgtttcttgggttcaagcgattctcctgcctcagcctaccgagtagttgggattacaggtgcccatcaccacgcccggctaatttttgtgtttttattagagatggggtttcaccatgttggccaggctggtctcgaactcctgaccttgagtgatccgcctgccctcagcctccctaagtgctgggattataggtgtgagcgaccacggctgccccagtataata

SEQ ID NO: 10559 - DNA, 6000 bp, Homo sapiens
aaaaataaaataaaattttaaaaaatgcttttatggatttaaaattgttttttcattctccatgggagttaaaaagtagaaagtagaatcatgagtggacatgcgttttaataaattggaggtttgtgtaatttcagtaacgtaataataccagctctattaaaaatgaagaaatggaccttttgtactgggaagtagttgtaagtccacgtatttgtcttctcactggtgtatatgtgtaagcccaataattgtgttagtttatgtagtttcttgttttttttgttttttttttttagtgtctataagtcaagtctttggtgttaaagattttaactatcatttgctgtaattcttagaaagccgagggactaatcatttatgtttcgtgcataaggaaatgggcgttagcttccccaagaccccaggagccaggcattgttcttaccccaaagcctcaggtcagacttctgctgcttcacgttagaagtcatgatcttttgtattatggtaaagggagcttggaaaattaagtacttttaattccatttaatgtttctttcagtcttgaatccagataatagttttgaaatactggttgaccaatctgtggtgaatagtggaaatctgctcaatgacatgactcctcctgtaaatccttcacgtgaaattgaggacccagaagaccggaagcccgaggattgggatgaaagaccaaaaatcccagatccagaagctgtcaagccagatgactggtgagtcttggggaactgtcttcaagtgtaagggagcatttcatatattccatgtggcttgaacaacgaaatgttggttgagtaagctctgataatttcagtaatccatgatgcagtctaatctgtagggaaaatatagagtactatagctggaaaggggccatagtgtaatcatctggattgactcaccattttacaagccacagaatgccacacttgataagagtttgtctgtggtgacactgttggtttgtggcagaatctcaggtcctttaacctggctactccagggcttctgtgaactcacatttaaagccaaagttctgaaatgctaaattttaatttgaaaaataacctttttcctatttaaacaacagtcaattctctgctgtgggttgggtggtagaatacaaagccacaaggacaccaccatctgcctacacagagcttgaagtccagttgtgaggcatgatgttggcatgtggtatcgtaagggttcatgagaaggtgccacaggagaccagagcaccaggtgtacctaaactaggcatggtttcttggagcaaggcaaatcagattgagacttggcagtgaggtgagaattaaggagttggtgaatatgggaaggggtgtttctgattgaagaatgtcgtatgcagaagtagaggagcagcaatgagcttgacatgcgagggagaaattacatggccttttatgtagggtgcacattgaagagtgaggagaaatgaagatagctggggctgtattcttgtatatggctgtctttgaacttgcaacttcacacagtgactccagaaatgtcagaaagtgaacaaagaaattcttaccctttgtaaaatatcctcctatgcttagcaattacattctagattatctttttcctccttgaaaggtaagatacatataactgaacttttgtactgcactagtataaatgccaagtttacttgtatatttggtgtatattagatttggacttagccttgttcagtattatattccttaactagctttatcacctaagaaggcccctgtacccattaagcggccactccctgtttcctcccccaactcccagcaaccactaacctgctttctgcctctctacatttgtccactttgtatatttcatataaaatggaatcatacagtatgtggctttctctgtccagtttctttcatttagcacagtgttttccaggtttatctgtgttgaagcatgtatcagtactgcattcctttttatgattgaataaattctactgttttgataatgccacattttatttatccatcctttggtggacatttaggttgtttgctcctttttgtctgtgattatgaataatgctgctatgaatgttcatgtactggtttttacataaatatgttttttcttttcttgcttttttttttttgagatggagtgtagctctgtcgcccaggctggagtgcagtggcgccatcacggctcactgcaacctctgtctcccgagttcaagtgattctcccgccctagcctcccaagtagctgggatcacaagcgcatgccaccacacccagctaatttttgtatttttagtagacacggggttttaccatgttggtcaggctgatctcgatctcctgacctcaggtgatctacccgcctcagcctcccaaagtgctgggattgcaggcgtgagccaccacacctggcctcttttctttagacatgatctctgtgttgcccaggtgggagtacagtggtacggtcacggctcactgcagcttccactttctggggtcaagcgatcctctcccgccttagcttctcaagtagctgggactgcaggtatgcacgcctggctaatttttatgggttttttgtttgtttgttgagacagagtctcgttttgtcacccaggctggagtgcagtggcacgatctcgtctcattgcaacctctgcctcccgggttcaaacgattctcgtgcctcagcatcccaagtagctgggactacaagcgtgcaccactgcactcgtgcctcaccctccaagtagctgggactacaagcgcgcactactacaaaaaattcttgtatttttagtagagatgggatttcaccatgttggccaggatggtctcaaaattctgatgtcaagtgatctaccagcctcagcctcccaaagtgctgggattacaggcgtgtgccaccgtgcctggctgtgcatgttttttctttttttttgagacggagcttcgctcttgtcgcccaggctggagtgtagtggcgtgatcttggctcaccacaacctctgcctcccggtttcaagtgattctcctgcctcagcctcctgagtagctgggattacaggcatgtgccaccacgcccagctaattttgtatttttagtagagatggggtttctccatgttggtcaggctggtctcaaactcccgacctcaggtgatctgcccaccttggcctcccaaagtgctaggattacaggcatgagccactacacctggcttaatttttgtattttttggtagagacagggtgtcgtcatattggtcaggccggtcttgaactcctgtcctcaggtgatccacccgccttggcctcccaaagtgctgggattacaggtgtgagccaccgcacctggccttgtgtatttttttttttttactagagactgggtttcaccttgttgcccaggctggtgtggcctcaagtgatcctcctgccttggcctcccaaagtgctgagattacaggcatgagccactctgtctagctatagatatatattttcatttctcttgggtatatatacctaaaagtggaattgctgggtcatgtggtaactaactttttgagaaactgccaaactgttttccaaatgagcagtaccattttactttcccaccagcagtgtatgagggtttcagtttctctgcgttctttccagcatttgtttttatgagtcttttttattagagccaacttggtactaagtggtatcgttttgatttgccatttccctgatggctaatgatgttaagcatcttttcgtgtgcttattgtatgttcatattgtatatttttacattcgtatgtcttctttggagaaatgtctattaaaatcatttgcccatttttaaattgggttgtctttatattattgagttgtaaagagttattttactaggcccttagcagatatatgatttacaagtattttctaagaggaattattttaaattttgagattaaaaacaaatttttttagaatactctgttctgatccacaaagtggtactatactgtgaccagtgttgtcataactggctttttcttttgtatttaagggatgaagatgcccctgctaagattccagatgaagaggccacaaaacccgaaggctggttagatgatgagcctgagtacgtacctgatccagacgcagagaaacctgaggattggtaagaacttcagttaactttttttaattacctggtttttttgtttgtttttttttttgagatggagtctcactctgtctcccaggctggagttcagtggcgcagtttcggctcactgcaactttcacctcctgggttcaagtgattctcctccatcagccttgcgagtagctgggattacaggtgtgtgccaccacacccggcaaatttttgtattttttgtatttttagtagagacggactttcaccgtgttggccaggctggtctcaaagtcctgacctcaagtgatctgtctgccttggcctcccaaagtgctgggattacaggcgtgagccaccacacccagcataagttacctgtttttattgaagtcaatcttaatacttaaatatagccaagttccctaatttcagggtagaatttgacaattttaattatattttcttcttttttaaaaaataaatttttcctgaaaaactgttattactggaaatacaggagaagctggtctgggatactgtgaaaacatttcagcaggatcttggcagccctgggccagccagctgttcatagtcctgcatcacagaacctgtttataatttgttgtttgtacctccgtagggatgaagacatggatggagaatgggaggctcctcagattgccaaccctagatgtgagtcagctcctggatgtggtgtctggcagcgacctgtgattgacaaccccaattataaaggcaaatggaagcctcctatgattgacaatcccagttaccaggtttgtgcctcttgatggttgagttgctttcattaatctgtttgtattcagatagaagttttatctagagtaaggctgccaggttggtcattatattcaagctgttgaattaaaagcagaaagtagacttcctaagttgaaagagagcttaatgggttaggtattgcaaagataaacctagaaactggagtgaataactttctttaactttatttatttatttatttatttatttatttttgagatggagtttcgctcttctacccaggctggagggcagtggtgtgatgtcgcctcactgcaacctctgccttccggtttcaagcgattctcttgcctcagactcccgagtagctgggattacaggtgcctgccaccacgcctggctaatttttatatttttagcagagatggtgtttcaccatgttggccaggctggtctcgaactcctgacctcgcgatccgcccacctcaacctcctaaagtgctgggattacaggcgtgagccactgcatctggtcaactttctttttttgagactgagtctcactctagtggccaggctggagtgcaatggctcagtctcggcacactgccacctccacctcctgggttcaagcaattctcctgactcagcctcccgagtagctgggagcacaggtgtgctcacaggtgtgctcacctcacctggctgattttttgtatttttagtagagacggggcttcgccatgttggccaggctggtctcgaactcctgacctcaggtgatccacctgccttcgcctttcgaagtcctggggtttcaggcgggagccactgtgcccagccaagaataactttcatagttgctttgtaactatatttaaaaacaaaagagaaatggaaaactgttgatttgggtaccctgctcttgggtgctagggttgcttcagccataggatccacagctgagtctggacaatctgtgatgtggtgggt

SEQ ID NO: 10560 - DNA, 6000 bp, Homo sapiens
gtcaggaggtcgagaccatcctggctaacatggtgaaaccccatctctactaaaaatacaaaaattagccgggcatggtggcaggtgcctgtagtcccagctactcaggaggctgaggcaggagaatggcgtgaacctgggaaggcagagcttacagtgagccgagattgggccactgcactccagcctgggtgacagagcaagactctgtctcaaaaaaaaaaaaaaaaaaaaaattgttggccaggcatggtggctcacgcctgtaatcccagcactttgggaggccgaggtgggtggatcacgaggtcaagagatcaagaccatcctggccaacacagtgaagccccgtctctacttaaaataaaaaagttagccaggcatggtggcgggcgcctgtagtcccacctattcgggaggctgaagcaggagaatcacttgaacccggaaggcagaggttgcagtgagccgagattgcgccactgcactccagcctggcgacagagcgagactgagtctcaaaaaaaaaaaaaaattgttggccgagcaaggtggctcacgcctataatcccagcactttgggaggccaaggtgggtggatcacctgaggtcaggagttcgagatcagcctcgccaacatggtgaaaccccgtttcactaaaaatacaaaaattagccaggcgtggtggtgggcacctgtaatcccggctactccggaggctgaggtaggagatccacttgaacctggaggcagaggttgcagtgagccgagatcatgccattgcactccaacctgggtgacaagcaaagtcgatctcaaaaaaaatagtggccgggcgcgatggctcacgcctgtaatcccagcactttgggaggccaccgaggagatcatgaggtcaggagatcgagaccatcctggctaacacggtgaaaccccgtctctactaaaaataaaaaaagttagccgggcatggtggcaggcgcctgtagtcccagctattcagaacactgaggcaggagaatggcgtgaacccgggaggcggagtttgcagtgagccgagatcgcgccactgcactccagcctgggcgacagagcaagactctgtctccaaaaaaaaaaaaaaaaattgtagatctagagatgtgttctaatgctaatatataatcaccaaaaataataaggttttgctcagttgtttaacttctgtcttagaagagaaacagaaaagtgatgctgaagaagatggtggcactgtcagtcaagaggaggaagacagaaaacctaaagcagaggtaaaggaaaggggtcacacattttgttttaccaagctgaaggtacatttatgtaaagggaatattttaatagggtagtttacagtggcttatggcagtaaaaattctgttaaagccaattttgttgaagtgggattctttgtgatacaggtcagtgttttgtttgataattttaagctacatattaatctcagaagtatctttttagctgaaaatcattttctgaaataagcagaaggttatagggggaaaataaaatgcttgctaagaaggaaacttcgggtcattaacagtctatttgcctctcctcactgtgccctgaaaagtatttcttatacaaatcactgtgttctaaactttttgtccccgttgtccatagatgggttcattcattcatttaactgacatttgttgagtgcccattttgtgccaggcattgtcagtgagtaagacagacaaagatactctgcctttagggagcttaaattctacttgggggaaacaggcaatgagcagtaaacattttaaggaagtaaacaacacagcgtattaggaagtaagaaacgatgaataattaaaacaggaaaagatactaaaagtgctagaggtaggcgggtcaccatgttaaaaccttactcgaaagatgacatcgaaccaaacacttgaaagaggtagagaacttttccatggggatgtaagtgggaagagcattccaggcacagagaacagccagtattgaggcctaaagtggttgtctacaaggccagtatggtgagtggacagagagagtggagaaaagaagggtggagaaggctccaggttagacaggctgttgtgtggacttggctttccctcctagtgaagcgggcagccatcacaggctactggacacaggtgtcacaggatgatgactgtgtctgctgtgtttcctatataccagggagaatcagggcgaccagttaggaggtccctgtaatcatctaggaaagatacggtggccccacaaagggtgacaggagaggaacagagggtatgagaactagttggagatctggatcttggttttgtggtagattggatatatagagtatgagagaaagggaacagtcactgtctgtatgtaccattgcttactaaagtcctttacccagcacctctgtgtctaaatctggtctctcccggaaagctctcctcaggttttactttcagctacaactctgccttcctattaataaagatcattgctatctgtatcttttgtatattttccatggatatgttctgtcttaactagaatgcaattcttaaaagtagagaccatgtttcccccaaactccctcacacgttaaaaagttgctggtgcatttaaaaaaagggaatattttcatagggtaatttacaatcttagcaacttgtgatagagtacagagcagcagccttggagtcagtctacttggatagccttccatcttcatgaatccttggtttcttatcctcagaatggggctagtgtgccataggccagtagattgtttgggattaagcaagattaagaaatcacagtgtctgatccttttttaagaaaatgtttatgggttagattgagaaaagtgtatgtttatagaaaacaataaagactaaactgaattagagtaggcataattccaccacctctgagacaaccattcttcttggtgcattttcttctcatcattttcctcatttttttcctcaaataagttaccctcagtctggctgatcttgaaaatatggtgaacttttattattttttaaatgtgctaattataatgaatttcttttcaatcaataggaggatgaaattttgaacagatcaccaagaaacagaaagccacgaagagagtgaaacaatcttaagagcttgatctgtgatttcttctccctcctcccctgcaagagtggtcctaggagaggacctggcacaccttaggttgacattcagaaaacttcaagacatcaccatcagcaggctccagttgaacactagtctgtgtaactttaaacatctagcagtaaatacttgcagttgtgatataaaggaccctgtttctgtagaaaagaaaacatttaacataatggttgtgaaatgtaacatgaagcaaactaacttttttttttttaacatctttgtttttaaaatagaatgatagaactttgccagtctttaagatcttggcttaatttaatgtattaatctgtttgtgcaaacataataccaccatttaaaaatgttagggagatgagttgcagtttttataatagattttttttaaagtttggtattgtaaaacattcacacctctgtccctcaaaattgataattacgtttaaagtgcagtcatttgtggttagaatcttgttttgtttgcttccattattgagttcctcctaaggaaattgaggagagggactgaatagaagcccaaattcatataaaagttgcgtttaagttgtattaaaaatagatatataagaaaaaattctttcacttgatgtttgttagaccagaaagtgtgtgtgttctgtagctcagttcccagacagctttttaggtagtggaggaggtggcttcatgtggcacttgggcatttatattccacttgggagggtcaggctgtggccttctggagcaggtggcttgttaaggaatgctagcagggcatggcacgtgagctccggaatagatgtcttcatcacttcttccactgtgtgttgacactgttttccttacctatttcctcagatccccagctttctcctctgctatgcattttcttcacagtgcagcttgcagtccgttgctgaaaatgattataagccctgcataatgttaagctttattgtgattacgtgtatgtttcttctttcttttaagcagacccatacctttccagggtcaaagtacagaatagaatacattgatacaaagtacagaaaaatactttgatttttatccatttcttttactctgtgtaaagacttgagaagtctaattcacaggcaaaccaatacagaattgactgcagttgaacagactagaagtatttgtgggaggagtgacatgaagcatgagttatctgattttttttgtagctgctatatattttaagccttcatttgcaattcatgtaacagttgtgtcataaattacacaataaagcagtcctgttcaaatttttttttaacgtggcttgtagaatttttaaaaaagtgatcttaggtttgttttttcatgcgggatgcagatgggtgctatcagagcctctcccacaccactatagtgtaataatgttattattactctacactgaaacgtattcagagttagatattattttagcttcagttgttctttagaggctttcaaatgtaccgatgatactgtttcttgcactgaatatataaacactccacagtgtttatattgggaagatattgggaaggaaatatatttgtaaaagatgaaggctgtatctatttttttttctttttaaagtttgttcacttaaattcttttgaggatgggatgtatttttcttgctgttcagtgctttttccttttcatctgttgttctgtggtcacagtgaccttagctacatagcagactttcccaaatgtattgattacaaataaacagttgttacttagcaagacctgaaaatatgtctgcaggtttctccttgaagcaaatgtgtgggatcattgcatttccagaaatctgcctccttcaccctccgttgacagtatatgtcatgcctcactttcttctagctgagctttaaatcattagagcttaaattgtcagatcgttcattgcctttccagggttatttagtaaagtttgttgaaaacaaaaacgccttttcttggttcttttttcagttattttgaaggtccagcatcctgattaaatgtctgacacattaatgaatgaccagcagcagctttcagctcttaaaaagacacttatattttgattttacatgctggttacctgttccattgttgtcaaatgcccactctccatcagatgtgttcctccattttcttatccacaaagtactcctcacttttcaatttgtcatgttactaaatggtgttacattaaagccctgtgttaagtgtctgcttttgactgaatttcttcatagtaaccttcagtgtgtgtgtgtgactatgttcaattagtgggttgatcttcgtataattggccactatgtgagagttcactactaggcagaaactattatggacagtgaaataatgacttttatctcaccacgtgagtttgatgcagtcttttctgtctagcccttgcctcttcctgcccatgtgattgcggtgcagtagtttctgttgtataatagtgtggacagcagctcagaaaaggagggaatgctactgataatttgtagataatattctttaagacttaggggaaccattgaactttgaaatttttattagaaaattatttgttcagaatcagactccattattttacatatacttaaatactttaggggtatttttgaaagttagcccagttttttatgtgctattaaatttttagattacatactaaagaaaagtatgtacacagaatgtagtgctcctagttactattttttctattaagaaatagtttagttctggtgtaaaatttg

SEQ ID NO: 10561 - DNA, 6000 bp, Homo sapiens
cgcaggagaacgcgctggtgtcctactcgcttgtggagcggcgggtgggcgagcgctcgctgtcgagctacatttcggtgcacacggagagcggcaaggtgtacgcgctgcagccgctggaccacgaggagctagagctgctgcagttccaggtgagcgcgcgcgacgcgggcgtgccgcctctgggcagcaacgtgacgctgcaggtgttcgtgctggacgagaatgacaacgcgccggcactgctggagcctcgggtgggtggcactggtggcgcagcgagcaagctggtgccgcggtctgtgggcgcgggccacgtggtagcgaaggtgcgcgcagtggacgccgactcgggctacaacgcgtggctttcgtatgagctgcagccagctgcaagcagccctcgcatcccgttccgcgtggggctgtacacgggcgagatcagcaccactcgtgtcctggacgaagcggactctccgcgccaccgtctgctggtcctggtgaaggatcatggtgaacctgcgctgaccgccacggccacggttctggtgtcgctggtggagagcggccaggctccaaaagcgtcatcgaggcagtcggctggcgttttgggtccggaagcggcgctggtggatgtcaacgtgtacctgatcatcgccatctgcgcggtatccagcctgctggtgctcacgctgctgctgtacactgcgctgcggtgctcagcactgcccactgagggcgggtgccgggcgggcaagcccactctggtgtgctccagtgcggtggggagctggtcatactcgcaacaacagccgcagagggtgtgctctggtgaggggccaccgaagacggacctcatggccttcagcccctgccttcctcctgatctgggatcagttgatgtaggcgaagagcaagatttaaatgttgatcatggcctcaaagtaagtccatttaaatttagaactcataaattctatttgtggaaattgtagttactttaaaagtgtttcagatttagtttttcaccgtattttatagtgaaaatttaaacattgtttagtttttagaaaccttttataattaattgaattttctcagtggcataatacagtattaatcattctccacaagttgggtctatcttgaaactcaagttatggttggatgatatccattttttactgaatatttattttggcctgccttacagccgtcttctctgaacaatactctaaggacgttcagggcattttgatctttggtgaaagtattcccccaaagcgtttattcttttgtccttaggcactgaactcttaatcttactccatatgctgtactttgaaatgcatgttttaaatatgttgtctttatatttacttttattcactttaagatctcggtttattcatcttatctgactttttagtgtctggtagtcacaaatatctttggtgtttcactattgccgttttaagcagtgtagtgataaaatacagaatgatagtgtttttcaaaatttgatagttttcatattcttcctaattttattataaactagttaaaaagtaaaatcaagagggaagagatttgtaatccttcttttaattcattatttagaccattttaccatttggagacatgttttttattctacatgatttttacagttgtattgtcgccaacttaacattttttgagcctctatgtttaggaaatgattactttattcttgcaagtatcttctaaactctaatcattcaaccctttgttcatgagttggaatattttcaataatattccacattaaagtgatatttaatatatgacttagaaaaatgttttcatcagaaaaactatacatgataatttcattcttgcaaaccaaacatataatttataaatccttattatacagaatatttgggattatcatggcccattagttcgtgtaaaaatatttagtattatgggataaatctttgaaaaatccaagatactttattttggtatctttcaacattttctttcttttatttcttcttgtctttttacacgtttgcttcttgtgactgttggacctgcctggatattaaatacccattagacttcgtgcatattgctttggagagaatggtagaaattgatggaagggaatgaacgatttctgggactctgaattcttacagtttgttattagtattgttttaaatcttttaatcacttatgaacaaataatgtaatcatttatgggcatattttagcccccttgtccaactgaaggtaacctcaaagcagcattgttttgtagtttattttacagttctcttaatgcctgtccatgtttagcattttatttgactatttgaacacattgtgtaaaagcgaattgttttcattttagtcctttaaaaaatatgattgttttcatttaagtccttttaaaaaatatgattatctttattatcctgtttgaataatatgtgttttcctttgtgaaagtaatatttcctatcctgtctatgtctacctggttctcaggtattactttaattactgaattctcctaaacatttaattgacttttacaaaatatcataaataggaggattctttccaccacctagcattgtatttggcaatttatcatttaagtcattttagttctgtttttcttcaactctctgatatttgaatttggggttgtgctttcacagtgagaaagtctaaacctatttcttgtacattaatacttttcactattctaattatggtgatgcttttagctattaagaatttctgggattgaaatgtgtcagaagttagttattaagtattgtggattctgaagctctctaaatcaagtcctccctttaccaatttttgtatgtgtagccattggtaaaggatttgttattcagttccttggcattatatgtatgcatgataaatgtgaattctactttatagatttatttgtatcaagtaagttaatagttataaattattaataataaactctggcaagtgataggtacataataaaatttagttattaccattcttaagagaaaagaagttagtgattgcagaaaggcaacctaaaatgtcagaaagtcgttatggccttccatattaatcttatttttgtgtaaaactatcttctgtaaagtcattttttagattaacctaggatgtttcaatattttgaatgttgtgtggtggaatgaaaaaaatctaaaagttattacgagtttaggaaagtcaagttaacaccacctatgtgggaaaacagttttttggaaaggttaaagtccttccaaggaatgtgtagactatcttactttgatagttgtatgtttcccatatttaaaagttgcctgagatcctgcagaggcctgagtaggcgtttgagttctttgtatgtatgagatctttccattaatagtatttttcttaaaaagaagtatacaataatgttttgatgatgatttaaagtcaatttatgttgtagttctatgaattaagtaaaccatttatgtagagtgttgtaaatagccttttaaagtgctttctcttttttcttttcttttctttctttctttttttttttttttttttgagacggagtctcgctctatctcccaggctggaatgcagtggcgcaatctcggctcactgcaacctctgcctcccgggttcaaatgattctccttcctcagcctcccaagtagctgggattacaggtgcatgccaccatgccctgctaattttttgtatttttagtagagtcggggtttcaccatgttagccaggatggtctcgatctcctgacctcctgatccgcccacttcggcctcctaaagtgctgggattacaggcatgagccaccgcgcccagcctaaaatgctttcttagcaagtagagaagattgtaataaccagtcttcattaaacattaaataggacccttacagatctctaacagcatatcatcatgtcaggaattattactgagccccagcccctggctttaaaatttgaggtcaaataaagaatatgagtcacacaatgcaaggcaagataatgtaacaggtacaagaggtaaatcagaatgacgttgaagttgaaagacaatcatttcctatttgaatttttgaagaaatacttgaaggggcatggtgtgtttcagtggttttaaaataagtaagttccccccgggagaatattgagaatgatagacatttcttggaaagagaaaacataaggaaagttgaagacacagaaagcatcaatatgacaagtagaaaagtccactttggttaaaacacacagtctgcagagaatgaaagcaggaaaaccaatgtaagaagatctcttgatttctgagtaataaactaaagggccatgagtgattaaggaatttggccactctttagaattaattgggagctatttaactaccttgagcaaaataaatcacgacttttgaaagaaggttgaacgggaagacaaactcagaagctcctgcagtaatcaaggacagaagcaattgttaaatgcacctcttaggctgttatcagtagaaatacgaaataaaagataaatatgcaaaaacattaatggcacaataaacactcacggttttgcctttagacttgagatacactaaaatctagatttaattaatcgacttggacgttggaataagatagtaaaactcacaacaaaactttgtagaacttagtcaggaaaagaatctcaagcatagctttaaaaacagaaattgccccgagtactaaggatgagcaataatgaaattaaaacatattgtaataacattacacaaactatattggagactacaaagaagagattattcatagattataaagcttggaaagaatcaaaacaacacatttctggaaacagattgtataaatgctacaaaagagaaaaatatattttctccccacgcaacacaagaccttaaagtcaattctcgcttttcttgcaatattttataccttttcaattcatagaattactcaagaaaactacctcagttggttgctactttttgttgattccttttaccagacatgactaagtttctttttcatcagtagatttctgggctcctatattcactagagattgcaactcctggatttctcttacactagaatcctatttcgagccatatgggagattctgaattccagaacaaaagaattttgtaatttaaaattcgtgattgctcaatggaatcattttaattgttacttcatttctgtcgttatttaaaacttaagtggagagttttctcagggataagaaaaccacaatcaaggtcatacaaaacttttagaggcagtcagtctgctaagaaggctccagcaagagaaacgggatcttctgtttcaacaatcattacttaagaaaaaattaagaaaatgaaataagttttgcagaataactgtgaaatttttattcatgaaatatgtacttacactttgggccacgtgatgtcactctttgccgcgatgttctctctgaatccagacaaatacagcccttttcccatgggaaagaggctcaattctttttcactctctctgtgctgaacgatggcgaacacagcagaatgggactgacgaaatcagatgatttcttctaatttggaggcaattttcactaattagaagaagactgagtatttgaaatgttatactcaagtcgaggagatccagagggtcagcctctactgctctcgcttctgatcctcgcaatgtgggtggtggggagcggccagctccactactccgtcccggaggaagccgaacacggcaccttcgtgggccgcatcgcgcaggacctggggctggagctggcggagctggtgccgcgcctgttccagttggattccaaaggccgcggggaccttctggaggtaaatctgcagaatggcattttgtttgtgaattctcggatcgaccgc

SEQ ID NO: 10562 - DNA, 6000 bp, Homo sapiens
ttaggaatattcttcagttgataagtataatgataatagtaataatgaattagactgagtggctgtttcctgtaaatgagaaagttaaatcttaccggaaggatcatgatgaataatgatccttatgagaaggtcaaatcttctcaattttgaagcaagttctttattcctattcattttcttattctgatttgtgtcctccattccttattgtttttatgtattcaaaaataccatgacaatatttaatatcataattatttgagtttaaaacatgtttaaatgtttatctttctataatcgataagtttatctctcacaaatggtgatgagcagggttgaggcagcttcgtccacaaacaattttgtttcttcatgatcaatatccatcttttttgagatgttgattgcagtgggtggaattttagccttgcctttaaaggtgattttacttcttaatttttgtcttcaatcttcttataatttcattttaggtcattgtcttcacaatcttcaactacttcagatagccaacaactttgttcttttttaaaaagaaaacaaaacaaaacaatgtcagctctacttaattacctgttgacttaattgctgctgtcctccagtttaagttgttgagctcttctactattttgggaagatttctttgagcaccgattatactcatttttctttcatttttggtacctggctgtatgaaaatattttagggtaggaaaattcacacttatttgggctttaagtataagagagtcttcccatacatgatgaagggtgataccattgtctgtgttcattaagctgcatggtcttcagaatggcattgctgagcttggcagggtgtctcaggcctgtaatcccagcattttgggaagccgagggaggaggatcgcttgagaccaggagtttgagaccagcctcggcaacatagtgagacccccatctctaccaaaaaatgtcattgtttttaataacttaagtataagaaccatgggatattaataaaggcacttccacttgacaattgtggtgttaattataccttagaatttaacattgtatacttttgatatatttgatgcaaaatattttttgccttcacaccatattaatgtgaattgctttctttaaagggatcccagagaacacgtatttatagctgtaaggatgtgtatcaaattatatgtaaaattactttgctctttttggctctaattacaaatgagatggcctttaattctgtgtaaagaaatagtatatttacatattgcaggataaccatgttataggtagggtaaagttaatataaatgctgaaaaggaattagtagtgtctacctagaaaaataacttctgagaagatgatttctatgaagataaacattaaggaaatcttcagaaaagggaaaaccctgtcctactttatggtgctggaattctcttcatccatagctataggacaagagccaatattgatcagtaactcatgataataaatcaccattgtttgagcagtttattaatatatttgttagacatcatgaagggacttaaatacattatttcatttaatacttataacaatttctaaagtacatatgactgttccaatttgaaagataaaataagagaagctgagatgtgtatctattttatccagtgccagtacatggtggagatattattcaaatgtgtatctttcaggcttcagactcattcttttatccactataatgtagagctttctttagtaagtcatttctctgctcaaacatggtctcggctaggaaaatcaagcacaaattgtgtacaggcaaatctttctttctgttgtgcttagaagaaacttcatgattgtcttcatcattaattttgtacaatgtgtgattgagatggcactaagtttttttatgttaagtgatttttttcttgtaagagttcgtgatcatcattatcatttgttttaatcaatgccacactgagataggtattttggttatgtaattgttaagtaattaagagttgccttataagaactacgtatctgttgtttggaagtgatataagtaagaatcgtttaacatgtaagaaaagtcagaaaactgtggtttccaatatccttgtggaacacctaaactaaatactatataccaaaaatgacacccttctttctttactgtgaataaagacagtgtttgggacaagtatagatgttgatattattatttcagggaccctgaacttggccaaaggattcaagaaatgtttacaatattgcatacttcaataacaattttaaagacatagattcccatgaaaatcttcaaatgtgtgtaggtctttcagtcttcttcagtcttattgttggctgggaagctcataacaactgacaaatgatttgtgaccaaataactgtttttacttgactaagccatgatagagcagaattagcatcacggaataaatcctataattttgttaatacagtggttggataatgtaattctaatctgttggttttggagaacctcctggggttctgacaacggtgtcaaaatttatttatgtgttttcaagaaataatagcactaggtctgttagaatatcagtggatgacgtgcactagtaagacattaaactatgcactctaatacttatatgactaacaggacatacaggcagattgtatgtcctgactgatatagtaaaagtcaggcacaaagttccttaatcttcaattgattttacaaaatcagttaacaataactgtattgaaatgacttcttggtattagcctatacccagatattaggctgatcctcaaagatgagttcaaagggcgcataatctcttcactaggggctggttgagatggtgacatctgaaatatcacagccaaaatgcaaaagatgggtcattgattcatacactatatcaaactcttttatgacttggcgtttgttcagtactactttatatattcacaaaatactgtattgttggaaattaacacctaaattaacatattgttttaattcaaatatgtgatattatcatttttccagagtaaaccttctaaggttcatttccctacctcgcaagactccacattccatgtaacatcttcatccccaattcccataataaggtgattgaggatctgttgtttccttttgttcaaaataaacctgatgtgcttcaaatatcatgttgaatatactgtcatctggtctaatgttatgttttgattagaggctactatgattgattattttacagatgcgtaatggaattaacggttataaaagttgatatgtctcctttaattttttaatacagaattttgcatttacctgaattagagttctagtgttatgacaacattgggaaaagagtaaatatgaaaaaagtagaacaaaatctcaaattaatagttgaatatatatataaaatattagcatacacatatgataactttttcatatgcccttgcagtatttttagattggagataaaccatcaaaactatagaacaaaatatttaagctagagtgatatttattctaaatcactttctactctaaaattttgttgcatcttctttttttcctcctaaatcctaagggtatatgaaaagacaaagaaaattcaagcaagttacaacttcaggcaaagaaaactctcataagcaattcctgtattttacttagcattttctatgaaattccatttccacaagcactaaggtaatttaccatttagttgaattgtttgattaattttctatgttttaagcacaatatcaggtacttacagaaggtataattaaaaatcacttcccttgttttccatgaacttctgctcccaaacccaaaattctttcaacaagaaacaaactattttcatgaatataactgaattagattaaggaaaccaatgttggtgacttggaaataccaatatggcacaaagatgttcagggtgattttatttattttataaaatgataataaaatttattttatagttgaaaagcctatttctgtcatatcattgattctgttacataaagtgctaaattttgatatctcatattatgctactatggcttacattagaaataatatatgtcaaataaaaactcatctagatcaatagacttttcctttgtggattcttttttaaaactaccaagtttgagaatatgaatatatttgtttttcatattgttctgcaatgaatataaagtcacttataatcagaaagcaattaaatgtaaataacagtaaagaatgagaactatagaaaatagatatgaaaatgcaagcccacagagatgagaatagatcatgtggaacataaacactaaagagctgcttttataaaacttcaattttttctttgagttccctagcagccaaagtaacaagggagactgaaagtaaaacaattcaaatttgatagtatttttatatgaggaacaacactttcaggaaatgtttaaccctagtttttcatgaggccaccttaacaactgaattctctttctctctcactctgtgtataagtattttagataagtaaaagaacaatgttataatgttaagtcaaacatagacacaataatttaaatttgatgttaatcgagaaatacaatgccatttccatatatatttagtttcaatatgacttataatctgaatattccataaataagcacgttggaaatatttgggggaagaaacccaaaacacgtgaaattctgtggtggtaaatgcagtgcacagtactcacagttttaggcgcaaggtgtcgctctttacttggtggaaagttcatttaaaggttggtctgaacagtgaggcactcccatacaaaggaactccatcataccggatgccaccgtttaaggatcctttgaaacttcttaagaattcaacgagatttttaacctgaaactgaagaatctggtactgtaagtgtaaagaagcttattttggaagccaatttcgtatgcgatgtttggttttcagagaaggggattgggcaccccacgactacagctctggcttctcctcctcgaattctgggaggtggggagcggccagctccactactccgtctcggaggaggccaaacacggcaccttcgtgggccgcatcgcgcaggacctggggctggagctggcggagctggtgcagcgcctgttccgggtggcgtccaaaacacatggggaccttctggaggtaaatctgcagaatggcattttgtttgtgaattctcggatcgaccgcgaggagctgtgcgggcagagcgcggagtgcagcatccacctggaggtgatcgtggacaggccgctgcaggttttccatgtgaacgtggaggtgaaggacattaacgacaacccgccggtgttctcgctcagagaacaaaagctgctgattgcggaatctaagcaatcggactcgcgttttccactagagggagcttctgatgctgacattgaagagaatgctctattgacctacaggctaagtaaaaatgagtatttttctttagattcaccaacaaatggtaagcagattaaaagactgtcacttattttaaagaagtctctggatagagagaaaactccggaacttaatttgctgctaacagctacagacgggggaaaaccagagcttactggcaccgttcggctgttagtccaagtcttggatgtcaacgacaatgatccagagtttgataaatcagaatataaggtgagccttatggaaaatgctgctaaagaaactcttgtgctcaaactaaacgccacagaccgagacgaaggagtcaatggagaggtaacatactccttaatgtcaattaagcccaatggaagacacttatttacactagatcaaaataatggagaagtgagggtcaatggaactttagattatgaagaaaacaagttttataaaattgaagtacaggctac

SEQ ID NO: 10563 - DNA, 6000 bp, Homo sapiens
cggtgctcagcactgcccactgagggcgggtgccgggcgggcaagcccactctggtgtgctccagtgcggtggggagctggtcatactcgcaacaacagccgcagagggtgtgctctggtgaggggccaccgaagacggacctcatggccttcagcccctgccttcctcctgatctgggatcagttgatgtaggcgaagagcaagatttaaatgttgatcatggcctcaaagtaagtccatttaaatttagaactcataaattctatttgtggaaattgtagttactttaaaagtgtttcagatttagtttttcaccgtattttatagtgaaaatttaaacattgtttagtttttagaaaccttttataattaattgaattttctcagtggcataatacagtattaatcattctccacaagttgggtctatcttgaaactcaagttatggttggatgatatccattttttactgaatatttattttggcctgccttacagccgtcttctctgaacaatactctaaggacgttcagggcattttgatctttggtgaaagtattcccccaaagcgtttattcttttgtccttaggcactgaactcttaatcttactccatatgctgtactttgaaatgcatgttttaaatatgttgtctttatatttacttttattcactttaagatctcggtttattcatcttatctgactttttagtgtctggtagtcacaaatatctttggtgtttcactattgccgttttaagcagtgtagtgataaaatacagaatgatagtgtttttcaaaatttgatagttttcatattcttcctaattttattataaactagttaaaaagtaaaatcaagagggaagagatttgtaatccttcttttaattcattatttagaccattttaccatttggagacatgttttttattctacatgatttttacagttgtattgtcgccaacttaacattttttgagcctctatgtttaggaaatgattactttattcttgcaagtatcttctaaactctaatcattcaaccctttgttcatgagttggaatattttcaataatattccacattaaagtgatatttaatatatgacttagaaaaatgttttcatcagaaaaactatacatgataatttcattcttgcaaaccaaacatataatttataaatccttattatacagaatatttgggattatcatggcccattagttcgtgtaaaaatatttagtattatgggataaatctttgaaaaatccaagatactttattttggtatctttcaacattttctttcttttatttcttcttgtctttttacacgtttgcttcttgtgactgttggacctgcctggatattaaatacccattagacttcgtgcatattgctttggagagaatggtagaaattgatggaagggaatgaacgatttctgggactctgaattcttacagtttgttattagtattgttttaaatcttttaatcacttatgaacaaataatgtaatcatttatgggcatattttagcccccttgtccaactgaaggtaacctcaaagcagcattgttttgtagtttattttacagttctcttaatgcctgtccatgtttagcattttatttgactatttgaacacattgtgtaaaagcgaattgttttcattttagtcctttaaaaaatatgattgttttcatttaagtccttttaaaaaatatgattatctttattatcctgtttgaataatatgtgttttcctttgtgaaagtaatatttcctatcctgtctatgtctacctggttctcaggtattactttaattactgaattctcctaaacatttaattgacttttacaaaatatcataaataggaggattctttccaccacctagcattgtatttggcaatttatcatttaagtcattttagttctgtttttcttcaactctctgatatttgaatttggggttgtgctttcacagtgagaaagtctaaacctatttcttgtacattaatacttttcactattctaattatggtgatgcttttagctattaagaatttctgggattgaaatgtgtcagaagttagttattaagtattgtggattctgaagctctctaaatcaagtcctccctttaccaatttttgtatgtgtagccattggtaaaggatttgttattcagttccttggcattatatgtatgcatgataaatgtgaattctactttatagatttatttgtatcaagtaagttaatagttataaattattaataataaactctggcaagtgataggtacataataaaatttagttattaccattcttaagagaaaagaagttagtgattgcagaaaggcaacctaaaatgtcagaaagtcgttatggccttccatattaatcttatttttgtgtaaaactatcttctgtaaagtcattttttagattaacctaggatgtttcaatattttgaatgttgtgtggtggaatgaaaaaaatctaaaagttattacgagtttaggaaagtcaagttaacaccacctatgtgggaaaacagttttttggaaaggttaaagtccttccaaggaatgtgtagactatcttactttgatagttgtatgtttcccatatttaaaagttgcctgagatcctgcagaggcctgagtaggcgtttgagttctttgtatgtatgagatctttccattaatagtatttttcttaaaaagaagtatacaataatgttttgatgatgatttaaagtcaatttatgttgtagttctatgaattaagtaaaccatttatgtagagtgttgtaaatagccttttaaagtgctttctcttttttcttttcttttctttctttctttttttttttttttttttgagacggagtctcgctctatctcccaggctggaatgcagtggcgcaatctcggctcactgcaacctctgcctcccgggttcaaatgattctccttcctcagcctcccaagtagctgggattacaggtgcatgccaccatgccctgctaattttttgtatttttagtagagtcggggtttcaccatgttagccaggatggtctcgatctcctgacctcctgatccgcccacttcggcctcctaaagtgctgggattacaggcatgagccaccgcgcccagcctaaaatgctttcttagcaagtagagaagattgtaataaccagtcttcattaaacattaaataggacccttacagatctctaacagcatatcatcatgtcaggaattattactgagccccagcccctggctttaaaatttgaggtcaaataaagaatatgagtcacacaatgcaaggcaagataatgtaacaggtacaagaggtaaatcagaatgacgttgaagttgaaagacaatcatttcctatttgaatttttgaagaaatacttgaaggggcatggtgtgtttcagtggttttaaaataagtaagttccccccgggagaatattgagaatgatagacatttcttggaaagagaaaacataaggaaagttgaagacacagaaagcatcaatatgacaagtagaaaagtccactttggttaaaacacacagtctgcagagaatgaaagcaggaaaaccaatgtaagaagatctcttgatttctgagtaataaactaaagggccatgagtgattaaggaatttggccactctttagaattaattgggagctatttaactaccttgagcaaaataaatcacgacttttgaaagaaggttgaacgggaagacaaactcagaagctcctgcagtaatcaaggacagaagcaattgttaaatgcacctcttaggctgttatcagtagaaatacgaaataaaagataaatatgcaaaaacattaatggcacaataaacactcacggttttgcctttagacttgagatacactaaaatctagatttaattaatcgacttggacgttggaataagatagtaaaactcacaacaaaactttgtagaacttagtcaggaaaagaatctcaagcatagctttaaaaacagaaattgccccgagtactaaggatgagcaataatgaaattaaaacatattgtaataacattacacaaactatattggagactacaaagaagagattattcatagattataaagcttggaaagaatcaaaacaacacatttctggaaacagattgtataaatgctacaaaagagaaaaatatattttctccccacgcaacacaagaccttaaagtcaattctcgcttttcttgcaatattttataccttttcaattcatagaattactcaagaaaactacctcagttggttgctactttttgttgattccttttaccagacatgactaagtttctttttcatcagtagatttctgggctcctatattcactagagattgcaactcctggatttctcttacactagaatcctatttcgagccatatgggagattctgaattccagaacaaaagaattttgtaatttaaaattcgtgattgctcaatggaatcattttaattgttacttcatttctgtcgttatttaaaacttaagtggagagttttctcagggataagaaaaccacaatcaaggtcatacaaaacttttagaggcagtcagtctgctaagaaggctccagcaagagaaacgggatcttctgtttcaacaatcattacttaagaaaaaattaagaaaatgaaataagttttgcagaataactgtgaaatttttattcatgaaatatgtacttacactttgggccacgtgatgtcactctttgccgcgatgttctctctgaatccagacaaatacagcccttttcccatgggaaagaggctcaattctttttcactctctctgtgctgaacgatggcgaacacagcagaatgggactgacgaaatcagatgatttcttctaatttggaggcaattttcactaattagaagaagactgagtatttgaaatgttatactcaagtcgaggagatccagagggtcagcctctactgctctcgcttctgatcctcgcaatgtgggtggtggggagcggccagctccactactccgtcccggaggaagccgaacacggcaccttcgtgggccgcatcgcgcaggacctggggctggagctggcggagctggtgccgcgcctgttccagttggattccaaaggccgcggggaccttctggaggtaaatctgcagaatggcattttgtttgtgaattctcggatcgaccgcgaggagctgtgcgggcggagcgcggagtgcagcatccacctggaggtgatcgtagacaggccgctgcaggttttccatgtggacgtggaggtgaaggacattaacgacaaccctccagtgttcccagcgacacaaaagaatctgttcatcgcggaatccaggccgcttgactctcggtttccactagagggcgcgtccgatgcagatatcggggagaacgccctgctcacttacagactgagccccaatgagtatttcttcctggacgtgccaaccagcaaccagcaggtaaaacctcttggacttgtattacggaaacttttagacagagaagaaactccggagcttcatttattgctcacggccaccgatggaggcaaacccgagctgactggcaccgttcaattactcatcacggtactggacaacaatgacaatgccccagtgttcgacagaaccctgtatacggtgaaattaccagaaaacgtttctatcggaacgctggtgattcaccccaatgcctcagatttagacgaaggcttgaatggggatattatttactccttctccagtgatgtttctccagatataaaatccaagttccacatggaccccttaagtggggcaatcacagtgataggacatatggattttgaagaaagtagagcacacaagatcccagtcgaggctgtcgataaaggcttcccacccct

SEQ ID NO: 10564 - DNA, 6000 bp, Homo sapiens
atggccggcacgggccaggcttgggggaatttggaagggaggggtctgtgggcaggggtcatcgtgttgaaagggtggagggtcctcttggggccgcgtccctgtcctgatgtggtggcgcttggtgcctgcgtgccccggcctcctgtctggctctggggctgtggtgcagccgtccctggacaagctcatccgcatagagtaagtccctggaggccccccgggggcacttgcggggccacgctggctgaggcctcctgaccacgctgtcctgggctgggctgccttctctccacccaggctgaggctcatccagcacaagggtggggccacggaagggcagtgggcacccagcgcagatgggcgagaggtgtttcccctgagcatggtcgaggctcacagatgagaggtgtttccctgagcacggtggaggctcatagacgagaggtgtttcccctgagcacggtggagatgcaaggaagagagatgtttccctgagcacggtggaggcttacagatgagaggtgtttccactgagcatggtggaggctcacaggcgagaggtctttcccctgagcacggtggaggcgcaaggatgagaggtgtttccactgaggatggtggaggtgcaagaacgagaggtgtttcccctgagcacggtggaggctcacagatgagacgtgtttcccctgagcacggtggaggctcatagacgagaggtgtttcccctgagcacggtggaggctcaagaacgagaggtgtttcccctgagcatggtggaggctcaaggacgagaggtgtttcccctgagcatggtggaggctcacaggcgagaggtatttcccctgagcacggtggaggcgcaaggatgagaggtgtttccactgaggatggtggaggtgcaagaacgagaggtgtttcccctgagcacggtggagactcacagatgagacgtgtttcccctgagcacggtggaggctcaagaacgagaggttgtttcccctgagcacggtggaggctcatagatgagaggtgtttcccctgagcacagtggaggatccagggactctcaaggccccgtgtgctgagccccggctgtctgcagcactgtattgtgaagatcaccagggaaaagaaccacgcctgctccccagctactctgtgctgacctgaaagaggccttggtgtgcgtgggagtggggaccaacgttgcctggtgtcacaggacgcaccgggcggtccctgccctgcctccctgccatcccgtctggagcacagcatgtgtccagagaggctgagcagcccggcagggacagagaggttgcatgaccgcacagcgagtccagaggctgcgtgagatggtaggggccggggagacccaccggcctcctcccctggagaagagcagctccacgatggccaaggtggggccagctcctctggctcatgctagccccaggtgccacttccttctggactcattctgctctggtgcctcgagctggctcaatctggcgggtcctggtggggaaggtgagggggtgagggcccacaggcaggtggcaaggagagggtctgccttcctcaggaggggtgctggagagggaccacgtgggtgccaagtgtagacaccgcctgggtgtgggaaaggggcatcaggagagcagggccggggtcatgggcgccctcagctccaggcagcagccaacgccggcatctgtgccaacctcgcttctgtcccttcatccgccagaggcggagagagcaacggcattgagagcaagatgaggaaagttgaggagctgatggcagagcccccgcgagggaggccgagctgatggcggagcccccatggggaggcccagctgatggcagagcccctgtgagggaggctgcatacttcgtagtgataagagaggaagggggacggaaagaaggcaggcggcgctggtgtcctgggaagactgtgagcgctggcctcggactctgcaggttaaacacaggcagcaggggcaggaggctgtgctaaccaagaggagaatgtccctgggtggctgcggggagaggaggccccgcgtgaatggctctgccccatcctgtgggcttttgtctctgtggtcttagagacccgccttctttcctggatgaagaggggagtcctgtccagacagtaggatgaagatgaggggtctttactccccacaagtgggctcaagcccaggaggactgggggcagggtagggcgtgtccgctgcctggaggggctgctgcttgggaaacctaagctgtgagagggaaggcagtatgagggagcagcagtcagggagccgctcatgcctggagccacccgtcacccctggattatccagaagactcttggagggaggaggagcgcggggaaggcagctgtgccctaactgcctcttcggaggactgcggcattcatgctctggcctccagttgaaaatagaaaaagggatttaaacaagcttaggtgaacataatacaatggaaaggattaaaggaggttaaaggatacttttaaaaaaatatcatcatggcagaaagaccaagggaagatggtttagtcaaagtatgttccaggaactgctgcccagaattggtttttgtggatggattattctctgcatcttttgagcaaagacgagagactgggagtggatttggtctcacgtctacagcatggacatcgcttttggctcagatttgcacgagacccttggagaaggggggactgcagccgaggtgtggccgggctcctccagggcctcctcagcccgagttccctttgggtgcagagatccaggtccctgagcctgcaggccctcctgggtgccacggcactctcgtggctctccccttccctggcttcagtgcctttgcccagcatggtgccatggagaccccagcacagaccatgctcagggccccccgagtggaccgagcccgcgtgctccttggctggtagggaggcctgtctgcatcaggtggagtcgggaggtgcgggcagaggccccagagctgtgacactggagacgccgtgtgaccctcatgctccgctggtaggcttgggcgagtcgcaccgcatctctgacctcactttccccactcgtgaaaagggctggttccccctcctcacaacctccttgttccttgtggggattaaaggcaatcacgtttgcaagaagcgctgcctgaattgtcgggcggtgtgctggtgggaatgtcccacggccacccctctccagcgagaggcctggagacctgggggggcgtcacaggacggcacagagacaggagcctgagcttccaggcgcggtcgggagcagggtttgaggccagcgttgggcggtggccaggcgccctcaagtggacgcccacactgacctgtcacctccaccctgcgggctccagatgccctgcgcgtccccacccctgcgccccccacacctgccctgcatgcccccgcccctgccccagatgccctgcgtgtccctgcccctgcctctgcaccccccacctgccctgcatgcccccgcccctgcctcagatgccctgcgtgtccctgcccctgcctccccgcccccacacctgtcccacatgccccgcatgcccctgccgctgtgccccccacgcccgcccctgcccaccccgtgcacaccccctgcccccgtgccccccacacctgcccctgcgcccccactgctcccacgtccccacccccatgcctgcctgtgtgtctcccggcaggttcttcttcagcactgtggcctcggccacagctggcatgctctgcctgatcgccatcctgctgtatgtcctcgtccagtacctcgtgaaccccggggtgctccgcacggaccccaggtatgaaggtacgtggccgccgctctcaaggggcctcatcctcgcctccagccgtctttccgggtggtagtatcgggtctggggtggtcggcccctcttgtcccagggagaggccggggcaggcagccccatgcaggctctgacctggcccgacggcagcagcccagtgttcatacagcccagcagcccccagcgcgcgggaggcaggctcggggagggcgctggccacgctgctctgtagatgctgccaggtcgtgtcaggcgagagacagtggggtccacctctgcccctgccctccgcagtcatccctgtagcacctgtcacaccatcctgtggggccatgtagttgtgggagggtgggggtgcccatcctgcaggagcagcccatggggagggagagtggaggcagcgctgagggtgctgggctgtaggctgcggtgcgctgaggcccttggccaagtgggcccggagcctgggcctcgggaaccgatgctcacactgagccactggagagacgtggcggtgaggactgtgggctccagaggcgagtccacgcctaacccagatcccgtgatgccagcatcctcgggaaatgggcctgtggctgtgacttaatatctgaggtgggagggtcgtgctgggatgtcccagggggcccaaatccagccacgagtgtgcttgtaagagaaaggagagacacagaggggaggtggcctcgtgaggatggaggcaggggtggagtcacacagccacagcccggggtcgccgggagccacaggagctggcaaaattgggaagacctccctggaccctgcggaggcagcgtgcccaactgtcctgcagctggacgtcagagccctgcctgcctcagactgcaagagtctgctggagaagctgcccccacccgccaccatttgatgtatttattgcagcagcgccaggaccctgaccaggaggacctgggccagagaagcccctcggggtgcaggacaagactgccagtctcagccccaggcatggctgcacccgcactgcacacagcccgggtggcgagacagggaggacttgcctgcccttgttccagaacattccggagccaacacggtgtgacatttttttcaaggatgagctttgccagctccacgtggaagtccctaaagctcctccttccacttcgaagcgtgactgatgcctccagggcctcacagccgcttctgaagcacttcctgaaagccagctccaccctggcgaggccctgacctcagcggacccaagcccaggacgatgcctgttgcgttcttctcccccagtagcaagtcaccttccccagcagcctccatgttgtctgggctctccctgtgggggatgccaggggagagtgagagagcagaggtggccaagatggcatgtgctgccttctctcctggaacatgctgcttccacagggcagtgccagtgtctccgtgtgaattcattgattgtggcctgagtgaattcctgggtttgctgttccagatgattctgcagggcttcaaaaccagcaaggccctgagcaaagctgctccttcttctcatgggctgaactcatcgtgatgtcactggctaaggggggcagcatggggtccagcccggcccaggcacatggagctgcggtcctgtcaggctgagtgtggtgtttgccttctaggatggccccgaggccaccagttccagagagggtctgtcaccgaaagacatccatgctgagtcacccaaagacatccatgctgaatccatccctctgccattctgccttgccccaccctctgccattctgccttgcctggccctctgccattctgcattacgcctgatttttggaagtgtggttttgagtgttggcagcccagtgtcacagaggaccatatcttagaaatgaccccaggcgagagctgtggctttcctgttctatttgaaggcagctgttttagggtgcagcgggtccagggacacagagtgggccatgagcaagggatgggtgctggggcctggcagagctggcaggctctgtgaccccggcacttaggaaggggtgggcaccgtgaccctggcactaaataaggaagggatgg

SEQ ID NO: 10565 - DNA, 6000 bp, Homo sapiens
ttttgtgacaaagctttccttttcaaatgttacagttatttttattccgaatggagacgcatttatgattgggataaagtttttcattataagaatagttaatttgtatataccattggttgggcatgtggttggtggtaaaatatgtagttgctgtatacttctgagagccgaagtctttttatttggtttccagagattatagtgttcactattttgcattcaccatttgccttaacaaagcaatctatattataggattcaacagttacttgttggatggatttttaaaacatcagtcaattcatcaggggaaaatggtattttttagtaatcaaaatattttgcaccattgaaatcaataactctattctgctatatcatatgacagtaaagaaatatgaaagacaagcattagaggttaatgaggacaaaacagagtttagctgccataacccagatcctgactccactggtaccatgtgaccatcaaatgttattcttatttgtaaactagataaaataatagtagcagcttgacatgtggtataaaactataagtaaaatatttaataggatgcctgatgcctagtcagtgctcagtaaactaatctatttattattagtcatggatatcatagtattttactatcactgctgctagataactagcccaatctctattttctgctatgtgctggggcagaagtttctattcaatagttcatgaatcatcaactcatcccagtctatctggatatcacttcttaatctgaatccaaatgccaaaatactcaacatcacagttctgtgaacctatcgtctctgtccttctgtccctttttttttctttttcttttcttttttttttttcctttgagacagagtctcgtcagactcccaggctagagtgaaacagtgcggtcttggttcactgcaacctcccactccctcgttcaagcgattcctgtgcctcatcctcccaaatagctgggattacaagcacatgccaccacacccagctagtttttgtatttttggtagagatggagttttgccatgttggccaggctggtcacgaactcctggcctcaagtgacgcacccacttaggcctccgaaagtgctgggattacaggcatgagccactgcacctggccctggcccttgttattgacataaatattatcctatgctatcagatgacagcttacattttcataaaccctctgatttcagttgcagctggagggttagattcacatggctgtgattcactattttgctgatggtgaatttctcaagtgagcatggcttgtctttgccttctgccctcagactctttctacacgaaagggggagatgataggagtcagtgtgcctacatatgtatatatatttcaaaagagggcacagttacgtccctgaggggagccttaggctgacaagggaaggagttttctgttttttttgcttgggaaattctgagggatattctatatacctctccagaaatccgagtgtaattaagctgtgttacccacggtggccacctcaatgaagcccctttacacttgctctgaagataatctgacacataaactatatgcacgtgggtctttcattcatcctctgcttcaatgggaatacaagcaagatcaacaatgttcaggatctaaaaacactgaacactgaatatttcttttccctacaatatatatctgtaattaaatacatgtcagtgattctgatgcaatttcttgcttttgtttatttttttctctttgaaatcatttcagttgaatgtgcacaacatatgaaatggcaaaacacatataaagaaaatgtgttcttttccctagacatgcagaccacctggtaggcaacttcatctctttgttgttttggggtcagaagagaatgtcgtagattgtattactcttcaaaattatcatcactggcctctgtgtggctctctagaaaggttatatatctctgtcatattgacctctggcttagcaatgtgtctgtgattttctttagtcaaggatatatacacagaagtggggttagtcacttcagagcaaaagttactgttttagttgtctgaatgaaaattcccttgtttttatatcttctttccctcccctttgaggatacaggaaatgtcccatcagtctggttgggtctggcagtaaaaaagctgtgaaacaaatcttcacaattgtttgtatataattgtataaaattgtgtatagttaaccaataataaaatgtagaggagacagagatacccattaagagactgttacaaaagtcttggaagtaaaagttcaatcaatgcaatccaacagctatgacaatgataatggtggataaagaaaatgataaaatgatgcttttaactagtatttaggaagtacaactgatggaacttgactcactggatgtaagtataagggtaacgatacttgaatagtggctcatattacatcatgttttaatttttcacggccttgtgatgaattttcttttgtttattgccctttgatctcttcctcgccaacagagtaatcttatagcataattttgatgatgtcataccttttctaaacagcctttatggcttccattgctaataaattaagtctgatgtccttagccttaattatttgtcctaatgttttaatatccatttttatctttccagtctttattttcttaaacaaattctattgatttattttattttccgaaaagtaatttttgagtttccaggcaaatgccttgtcccagtcattacattacaaaacaagctttaatgcttgttttcctacctctgcttacattaattgtaacttgttttagtcaggagagattagatactactagtctagtaacaaaaaaatccccaaatctcagtggtgtagaaataaaagctattttatccttccatgctacatgtccatctagggacaaataagactccaatgttctcttctttcaacaacccatgctgatagagtgcgcacaaatttatatttgttcttcaatattctgtttggaaatggcaatattcttttccattcatgtttcatactaagatgccaagactggggagaagtgcatccctcctacagggagagcagcaaaaatctgcaaaacacacacaccaatgtaatttattacatgatcattttcaatctctttcaaatctcaatgatttcattaatttgatcttctccactccaccttcagatgctcttttttcttcaacttttgccgtttgtactaataatattgcacatcttacaatgcgctaggaggggtcaaaacatttattttttaaatgacagatagtaaacattttaggattcatattgtaagtctctgtggctactacttgactctgccattgtaatgcgaaagcggtcatggacaatacataaagaaatcggcaccactgggtttcaataagtctttatttacaaaagcaggtggctggtcttctgttgtaatttgtagaccccttagctagagcaatgactgtccaacctgaatgtgcattggaagcatctggagggatattaaaacatagatcgcagtgtcccattctcttaaagtttctgatttgataggcttggggaagggcttgagaacttgtcttttcaacaagttccaggtgatgtttttgctattggtctggggaccacacattgagaactctcgacctgtagtacaaagacaatgttctgtagtcaatgacctattatttgtgatcaaaaaaggaatttaaataaatgaaaaatatactatacaattgagggaaaagcaatgtttatgattcattttttcatcagcatattcttttcttcacaaaatccaagtgaccaaacttagccagagactgccctgaatgaaatatttattggctacataaatgagttacaataaagttagcattcaccttgttatagtgacacagcatacagtgtgtaaatattacatttttccgtgcctcccttcacgtgatagacaggtcacgaaattgttttgtttgtaaagtctccccaagccatttcaatttgtcacgatacacaaagcttggctacaccacctacatcaacacatttgtattcagtgaaacaaaaagatttcagacagtcccaataattttattctttttcaacactagcattgaaaagacattgttatttgtgtacagtcctcctgtagggagacatatttttaaaactgtattgagactctgtactcttgagattttttatagaacaaaattaaatgattatctgaaatattgtggcattcttgatgtctgaataataaaatgacttagagtcttagaaaatacacgattcttggtgaatatatttaagcaaatgtttattcaatagttagcactttaatagtgaaacacaaagaaagataatcatggttaaagaatgcaaagttgttttgtggcttttggaggaataggttttcaacaataacacttttcattgtaatattttattgccattataatattctataaagttttaggtaattattaataaattctctcatataaagagaaattaacattaatttttaaaatcttacaatatttaaacatgacaaaattaaaacagaccagactaatgtatatagtcttagcaatcttgagttcttcatagactctgaaccaagttaaatcagcctagaaacaagtaagtgaattaggagaaattgcttgagcatggttattgtcaccaataagcatctgattctcgtttagacaattaaacattgagacagcttccaggtaaacgtaattaattgtcttgattcacaaaaaagactcaagcgacttagtggaggaaagactaatagaacccaagattttttcctcccaggtgacagttctctgatatgcaatagatctcaagcatttaaaaagcaaagcttcgggtgctaacccaggtgctatcactttctcagcgcctaatcttcacccgctgctaggctcgtttaatgagtcttctgagagctaaggagtcctcggattcattcaaagcattctacaatgaacgctaggggggaaaaagaacaaacaaaatacatttcaaatataggattcaattacttttcactactcaatgatgtgtcaaaggcacgctgtgttttgttttgagggcggggagatgacaggagggaatcctgggcccccattggctcgccgctcgccgctgcagttgagctccagccgctccgagagcattattgatctgaagggtaaatgtggagggagccacagagaggggtccaggcttttctgagaagagaggcagcctcttccaggaagaaagtggtgtctactggctgcccggcctggagaaccttctttgaatgaaaacggacaaaatgcaaagcagtgtgttggcacagtgatttggaaaggggaaacagaagagaagggtctcaccttccgcgcaaggctgagctgttggcaccctgctgcggccgtcggtgctgctgctcctgcagctgccttttctgccatcaggtaaggcttccgtttttgattgggattgcaccgcgtgtgtgtgatcgcttcagggtgcatgcacagaaattcatacatgattaataaagtgatgcctagcgtagtgagaagctgaacgaagctgcacacagatctggcagctgaattaggagcttgtgcgtggttttgctttgggaaacttcggtaagttctaaacaagtctctggtcctcagaccgtgagaggttacgtgaaaagaggaaggaaagaaatgttttaacctcaaatgcatcttagcatggctaaattttcaaatgaaaataagtaggtgtgctagatgtccaactagttattttataaatggctttatagatatctgatttttacaacaaaataatgaatgctttattttcaaagagcttccagagatgccgacccccctcactcatttctccac

SEQ ID NO: 10566 - DNA, 6000 bp, Homo sapiens
gagcacacggggtttaccctcttcccagggaattgctacaagagaagatgatagctgggtccctttttattgcttcctttgagtcagaaatgattgccagtaggaagggccagtcataagtggaatactttatttgaaggtggtctgtgtttaggctcttctaatttttagtagaaacattaaactgtaagttagtatactttggaattgggaaatttccacaggaacttctgtaaaatttactaagcatgtatttccactggttgcaatatgtaagttttaactaaggataaggtgaggataaaccttagcataagttcagtataagagacagtagtcataaactattaatcccacttaattcccatgagaaaaaaaaatattgtagaacagcattagagggatgtgtgtataggggagggggtgttttttttgggtggggagtggaaagctgcaaagagaagtttaactgtagatctctcagaataattcgtttcttgacttttttttcccctctgttgtttggcagtagatgttgtttggctaagatgtctctggagtatagaattccttcctatttgacttgggaaggtaaaataaaaatggatagcttgggagtcatttattctgctatacttaggttttgtgacaacataaacatattaagtcagtgataccaaattagagttgataggggataatacttctttgataacaacaaattattctttacataattaattaatcttaggattgaactgtagttttttaaataggcttttatgtaagtttggctgtttattattttatgttgcattagtttaaatttccctaagtcgtttaacacaatagttacccaattccagcctagtgtcttaggctgcctaacacctgccattgacattagaaaaagcaaaactcatactagtgaaagatgcagcagttatttattggtgggacattgggtttacacaattataaaaaaatggaagtggctgggtgcggtggctcatgcctgtaatcccagcattttgggaggcccaggtgggtggatcacgatgtcaggagatcgagaccatcctggctaacacggtgaaaccccatctctactaaaaatacaaaaaattagctgggcatggtggcaggtgcctgtagtcccagctacttgggagggtgaggcaggagaatgacgtgaacccaggaggcggagcttgcagtgagccctgatcacaccaccgcactccagcctgggcgacagagtgagactccgtctcaaaaaaaaaaaagggtggaagttacacacttttgaaagatgtgtgcctctactccagggcttattctattctgctgcctatgtactttgttgtttcttttgcctggaattcaggcttctctccctttcgtaggatgtggtgaatcctgctggatttcgagatttagcttgaagattctttttttctataactttcctatgaaataccccataacattaaaccagagtcatttcttactcctctaggcactttgttcattttgttcttatggccctattcccattttcttctggccagtatagttagttctaatatgtaatatattatgaatgttattttcacttgattttaaattcctacagggttagaagtatatcctaatgtttgtattctcagtacctaacaggattcttagaacattataaatactataaattctgccagaatgtttattctgcacatgggcaaataatagctaacatttactgagagcttaccatgtgttaggcttcgttctaagaacttgatatttaatcctcgtaatagccctatgagcttgataaatttgttactttcactttatagatgagtaaatggagaaatagattaagatgacttgcactaggacactagggtttttttggttttgttttttgggggtttttttgtttttgtttttgagacagtcttgtgcttgtcacccaggctagagtgcagtggtgcaatctcggctcactgcaacctccgcctcccgggttcaagcgattctcctgcctcagcctcccgagtagctgggattacagccacctgctaccatgcctggctaatttttgtatttttagtagagacagggtttcaccatcttggcttcccaaagtgctgggattacaagcgtaacccgccatgcctggccccggctaacttttgtattttttgtagagacgggatttcaccatgttgcccaggctgggactgtttctgttgactccccccttacccctagttttaggtcacttttttgctgctttgcaagtttagtgatttttttttttttttaacttcgatgctggacagtgtgaatgttaagtgatgaattttatggtctttctttaaagagtgttgaattttgtcttggtaggcagctaagttacttgtggatcaacttgtttttaattttttgtttttgtttttaaattgtgagatggagtttcactcttgttgcctaggttggagagcaatggcacgatctcggctcactgcaacctctgccctcccccggtttaaatgattctcctgcctcagccgtccgagtagctgagattacaggcaactgccacgatgcccggctaattttttgcagttgtagaagagatggggtttcaccatgttggccaggctagtctcgaactcctgacctcaggtgatccacccgtctgggctacccacagtgctgggattacaggtttgagccaccgcgcctggccgcttttaatctttattagggcatgtctagggtggtctatactctaggactggtttagccctactactaagatgtgaattttctagtattccttctgaatgtcctggtttttagtgaggcttttgctctctggctagttggcaatcacatttttcccagctctactgaactcttagaattgttcactttctggtaggtgttctttgcctagctttgtggaatttctcaccctaacacatgtagctttagctttcagcccaagactcaaggaacaccttgcagatttctagacctctttatctgtgtaggtcccccttctccagtagtctgctttgcacactgcagctgccttagctaccctgaactctgatctctgctgccttaacgtgatgggactgctgtgctctgcttgggttcttcctgcctgctctgctgcctgggacgtgcctctaggtggtaagcttaggcagttgtcaggctcacataggctgcactcaagtgtcacagttctgggctgcttttgactagtgtctgaaaacagttttttcgtatattttatggagatttctaattacaatgagagggcagctttaggaatgattacttcatcataggcctatgttgtttagtattaagtataggaaaataattgtgtctctgtccagttgaatggtaatatattttaagacagcaacttaaaattttaagatagtccgctagaactttctttgatgatgaaaatgttctgttcctgtggggtgtagccactggccatacgtcactattgtatacgtgaaatgtggctagtgccactgaagagatgaatttttaaattaatttaaatagctctatgtgggtaatggctcctgtaatggacagtgtggctgaaggttttctctcagtattagaaaatctcgaccttacaacgtttgcatttaaaaaagatgcctgtggttgatctttaacatattctaatttagaaaaatatagtttttttaagtataaaaatagttgcatgttcattggagatcatttggaaaatgcagaaagcacaaaaaaagttgagcacacataatcccaaagataagtaagattaatattttggtgtatttccttccagttttctataaagaagaacccactttagtgaaaaatcgtttggttttattttaaatatttctctctcaaaaggaaatatgtatggatggcaaggttaaaattgtgaaaatttgtatccttccagaattagctttatattgttatcaaataatagcatggcctaaacaggctttcctacctctataggctgtatatgtgtagcagtttcaggaataacatattaatcaggaagcttttttttttagtctattagttgcagactggtgtttaatagaaaacttatttggctattggctgctttttgacttcagctggaaggaagctcaaacataatatttggctcatttccacataagactaagggttactgactctggtctgaagactgcttgcagtttagtcgtctgagtgactcctgtggctgaggatgtgctgggtgcttagaatccaaaggtctggctaggcttaaggggttcatggtctagttagggagaaaaacatggcagattttcttctgtttttcttggggcaaaatcagattttactgtttaatagtacaaaatttttgcaaaattagcagataatactcatcatttctaacttctgaaatcttttgtttaggtgagacatggaatccattaaaattgcattatcagttaagaaatgtacgggaacgattagctaaaaacctggtggaaaagggtgtattgacaacagagaaacagaacttcctactttttgacatgacaacacatcccctcaccaataacaacattaagcagcgcctcatcaagaaagtacaggaagccgttcttgacaaatgggtgaatgaccctcaccgcatggacaggcgcttgctggccctcatttacctggctcatgcctcggacgtcctggagaatgcttttgctcctcttctggacgagcagtatgatttggctaccaagagagtgcggcagcttctcgacttagaccctgaagtggaatgtctgaaggccaacaccaatgaggttctgtgggcggtggtggcggcgttcaccaagtaactctgctcggggtgaaccattctcctttctctcaagtaaaccagtagtttttcttctgttgacttctggttttctgtaatttgtactttcccacactataattggcttctgttttacaaaatggtgggtggctttttcttttttgtacgtgtacaggattctgctggtacgagaggccttcctctttctgtttttaaaaaaagttttactgccatattggcattccattccctgttgccatcctcactgttacctgttttgggtttctggtctactttgactttcaaagtacctccagcctcctcatacgcacagcttttggatgacctcagcttgagtttctccatatgtgcatgtacatctagcattctgcctacagttcagacagaagtcacaaaaaggccttcaactcaccaaaggtaaatatctgtatctattaggacattttttacatagacttcagttgagatgtatacttagcaaaattatttttaaattgaaacagcacagtaaatacttaatataaaatgtcccttggattttgcttcccatgtaaatctattgtattattacacttgttataattttaactataaaggtccaattgtttcacagagccagtttgggatgggctgcattccatttatgctgtatatagtttgaattatatataaattaccccttcttctggccacccctgctcccatcttagtattttgcaagatctaatcagttgtacacctggtgcccctcgcttgcttcaatcatggttatttgatggcaaaatcgacctcttgtcgctgaaggagagagaaaagatgtgtgtctgattggtcctgggattttttgagctgtgccatttatggtactctttgcctatgcatccccttgttagattttttttaaattttatcttactgtttttataatttctattgggaagaggcttgtgaccagtaccaatcttgagtttctttttctgtccacaagtaaattaatatctgctctgaaatgtcatttatctactcacacattcttggggaaaaaaatcaaatgtcagtcctagcagatgttgcat

SEQ ID NO: 10567 - DNA, 6000 bp, Homo sapiens
gacaaagagtcaaactctgtagagtatttgaagagatttattctgagccaaatatgagtgaccaatggcccaagatacagccctcagaagatcctgagaatatgtgtccaaggtgcttggggtacagcttggtttcatacattttagggaagcatgaaacatcaatcaaacacatgtaagatgtacactggttcagtctggaaaggtgggacaactggaagcagggggtttccaggtcataggtagattagaagattttctgattggcaattggttgaaagagttaagttattgtctaaagacttaggaatgtctgggttaagataagggattgtggagaccaaggttttatcatacagatgaagcccccaggtagcaagcttcagagagaatagattgtaaaaatgtttcttatcagacttaaagagtctgttctatcagtatttctaaaagggaggaaggtacaatgaggcatgtctgaccctcccttcccatcatggcctgaactagtttttcaggttaactttggaatgcccttactgagaggatgaggccattcacatggtcagaaggtttagaattttatttttggtttacagctatttccagaagtttaatgatggagggaaaaggtttaattaatttgttaattaaattcttaagcatctttaaaattttttaaagtacctaaagctgtccccaacaccaaggagtctgtaaactaattgagaagataagctatagattaaaaaagtaactgaaaatgcaagacagtgggagattatttggcactttccatactcagccgtgtttccactccacacttttatccctctctaatttcattcactctcacagcttcaaagaccacctgtaacataggccctatgtactaatgatgactcctgaactgtgccttgggtcctgaccttcccgctgatctccaggttctcaaggtctatgcttcaaactgcaccctgaggacttccatctcaactattatcataccctgtggattctgtaactgagccagtgaccctttcagtaatggtgccagaaagtccagtttggggtcactctattgaaaatgcatatcttagctctaggactttaaggcaatgggtttcaaactgtttcctggagagctaggtgctgcctttggtttatcctatagatgtcagaatgggaaacacttgtatttataaaacccttatccctgactcactttctgtctttactctttgttttttctgtgactcatttctaagttatgctctttctactggtaacagctcctgggggaagcctgctcattctcttttctggccataggtctagataaggtttaggacccagaagagggcatagaagaaggttatacccattcctcaactgagaaatccatgcacttttctacaagataaggataatcatagctatctcaaaggaggttaagtggatgaaaggagataatgagtgcaaattatcttatggttttaaccaatatttattgaggtttcagtatgcaccaggcattgtgctaggcatagaagcctgcctaagagttccttacggacaaggaagtaaattattatagcaaagtgggaacaatgctacaataggagtaagatacatcctatgctaggggaagtgcagaaaaggggtaagcagcccagtgttgaggaagttagggcagacctcgtggaggagctgagaaggagtagcagttagccacttgaggggtgtcaggggaaggggcaggagcgggtgatgcaggcctgcagagaaaaagctcagtgggttgggaacagctatcagtgattcactatggctgacactaggaatgttaggtagaatgtggcaggagccagattgaaagtgtgccttttgggaggccgaggcaggcggatcacctaaggtcaggagtttaagaccagcctgaccaacatggtgaaacgtcatctctacaaaaatacaaaaattagccaggcatggtggtgcatgcctgtaattccagctactttggaggctgaggtgggagaaatgcttcaactcgggagggggaggttgcagagcaccgagattgcaccattgtactccagcctgggcgacacagcgagactccctctaaaaagaaaaaaaaaaaaaataaataaataaataaaaaaaaaaaaaaaaaaaaagaggtgccttaaaatacaaggatatttctattttatcctgaaggcaataagaaaccagtcatagccatggagtcactgccatagatttgtttcttagaaagatcccaccatgtgaatcctggatgcagctggggaaagtgggtgaatttctagagtctaatcagtgtttctcaacctttttttttcttattatcacctcctaaggagcctttttagacattattttcccaagcaccccaccaatccccatgaaacttgaataccccagaaatgctgtctatgtccttatgcactgtatgtgctttatgcataaaataaataactttcttgctccatgcacccccactcaacaaccaactttcaccttctgaggactgctaatgtgaagtccctctagactaagcccatgaaatacttgccccttccctccccaccactgccacgctccgtctccagctggtcatctaccagcatcctagctggattccctctccgtcactccagcacaggggttctcaacctctgcatttggggctggatatttcttagttgtgcaaggctgtcctgtgcattgtaggatactgagcagcatccctggcctctgcctttggatgctagtagcactacctcacccagttgtgacaaccaaaaatgtcttcagacattgccagcatcccctaattgaggcccactactttggtgctttagtccctagtttgtctactcccacaagcaatatgtgcaattacagtgactaatttttcctccccagagagatggcacccctgggctagagggatgctaggaaggaaaagtccttgtccttttggcatcctctcaccccacgagctacttctgtgtcttttctttatgtaacactgaactctccagctcaggcctccaggtcctaagttcataatctcattacaactaatcctgtttacggccattctcttggcagaacaatcttgtctggaccaaggctctttcctcaccacccaatgttcttgttgctccattgttcctggggactgtggcctggctgagtataagctttcattgatagggtttatcctgtttacagggagtctgcagaagggcctcatcaaatacttccatcccttccttcaataaatggctccctttgatctgtgcaaggcacaactttgtttatcagaagctgggcttcctctagctgatgatggggacatcctgtcccagaaaggctccccaaaataacaccttctgaatttcagaatattttcaggttcctctattttggaagcattttttttttttcttgcatgccatttcttatggcaagcaaagaaaggagctgattttgcattttgaagcccaaggtaacacaaagttgaacaggtcaccgccaaaaatgaggaaaggacagtgttgataataatataaacatttggaaccagaacaatatacaagattagggttgaccaggtgtgatcgtttttcatattgtcaatttaaaactggaagttatctaacaaggtgaaaaagaggtcatgggtgttagtcatctatatgacaggatggtagaagctagctgaattatgtggatgaatggtaagggcgattttacactgtccgagccaggtaaagagctctatttacagcaatggttctcaaagtgtggtctctagtccagcagcatgacctggaaatgttttagaaatgtaacttctcaagccccatcccagatagtgaattggaaactctggaggtggggcccaggcacctgtaagctcacaagccctttaagtgatgtgattctcatgcttgctaaagtttgagaacctctgatctgccccaataatcttcaaacttcggtgtacacaagaatcacataagaagctaaaatgcagattcccagatcccatacctaacgatgcagattcacttggtctagagtggacccaggaaagtttgcattgctaataagcagcccagggtgatttgggtgcaactggtccatgaatcaagcttcgaggagcattggcctatatataaaggagtggtacaaattgtccatattgctccagtcttattctaaagaggctccctccgtggctaagaatgagccagtatcacaattcatcttcccttcccagtcatctcatgaagcaggctgctaagattacctattgtgggccgggcgcggtggctcacgcctgtcatcccagcactttgggaggccgaggcaggtggatcacgaggtcaggagatcgagaccatcctggctaacacggtgaaaccccgtctctactgaaaaaatgcaaaaaaattagccgggcgcggtggcgggcgccttgtagtcccagctactcgggaggctgaggcaggagaatggcaggaacccgggaggcggagcttgcagtgagccgagatcgagccgctgcactccagcttgggagacagagcgagactctgtttcaaaaaaaaaaaaaaaaaaaaaaagacctattgtggttttcaggattactctaatactagaaggttagattggccccatggattcctttcacactgacatctgaaacacactgctgactcctaacctgggttggactcatgctgctggcctggaggcaaaagctttttatcccattactagttccttgaaccacaatccaagacacaatttggttttcccaagagttttgttttgcactgctgatgcattccagtcattgttgtgatgcatttccttctcctctttccctccagtccctgggcaatgccacacatgtatatatagcctcctagtgtgaacttactcaaatcctaaccctctctcccagaacgtgtctctgctgcaaggcaccgggccctttcgctctgcagaactgcacttgcaagaccattatcaactcctaatcccagctcagaaagggagcctctgcgactcattcatcgccctccaggtacagcactgctggggtttgcttccttccttcctggctttgtgtcccatgtccccttagacctgtcccccctttagatttcttttcactctgctttaataccagttgtgagggtctctcagggctctgaccttacctctttgtcctacaaaagtgtatttcttgtgtggtttcctgtgacctgtacttacccagactttctccagtcaatccttggcatcctacagagatggtcttcctcagtcttcagtctctgtaacgataccagcccttgtttagagacccagagtagaaatggtcactgtatacagttgtacagtttctgcaccgcacagacacctgaggaagagagcaagtggttaggaaaatccagcttgcacactgctcaccaagatgaatgcctgaagctgctctgtggaaacctagaggaaggtacattgtttcgctttttttccatgtcagatattgatagaatcacatataactacattagattatcagctaaaaccagattagtgtgttttattgtcatgtcattgtgtatgtgaacatgaagacttttagagtgcctgaaaatattttatgagaaatagttaaatagcttccctttttatttttcattactagaccttatttcttagagcagttttaggtttataaaaagccagagcacaaagtacagagagcttcatatacccctgcccaccctgtccaccccactcccagtctcccctgttagtaacatcttatgttagtgtggtacatttgttgcaattgatgaatcaatattaatagattagtatgaaccaaagttcatggtatacattactatgtatactatgtatactcttcgtgttgtgcattct

SEQ ID NO: 10568 - DNA, 6000 bp, Homo sapiens; identical to SEQ ID NO: 3428

SEQ ID NO: 10569 - DNA, 6000 bp, Homo sapiens
aaagcaagttgttattatctaatgtaaggcaattaaaaataaaatctggcttttactctctttcctgcaaaggttttctatctcttagatgtcttttcattgaaaaagacatatctcatgaccagtgtatgaacaccccattgaagattgccatctcctattaagggcatggaaataaactctgtaactaaaacagatgccttcgcccacagattctaaaatcagagggtattcataaaccgccctacaaattttcagagcacagtgggaaacaggaactgttaaaatctgaaactctactaaagtactttcttcctcttccggtaaaagaaaatatattactttctaggaagtttactattttaaaaaacatacaaaaaaatcagggttgggaattcacaactaaaatttgggttacatcagctcatcttaggagaaaagatatttatttacttacagatggaaagccatggaatgcctctctgactcctcttaaaactgtattggaattgtttcaagcagggagaaaaggctatttttttctgagaagacatgccatattacataaaatgtttcaaagttttacatattcttttgactacatggacacatgtacttactgatcctgatcccatataagctggcaagaaattcatacctataagtaataaattataggtagaattttctagattgaggctgaagttaaataattgcataaactttgagtaattatatcacagtgcaccattcaatttatgtagaaaaaaagctgctctcaattttcagttgataaaagagcagctgagaagagacgatgtggttgtgaaaagtagaaactaacaaagggtcagcactctaaaggcaggaaagcagctgaaaagctgttttgacagttgggtaaagatgaggggaaaaaagactgtaaatgagaggaagttgtgatgaaagggtagaataaagtgtttgaaaatggtaaagtgagagctttaattaacatggagagaaagagcaggaaagagagaagttatttagttaggtaggaaattgtttgtagagaaattttagtagtgtaataacataatttgtattttaatttgccaagggatgacattattggaagaatgatagttttattgttttaacattttagatataagaagctccatttgtctgaaatacaaattggtacaagtttcgattaatatgataataatatacattagacaaattggcaagcagggatttgcctttcattaaccttttgttataaccttaaaacaaacaaacaaaaagcaaaacaaaaaaaaacgacgcggtcgggcgcagtgtctcaagtctgtaattccaacactttgggaggccgaggtgggcggatcacttgaggtcaggagtttgagaccagcctggccaacatggtgaaactccgtctctattaaaaatacaaaaattagccgggcgtggtggcaagtgcctgtagtcccagctactcaggagactgaaacaggagaatcacttgaacctgggaggtggagggtgcagtgagccaatatcgtgccactgcactccagcctagacagcagagcgagactccgcctcaaaaaacaaaacaaaacaaaacaacgtaaaaaactagggtgagcgctgtgggtaatgcctgtaatcccagcacactgggaggccgaggcgggtggatcacctgaggccaggagttcgagaccagcctggccaacacggcgaaaacccatctctattaaaaatacaaacattagccaggcgtggcggcgcgcgcctacaatcccaactacttaggaggccgaggcacgtgaattgcttgaacctgggaggcagaggttgcagtgagccgagatcgcgccactgcactccagcctgggcaacagagcgagactcagtctcaaaaaaaagacttaatatttcaaacttcaagcaagatcataattttataatgtgaagatgaccagagtgtttgaatcagttacaaatgggtcttttttgttgttggtggtgttctttaatcttggactcctaacttgagcaagaaaatgtaaatacagaaagctgcaaaaccaatgttccttaattaggaaccatgtgagtagtttaacattacaaacagtttctaaaagtcacacgtggtatacattctaacgagttttagcttcttttatttaaactgcgttgatattgatctataactttcctaataatcacttcataggttggtaatcctatgttttggattttccaggtcacttcagattcaaatattttttcctaacgtcaaatggtgtgtctagattttggtctggaaaacagggtcactaaatttgtagactaacttgaaacagtattggcctttggcaatacgcagcaattctatttcttggccatgcttatcaagttaagtaaaataaaatcaaagttcactatatgatttacctaattaaaaaattgttttaacctaattactttaaaataatttaaaaactctgtagtaatttacaatgtaaaaagcactcataatatggtgtttatagacacacatagctagtaaacctatagacagctactcacccttgccatacagaaaatgcaaaacacacttaagagatattgtaattacatattatgtggtcaaaactaaagaagacgaaaatatgcttgtgttaatgaaaaaggatttggtgctctttcttatttttaatttttaaattttaatttaaattccacagactgaaacccatatactttttctctttcttgttttactggctggagccaagtgtcatggaactcatattcttgatgaagagaaactgagaggacacactggcatttgctatacgtgaactaagattgactcattttcctatgtcaaaactgctattttgcaaataaaattactatcctttataacattatttcgtttgcttattgctctgctctttattctttcgtgtttcaggtaaccactaacaaaaagtttaaaagtcgactatgtccagaatggcactctataattgaaaatttaggtgatttttccgaagtcctgttggaagcacatctaccagcagtgtgatcaggctctccctcccacatttccctgctagtcaggacaagagaagcccgggggtgctgctgcaatagcggtgggagtgggagataggctattacccgcttgacactgcacttttgctacgaatgattcactcaggtttggcacatttgttgcaaggaaatctcctcctcccgccgcttccttgttcgagctcctctcgggctgtctcctgtgctttggcctttaaggagaagtgagagcaggtgggcacacaggagctcgccgagtcctcctccccctgctccttccctaatttagcagtacttccggccgcgtgacatcatcccccgcacctcggtgacgtgagctgcgggtgacgtgtgtgcggagagaagcgcgctgacgttgctatttaaaggtcctcctgcggggaggatggagacacagcgcgagcacctggtgtggggcgcggaggaggctgtggcggtcgggagcggggccaagagccagaggaggagcagagcgcacggccagccagccgccagcctctaggggaggggggaaaagaaggacgaacggactgagggcctgccgccggcccagctccccacgagggccgctcggccccccaccatcagcctctccgccgccttgcggctgctgctttctcccgcggcccgctgctcgcaaggcccgtcgggctcccgggaccagtccgcgccccagcccccggccgcggctccgcggcggccaccgcctcccgtcccttcccgcgagcagagggagggaccgccctcgctccccgttctctccgcccccttcccgccccccgcagcccactctgccgccgcgctagcttcacgccggcggcgctgaccgggaaagcagcaccctcttctctgccagccggccggccggcggaggcggaggcagcggcaggcttcaggccgccggggctggcgctgctctgcccggcggtagccggaggcgggcgctgatggaagtgtgaagaggcggcggcggggcccggggaatgtgaggcggcgcgtggcggcggcgcggagcgtgagagacgaggagtaggggtgggggcgctggagcggcggctgcgcttcggcttcgagcccagctctcctggccccaacgcgggcttagcctcccgccttggctcgggcaggcgcccgtcgacccttcggcccctttcgcccgccctggagctgggggcagggtgccagtggaagcgtggggcttggctctgtgattcattcattctccgccgacgggagcctcagacccgctgtgctctgaagagaggagggaagagggggcagccgcgaatgaagggccgggcaccagccgggctccattgtgctcggcggcggggggcgggaaggggctgagggaggtgggatcgggtcccctcctccagctctccggcgtgcgctgcgcccccagcctgctgccagcctggaaatggctccgtttattctcttcgggagaatgaatcgatcctgcctagccttctcttcgtcctccccacctcttctctgctccgagtcttaggaggagaaacatttaaaaagacagattccaatgtggagtgccgtgcaggttgcgagctgccgggtttgcacttcgaggagattttcctgtgtagtttttttcctaatgtgagcgcagggaagccgtggcattactgcttttgggatttttattcacgtgcacgtcgcgtttggttgctcgctccacccccggagacctggtgtggtggagaaatttgaacccgcagccttagctccgaaaaggccgagttacctggctctccctgagtgtcgaggaggacatgagtgaaatgaccagcgaactcattttttataggactcggtgaagccggattctgcatttccctacttgtagactcattttgtggaatagagttgatcgctgtctcctccgcaaagcattttaactcgaataagcaaatgccgcctctgtttgaacgttttggtatttacaagagagaaatcattttacctaagagaactaattgaattggcagcatccttgaaatacctccggacaaggatctgggggtgggggtggaaaagcaactgcgaaatagcagacggagaaattcctttggaagttattccgtagcataagagctgaaacttcagagcaagttttcattgggcaaaatggggtaaggatttttgtgcttaacacagcttcgaatctgtttatgtatgtgtattattgagcggtggtggtgattgtgttttgtgttttcaaacaaacttgccaccttgctaagctggtcatactttaaagaaataggcatgctaaccttttaggttatttttgcatttttgtagagcggtaccagaggtcataatttaaaaacacatatatcgtttgtaacttgaatatggatttgtgagtaatgtttacaaagacaacgcattctacactttactggtcagactgctgcatcagtttgtaatcaaaatcacattattttagcttttgctgacggttatctttcaaagagaagtactgcattctctcagtacttttagataatcagttgcacaaaggaacgattttaatgagtggttagacaacagtccttgaaagtgatccagagtaaattgttgccctcaccgtgccctctgtcttgtccttgaatattcaaagctaaaatgtatagaattgatttactggggcgttaaaacgaaaatctgaaattcagtcttactgatgcggtcaccacggtacgggtgcatttcgtaggaaaaagctttttgtttaaggaacttgttcactccttttgtttttcgcttttaagctcagcccttcagtttgagttaacagtatcagatctacaccttccttcggacccagagccaactgagagtgca

SEQ ID NO: 10570 - DNA, 6000 bp, Homo sapiens
gaaaagagcttttaaaataaaactcattaaagcttagcaaatttcattacacaaaggattcttatttaagcacctttgactcctaaaaatggaccctggagacaagatggaacactgtgctcaatggctaaaatgttaggtgtctatcagctgtaagaagaaaatttgcagtgtgtccttaaagtacattcaaaaattatttctagcatttacatttgggagtttaaaaactgcacaaggatcttataaaaaaatcttttgcaaacatatttttatttgtgtatagttccaaaagacaaaacaagtgttttataatttgttgcaaattggaaacatatagcagtggtttgaaggttcctgttggagacctagtgatggacgattggataaaccagaacataatctataggcccattttgaccttttcaggaatagccttgacttgatgtcatcaacttggaactactttattctgtagtcatagagcagtctgagcacctagaaattttcttggcatttctgcttatcaacttaactctcagtctccaatctattggcaatgcggcatgttttactaatattggtgttgagttcttgaccctgcacttcagtagcctacactttaaagacgtctatagcatcatgtcttctgataatctaacagcagagtcttttatatctagacatggactaggatctggatctaattatctttaatttgttaatgttttaccatttacaaggcatgtgcacatccattaccttcaaaacaatcctgcatgattgtttgggccatagttcacccaaagtgccccaattactgggtggtagaattggagctaaacctgagactatatgcagtgtttattcaccattctatatttcctctcagtttaagaagagtcagtgaaatttaagaaatgacccatcttgtctgtgtttagaaatctctgtcaagaggaagactgagaagagcgtgaccgtgaggtagcacccccatgtggaaacatgaggaatgttcactctcaattatatatttcctccataaggaacttagtcagatatatgaattctcatattggagatgctggaattaaataggacttaaagaaacccacagttatatagcataattccatgaaagaccatcagtatgacagacattaggatctcagagctatttccagctggtaaattgatagacacctcaatggtcccaatgtgaacttttaaaacctgtgtcatctcttactctgtagaagatcctaaaattccatgagaaaagaaatgttactttttaaaaataaatattaaatttggaagtaaaagcagggaagttgtcttctaatactgcaagggctacttttaatatttttggatacttaattataaatacaaatgtcagggatagcttactgtgatgtatagaagcccatgtaaatagttgtacttcttgagagtgagtttctaacattcaccctttctcctacctgtggaagaatactaaaaggtgatgttttcctggtctgtggccagaaaaataaaggagtttggttttggttttgtttgtttgttttaatcttttgtttacctctgtagatggtaacagagaagaatgtatttgaagtgaaacaaataccagactctttcttgggaattaacatgaaacatcccgaatgctgcctctgctgagttagatactataaagagtgtggctgcattttccatgagatggtaagagctactcactcacaaagcaggatgaatagcgagacagcatagcatagattcatgcaaagcagtggatgatacaagaagagagatagaagtttatagtgaagagctggcagttgtgtgttgctaatactcagggctgaaccttcaagaaaaaaactcattctgagagttcagaagattacacacttctgaggcagaactgtgaacacattccatctctgtcctatatccttcattttctctgttacctttctttgctctaccttacttttctctcatctatttttacatgctccctttcttccttttaggacatctttttcccatcttttatttttcctttcccccatgtctccttctattcccatcctgttgtgtttatctgtccccgttaactgaccatgatgtggagctgaagagagacacgcatagtgattaagagccaaggttctagagtcagccaggaaactggctctgctatgtgatcgtgagcatcttattaggttggtgcaaaagtaattgcggttttgccttttaaaaaatttaaaacggatatctgggcaagatggccgaataggaacagctgtggtctgcagctcccagcgagaccaacgcagaaggcaggtgatttctacattttcaaatgaggtacccggttcatctcactgggacttgttagacggtgggtgaagcccacagagggcgagctgaagcagggtggggcgtcgcctcacccaggaagcacaaggggttggggaactccctcccctagtcaagggaagccatgagggaccatgccgtgaggaacagtgcattctggcccagatactatgcttttcccgtggtcttcacaacccacagatcaggaggttccctcaggtgcctacaccgccagggccctgggtttcaagcacaaaactaggcggccatttgggcagacactgtgctaactgcaggagttttttttttgttgttgttgtttgtttgtttttttcataccccagtgtctcctggaacaccagagagacagaactgtttactcccctggaaagggggctgaagccaagaagccaagttgtcttgctcagtggatcccacggagaccagtaagctaagatccactggcttgaaattcttgctgccagcacagcagtctgaagtcgatctgggaccctcaagcttagtgatggggagggacacccgccattgctgaggcttgagtacccctcacagtgtaaacaaagctgccaggaagttcggaatgggcagagcccaccgcagctcagcaaagctactgtagccagactgccgctctagattcctcctctctgggcagggcatctttgaaagaaaggcaccagccctagtcaggggcttatagataaaactgacacctctccaggtcagagcacctgggggaaggggcgactgtgggagcagcttaagcagacttaaaatgttcctgcctgccagctctgaagagatgagaggatctcccagcaatgcgctcaagctctgccaagggacagtctgcttccttaagtgggtccttgacccccgtgcctcctgactgggagacacctcccatcacaggtcgacagacgcctcatacaggagagctccagctggcatctggcaggtgcccctctgggatgaagattccagaggaaggaacaggcagcaatctttgctgttctgcagcctctgctggtgatacccaggcaaacagggtggacccccagcaaactccagcagacctgcagaagaggagcctgactgttagaagaaaactaacaaatagaaagcaatagcatcaacatcaacaaaaaggatgaccacgcaaaaactccatccgaagtcaccaacagcaaagaccaaaggtagataagtccatgaagatgaggaaaaaccagtgcaaaaaggctgaaaattccaaaaaccagaatgcctcttctcctccaaaggatcacaactcctcaccagcaagagaacaaactgaacggaaaatgagtttaacgaatagtaggcttcagaaggtgggtaataacaaactcctctgaactaaaggagcatgttctaacccaatgcaaggaggctaagaaccttgataaaaggttagaggaattgctaactagaaaaaccagtttagagaagaacataaatgacctgacggagctgaaaaacacaccacaagaacttcgtgaggcatacacaagtatcaatcccaaaaccaatcaagcagaagaaaggatatcagagattgaagatcaacttaatgaaaaaaaagtgaagaaaagattagagaaaaaagaatgaaaaggaatgaacaaagcctccaagaaatatgggactatgtgaaaagaccaaacctacatttgattggtgtacctgaaggtgacatggaaaatgcaaccaagttggaaaatacacttcgggatattgggagaacttccccaacctagcaaggcaggccaatattcaaattcaggaaatacaaagaacaccacaaagatactcctcgagaagagcaaccccaagacacataattgtcagattcaccaaggttgaaatgaaggaaaaaatgttaagggcagccagagagaaagatcgggttacccacaaaggtaagcctatcagactaacagtggacctctctgcagaagccctacaagccagaagagagtgggggccaatattcaacactcttaaagaaaagaattttcaatccagaatttcatatccagccaaacttagcttcataagtgaagaagaaataaaatcctttacagacaagcaaatgctgagggattttgtcaccaccaggtctgccttacatgagctcctgaaggaagcactaaatatggaaaggaaaaaccagaaccggccactgcaaaaacaaaccaaaatgtaaagcccattgacactataaggaaactgtatcagctaatgggcaaaataaccagctagcatcataatgcaggatcaaattcacacaaaacaatattagccttaaatgtaacaggctaaatgccccaattaaaagacacagattggcaaattggatcaagattcaagacccatcagtgtgctgtatttaggagacttatctcaaaagcaaagacacacacaggctcaaaataaagggatggaggaagatttaccaagcaaatgaaaagcaaaaaaaaaaaaaaaaaaaaaaaaaaaaaaaaaagcaggggtcacaaccctactctctgataaaacagactttaagtggatgtgtcaacttcctctttttccagctggaaccatggagtgtgtataagagaagaagagaaggttcctgctgtgccagaaaccctcaagaaaaagtgaaggaattttgcagagctgaagatcaagagcctgagaaagaagtttgcccaaaagatgctttgaaagggaaggaggaagcttctatgaaaaaatgaagcactatcacaaggaatataggcagatgtacagaactgaaatttgaatggcgaggatgacaagaaaagctggccacttctgtgttcctgaagaacccaaattggcatttgtcatcaggatcagaggtatcaatggtgtgagccaaaaggtctgaaagctgttgcagcttctttgccttcatcaaatcctcagtggaacctttgtgaagctcaagaggcttcagttaacatgctgaggattgtaaagccatatattgcatgggggttcccaaatctaaagttagtaaatgaactaatctacaagcatggttatagcaaaatcaataagaagcaaattgcttggacagataatgctttgattgctcgatctcttggtaaatatggcatcatctgcatggaggatctgattcatgagatctgtactgttggaaaatgcttcacagaagcaaataacttcctgtgatccttcaaagtatcttctccacgagccagaatgaagaaacagagcacccattttgtagaaggtggagatgcaacagggaggaccagatcaacaggcttattagaagaatgatctaagttgcctaccatgattatttttctaagctggtcagttaataaacaggacctgctctcaaattgaaaaaaaaaaaatagatgttaaactaacaaagatcgaaaagacaaagtagggcattacataatggtaaggggatcaatgcaataagaagagctaactatcctaaatgtgtgtgtgtgtgtgtatatatgtatatgtatgtatgtatatatatatatgcacccaatacaggag

SEQ ID NO: 10571 - DNA, 6000 bp, Homo sapiens
atattaaaggaaaagaataaagttggaagactgatgctaccctatttcaggacttactataaagcttcagcagtcaagagagtgtggtattggtgaaagaatagacaaatagatcaatggaagacaatagaaagcacaggatagcccacccaaatatatttaaccttttgtttctttgacaaagaagcaaagtcaatacaatggagagaagacagctttttcaacaaatggtgctgaaacaattagacattgacatgataaaaaaataataatccagacacaaactttgcatgattcacaaaacttaactcaaaatagattatagacctaaacagaaaatgataaaatgcctaaaaggtaacatatcttaaaaatctagtttatcttaggtttagattttaaatacaacatcaaaggaatcatcaataaaataattaatatgttggacttcattaaaattaaaaccctctgttctgtgaaagaaactgtcaagagaatgaaaagacaagccacaaactgagagaaaatattttcaaaaagagatgtgataaagaactgttatccacaatatagaaagaactcttaaaactcaagagtaagaaaatgaacctgattaaaaacctgagcaaaagttctgaacagacaccttaccatagaagataaacatgtgtaaattgctcaacatcatataatatcagggaattgcaaattaaaacaacagtaagatacaactactacacatctgatataatggtcaaaatctaaaccaatacaacagcaaatgttggcaaggatatgaaacaacaaggactctcattcattgctgatgggaatgcaaaatggtacagccaccttggaagtcactttggcagtgtctttcaaaactagacatattcttaccatataatccaacaatcttatttatttctacttacccaactgggttgaaagctttacatctacacagaaaactgtacacagatgtttacagcagccttattcataattgcccaaacttgaaagcaataaagatgtccttcagtaagtgagtggataaactttgatatatccatataatgaattttatttagtgctaaaataaaatggactttcaagccatgaaaaaaaatttgtttttcaagccatgaaaataatggagcatattattaagttaaagaatccaatcagaaaaagctacatactctatgattccaactatatgacacttgaaaaggcaacactgtggagacagtaaaaacattagggaagtcagagcctggggtgaccgggagtgagaaagaagcatgaataatcagattacagaggatgtttagggcagtgacactaatttgtattatactataatggtgaatatatgttcagtatatatttggcaaaacccataaaatgtgcaacaccaagaatgaatcctaatatgacctatgtactgtaggtgataatgatatgtacatgtagtttcattgaatgtaaaaaaagaaatgtactgctctgatgaggaatgttgatagggagactgagtatggggagaaggtagagttatatgggaactctctattttctgttcaattttgccataaacctaaatgttttctaaaaaaaaaaaagtctattaaaaatgtcatgggtcattaaaaactccaccatgagactgcaagtatctattcatttcttgccagctagatttgagagtacagccagcaatgaaaacatgaatttacattaagtcaaaggataaagtatcattttaaaaccagctgccattactcacattatttatttataggctattgtataattgtagaattgtgctgaataaagacaaatatattctctttattgaagaacttacaatccaaagatcaaatgaaaatttagaaacaatcttatttgctcaggagcatcaaactaagcattctaatagaagaagttaattccaaaagacttctttatagtcttttggtgctcaggaacatcaaactaagcattctaatagaagttaattccaaaagactttttatccaatatttatagttcttgcacctatttacatattgagaaaaaaccatgctgtcctcacttttgtctaagtattggcctgtatggcttctttttaattggcaaattataatggctatatatttaacgaatctaacaatattaaacaaatggcattcaattacactccaaacactaaattgctttaatttgggaagaagaattcctggagtctcgctgaacagttatcagtcattcagaattgctcgccttaatataaaaagttctgtacttaaaaaattcagaaacagcagcattatacaattggagagttcacttatttttcttctggacatttaaatttgtcttatgtgttcctataactagttcttgattgctttcgtttcgctctttttttttttttttttcttttctttttttgtttgtttgtttgttttttcctgtttgggctaggtaagtagtttcccctaatgtaatttaaagcttaatatagattatactcactttcctcttgaagattttcttgtggctttctcattacagaagactgttccacactctggagccatagaatattatgagtacaccgaaacttttggaccagcactctcccttaccactttcccttctaacagtactgagccacttcaaagttgccccaaagcaccagagttttattactctctggagttgcgcatactcctttttccacctgcaatgttctatcctccctctgcttggcttacttccttgtcagctttgaaaacaggagtctgtgtgtccccttcacccggaaactcatcttccgggcttcaaaaggcttaaacaccccatctgcttcaacccaggagcttactcagataccatatatattttaaatgatgtttctgattcatgttgccatactgtaaattattatttttaaaagatgccccctttgagtgagtaggatttgtgtctgactagatgctaagttttattcatctttgtgttcccatctccgcacacattgcctgccccataaccattgcttaagaaataatgagtttaatgaaacgatgcatattactctatccctgacagagagtgatgttttacctataatctaaaatatagttgtctactgtttaaaaatcaaagtttatccttgagaatttagcatcctaaccatgcatccctctcccacccgacccctgccctcagccccggatcccttttaacttaaataagaagctgttttattctggcagtttttgccagaagaaaagtgagtctaacagaagtcaatctaacagaaatgcattaatgcaggctggatttgcctagacatcaataaactcgaaaggctccctgtgggccacttgtagtgtcaataaacgttcgtaattacttgctccttggagcatttttatacccgaccccgttcgctgtgctgcaaagaggaaattcaagatctcggaagttcttaacttcttaaactctagaggaagtatggtaaacactggcgggaaccttgggtttttaagcaaagatgctggctgttttcgttgctattttaagctgtcaggcgacaagcaactcagaattccccttcttacttccggcgggagggaagattggaattgggcctcatcatttctgagcgtgaaaaaccgctgaagctactgttcaacctgaaggaacacggaattcaactggagagaaaccctggcgaccagggagctggggaccggcgcatatagatgagggaaatcctggcttccagacactgtctcatgctagaggtgcctcccgacctaccagccaacagtaaagaccggaaccaaggcgtggtactagcagagtagcaagcatctctcccaatgagggcaacgactggaggatggtggagaggtactcagagtgaacaatcgaacacagaactcttgaaaagtgtccctgccacccaatacaagtacgaaaaatggtgggacggaggagaggtgacaatcagaggctatatatataattgagacttttagagaggactttgctcttccttcctcccctcccttttctttcctttctttctttccttccttccttggtatccgaatgtgtgtgggtgtacttgcgtttaaaagagaggtccatggtagctgcttttttttcagaactctgtttctccgcaatgaagtttaagtgggattggagtttccttgacttctgcgtgaggagtttccaaatggcaatgaaagggaggcgcataaatatccataaagttcctaatgacacctctatcatcacttgtttcctgcagaatcctgagccagggtcgtcgtccaccacccatgcagagtgggcccatcggctaacaggttcatgtgtgtatttgcactttccagattgagtaataaaagtcttcttccttccaccgccgtccccacccccgcaccccgtttcactccaccttggagggcgtgtttttgcgtgtgagggtgtgtgtttagcaaaagcgattgaaagaaggtactcttcttgcaatccacccctagctctacctgaagcattcctctggcgggacgcttttgtaatctgtccccaggcgaggtgccctctcacctagatgcggatagactatcttggagctcccaggtccagagagctgatgctttgatgtcccaggagagtgtgtgtgattctgcgtgtacgtgtgtgtgcatatgtatgtatgtgtgtatgtatgtatatgtgtatgtgcgcgagctcgcaggcgcgtagcactgtgagcttcctctcccggcacagagcaggcagagccggggacgttactctccaagcagcctccgccccctcagcctggtgattggctttgcgcagcgtttatctcctagcaagagggaagggccagtgacgcccccgaacccagctgcagaagctgccgccacctccaatgcacaaggtgtctcatctgaaaagaaacctgagccccagggaggcggcgcggagcgaccctggcagagctggcgcaaacagggcgagaggtcgctgggcagcgttcgaggaccagagggagctcggccacagaagaccccagtgatctgatcccgggatcccggctccaagctctcctcgcattttacagatttcacccccgcgactatctccccaaaacggagcctttatatcaagagaaggtgcgggagctggggcaaccaggactttctcgggcacccaagatgcgctccattaggaagaggtggacgatctgcacaataagtctgctcctgatcttttataagacaaaagaaatagcaagaactgaggagcaccaggagacgcaactcatcgggtaaatgcaaagcttcatttcaggatatgacaaaaagtcaagccataaatgaaatgtgaatatagagggtagagtgatggttaggatagcatgtgtgtttgtttgagcttgcgcgtggttagtgtcatgaattaaataacaaaggctgttgttgagatgtgcgtgcttctctaagctgttcccagtatgagttcaacttgctctgtgtggttgtggtgacagttgtgttggccctgggtgctctctcgccaaaggagaagtcactgcagaagtgtcaacaaagaacgtgtgtccttgtccttttaatctgtgggcagaactcaagagaaatgtctttattcaccaaacggttgcctgttttcaatgtcctatcacctaaggagatactggagatagatggtttctcgaagggctgaagttaaagcttagaaagcaggaaataggtatactctgtttctctactttttttttttctatttgacgttggatagattaatgtgttataatttgaattagaaactccagtaccactaaggatacttccttatttgttcttctacggctaaaacgcatgggcgtcatggttacagttttagaaagaaactgggtactgtagcttcacacagactata

SEQ ID NO: 10572 - DNA, 6000 bp, Homo sapiens
ttcttttgagaaatttcctgcaaaggagagcagaagaatggggctataactggaagaaggaattatggtcctgaaattttaaaagtttttttcttaaggtaggagaaacaaagcctgtttgaaaattaatgggaataattcaacagagcaaaaaatgatgataggagtgagagggtgaattgttggagctctgtccttgaccagtgaaggatccagtatacagtagagggattggtcgaagagctggaagtttatggtaacagcagggaaatcaggttttatggtatgctgtgagcacatgtgactatgggagcctacagaagtgactttctaattgtttcatatttctcagtaaagtaggaaggccaattgagagaggatggggaaggagacaatggaaagagaaggtatgaaatagttgcgaaggagagggactgctcatctttttctgtaaagggccagataacaaatgttttaaatttcgtgggctatcatgtctctgttgcagctactcttctctgccattgtagtgtgaaaacagccatggacactacataagcgagtttggctgcagtgtgctggcccctctaggacagttggagagtaaatggactgtcaggcagtgttaaaggcatgcttgagatttgcgttcatgaatttatagtgaaaccagttcttgtttatgtttttctccagccatactcagctacatgggtatagctacagagtaggtggagagttgtgtcaaggttgtgatttccagcaagaactatgaagtgagggtgggactgtggagtggttaatgcttgacaatggaatttaacctgagtaaggtgggaagtggtggtggaagaactctgaatcaggataatagcgggaatactccatcatcatctacaatgagcaaaaaagcagggtggggagtgcactacaaagataaaaggtgatggtggctgagtgggatgcttgatacaagattatggagggactgcagtattggtactaacagggatcctgggagtcagtgccatatgtagggtggaatataagggttattggaggggaggaactaagaggtcaggatattagaagatcatcacatatgtctacatggatattaaaatcatcaataattaaaataggagtagtaggtcaggtgcagtgctcacacctgtaatcacagcacttccagaggtcaaggtgggtggattgcttgagctcaggtgtttgagaccagcctgagtaacatggtgaaacccagtctctacaaaaaaaaaaaaacacaaaaattagccagatgtggtgatgcgtaccagtagtcccagctactcaggaggctgagatgggaggatcacctgagcctggaggttgaggctgcagtgagctgagatggcatcactgcattccagcctgggtgacagagtgagaccctgtctctaaataaataaataataggagtagtgttagaaaggaacattaagttaggagctaaaatcttcaagaactaaggcaaagtagcccaagagtcagggatgacagggaaagggaaggctactcagtgatagaatctgatgacatgagattctgaaagtggcaatgaagaacaaaaacaacacctaccagatccatttgtactagggtcatgagaggaaagaaacagccaccacttgagaaagcagtgtcctcagggcacagccagctttctctaagagcaagaaggtaaaggaaacattcggaggaatggatgaggatatagattttgccagtgatgggtcttgagttccagagggactcagattttagaaattggagaaaggtttttgtgttttagagctctgtggtagttagacatgggagttgtgaggttgcctgaccatggggaagtaaaatcccaagacagttctccagcagcactgatgccccagaagtggtatgttccccatttctccctcacagacctctcttctctggactcctatttttgggcatacaaatccagtctacttgaatatgttttaggtattttttaacttgtagccttaacctcctcccactttaggattgccagctttttttttttttttttttttttgaaacagagtctcactctgttgcccaggctggagtgcagtagcatgatctcagctcactgcagcctccaccttccaggttcaagggattctgctgcctcagcctcccaagtagctgtgattacaggtgtgggccaccacgcccagctgatacttgtatttttagtagagacaccgttatgccatgttggccaggctggtttcaaactcctggcctcaagtgatccacccacctcggcctctcaaaatgctgggattacaggcatgagccaccatgcccagccaggattaccagcttatttttaagagctttcttttcttctcccttcccttagcctaatcagcaacctgtggtgatgtcatttctgtctacttcacccacatttcttagcctcttggttctcttagatatcaatacttaaaatccaatcttactttgttatgacacattcctaaataggggcaagagaattaaaataagttaggaggaatttacatgctgccacattttagacttttctcaaagcttttggattaactaggaatttctacaaagggttagttaagggaaggactacattttctcctttgctgtgaacttggttcagtaattttaactgagcaaagggagagcaactatcaggcagctggtggacaagaagggactccttggctctcatcactaaggctctggctccatcaagaacagctgcagattgtaaaatctcacagtgggccctggaggcttctagacaacccctttcccctccatcttacacactgtactggttctcatagcacattccctgccacttggtaattagaaagtggaaggcttggtctcctgcagaagtaagaaaatatatttttcttttttttctatagagatgggctctcactgtgttttggccagggtgatctcaaactcctggcttcaaggaatactcctacctcagcctctcaaagctctgggattatagacatgagccaccacacctggacagaatgttttcttgatgaatgtagtgtcttgtcaccaactcaaagacttagagcaaactcttctcatcataggagagaatggtggcacaataagagtataaatacagattttaaaaacaatttagtataacaacaatttatatagcattcatgttgcattaggtactttaactagagatgggcttttaaaatttttttaaaatagaggtggggggtgggggtctcaccattcatattggccaggctggtctcaaattcctggcttcaagcgatcttcccacctcagcctcccaaagtgctgcgattacaggcatgagtcattatgcctggccgaatttaaagtatatggaagaggccgggcatggtggcttacgtctgtaatcccagcactttgggaggccaaggcgggcagatcacgaggtcaggaaattgagaccatcctggctaacacagtgaaaccccatctctactaaaaatacaaaaaaaaattagctgggcgtggtggtgagtgcatgtagtcccagctactcgggaggctgaggcaggagaatggcatgaacccgggaggcagagcctgtagtgagccgagatcgcgccactgcactccaggctgggtgacagagcgagactccgtctcaaaaaataaataagtaaataaataaagtatatgaaagcacataggttatatggaaatactatgtatgccattctatttaagggcttgagcactcacagattttggtatctgtagggttcctggaactaatctcctctcccccaccgcccccccagcccccccccccaaacacatatatcaagggatgactgtatttctagtgctgggaatgaggacttctctgatttgtcgccatgggataaatatgatgacctagttgtcatcagattgataatatattgataagtgaaatcttacaggcaagcacacagatacaaatagaatttgaacactactcttaaggaatctctgcttctttcaatgcttaaaggagaatagagggcagacagtttcggtgacactgtcacaacaaggggctaggctagatgaccttcaagtattttgctcaagtatttaggatttgtgctctaagaggtaccttctccatttcctggaaaccctcttagcccagaccacaaaccccaacatgatcgcacctgaacatgagtcatccaagttttgttatctagtagctacattaggcacaaagcttgcaagcttgcattccaaagaaagagctttgatatatttttctttccctcctaacaaacaaacagcgaagaaagctaccgtgaatttactgggtgaagaaaagaagagcacctaaaccagactggatggaaacttcctgccctctctgtaccttcctactggagcttgatgttatattagggactgtggtataattattttaataatgttgccttggaaacatttttgagatattaaagattggaatgtgttgtaagtttctttgcttacttttactgtctatatatatagggagcactttaaacttaatgcagtgggcagtgtccacgtttttggaaaatgtattttgcctctgggtaggaaaagatgtatgttgctatcctgcaggaaatataaacttaaaataaaattatataccccacaggctgtgtactttactgggctctccctgcacgcattttctctgtagttacatttaggataatctttatggttctacttcctgtaatgtacaattttatataattctgaaatgtttttaatgtatttgtgcacatgtacatatggaaatgttactgtctgactacaacatgcatcatgctcatggggagggagcaggggaaggttgtatgtgtcatttataacttctgtacagtaagaccacctgccaaaagctggaggaaccattgtgctggtgtggtctactaaataatactttaggaaatacgtgattaatatgcaagtgaacaaagtgagaaatgaaatcgaatggagattggcctggttgtttccgtagtatatggcatatgaataccaggatagctttataaagcagttagttagttagttactcactctagtgataaatcgggaaatttacacacacacacacacacacacacacacacacacacacacagagtaacctgtaactctcaattccctgaaaaactagtaatactgtcttatctgctataaactttacatatttgtctattgtcaagatgctacaatggaaaccatttctggttttatcttcaaagcggagaaacatgttgatttagtcttctttcccaatcttcttttttaaaccagtttaaggaacttctgaagatttgtccacctctgattacatgtatgttcttgtttgtatcattagcaacaacatgctaatgacgacacctagctctaagagcaattctgggagaatgaaaggaagtataaagtaacccataatctgcttggcaatagttaagtcaatctatcttcagtttttctctggcctttaaggtcaaacacaagaggcttccctagtttacaagtcagagtcacttgtagtccatttaaatgccctcatccgtattctttgtgttgataagctgcacatgactacatagtaagtacagaacagtaaagttaaaacggatgtctccattgatctgccaaatcgttatagagagcaatttgtctggactagaaaatctgagttttacaccatactgttaagagtccttttgaattaaactcgactaaaacaagtgtataactaaactaacaagattaaatatccagccagtacagtattttttaaggcaaataaagatgattagctcaccttgagataacaatcaggtaagatcataacaatgtctcatgatgtaaaaaatattaaagatatca

SEQ ID NO: 10573 - DNA, 6000 bp, Homo sapiens
ctgtccagcttaacaaaagagtgttacagcagtgaagtcctcttcaatccccacccattgcatccctctaccctcccctcaaaaaggaactgtaccttgatgttataaaagtcacttccgaaggccttttctgcatctacggagataatcatgtggtttttgtctttggttctgtttatatgctggattacgtttattgatttgcatgtgttgaaccagccttgcatcccagggatgaagcccacttgatcatggtggataaactttttgatatgctgctggatttggtttgccagtattttattgaggatatttgcattgatgttcatcagggatattcgtctaaaattctctctttttgttgtgtctctgccaggctttggtatcaggatgatgctggcctcataaaatgagtcagggaggattccctatttaacaaatggtgctgggaaaactggctagccatatgtagaaagctgaaattggatcccttccttacaccttatacaaaaattaattcaagatggattaaagacttaaatgttagacctaaaaccataaaaaccctagaagaaaacctaggcaataccattcaggatataggcatgggcaagaacttcatgtctaaaacatcaaaagcaatggcaacaaaagacaaaattgacaaatgggatctaattaaactaaagagcttctgcacagcaaaagaaactaccatcagagtgaacaggcaacctacagaatgggagaaaatttttgcaatctactcatctgacaaagggctaatatccagaatctacaaagaacacaaacaaatttacaagaaaaaaacaaacaaccccatcaacaagtgggcgaaggatatgaagagacacttctcaaaagaagacattgatgcagccaatagacacatgaaaaatgctcattatcactggccatcagagaaatgcaaatcaaaaccacaatgagataccatctcacaccagttagaatgacgatcattaaaaagtcaggaaacaacaggtgctggagaggatgtggagaaacaggaacacttttacactgttggtgggacagtaaactacttcaacccttgtggaagtcagtgtggcgattcctcagggatctagaactagaaataccatttgacccagccatcccattactgcatatatacccaaaggactataaatcatgctgctataaagacacatgcacatgtatgtttattgcggcactactcacaatagcaaagacttggaaccaaccgaaatgtccaacaatgatagactggattaagacaatgtggcacatatacaccatggaatactatgcaaccataaaaaaggatgagttcatgtcctttgtagggacatggatgaagttggaaactatcattcttagcaaactatcgcaaggactaaaaaccaaacaccgcatgttctcactcacagatgagaattgaacaatgagaacacttggacagaggaaggggaacatcacacactggggcctgttgtggggttgggggagtggggagggatagcattaggagacatacctaatgtaaatgaggagttaatgggtgcagtacaccaacatggcacatgtatacatgtgtaacaaacctgcacattgtgcacatgtaccctagaacttaaagtataataaaaaaaattatatatatatatgtatatatataaagtcacttccttgttttggtcttagttatgacacatatgtaggtatccctaaacatattgtgattttccttttgtaatttgctttgttagtctgatcatgagttgagattcttccatgatggtacatgtagctgttcaaatattttcacttctatatgtattccactgtataaatataccacaagttatttatcttttccattgttgatggacatttggattattaacagtttattttctttgctatttcagtgatgccatgaaacttcttaaacatatctccctatacatgtattagactttttccaagatattaatttatactcaggagtgaagatgttaggtcataaggcacataggtaacactgagctgtttttaaatagtggttgtacctttttacacttaattcatatctcatagcttcatcagctttgatgtcaacagactaaattctgactccctggggagtatggcacttctatgtatgtgctgatcaggttcggtatcctgaatgtttatttgttgtttcctctatgaaatgtctgtttatcattttattaatttgtctattaggatatttacacttttcttattgacttgtaagattcttcatatattttggatactgattttttatgttattaataacttctcctactttatggtgtgtctttcactgtttttatggagtttttaatgggcatattaattttaatgtagttaaatttatcattttcctttatagttttcttagtttattattttttattttatttatttatttatttattttttgagatggagtcttgctctgtcatccaggctggagtgcagtggcatggtttcggctcactgcaacctccgcctcctgggttcaagcgattcacctgcctcagcctcccaagtagctgggactacaggcgcgtgccaccacgcccagctaattttttgtatttttagtagagacggggtttcaccgtgttagccaggatggtctagatctcctgacctagtgatccacccactttggcctcccaaagtgttggaattacaggtgtgagccaccgtgcccagccagtttacttagtttatacttacgatgcactaacaatcattgtacttgatgatagtcctgtgcccatttaatatcctgagttcattcccatggttatattatttatccttctaatgatacatttttgttacttttaaatcatctttcctactaaagccattactctattacacggctattgaagcctttttaaaaaatcgattcctaattcgggattatagtctatttttctgtttcttaaggttgctaacgtccagacacatgggtactattatatttcagaggagatatttttaaataataaataataaaaagagggaatctttcattgctttgtcaaggagaattcatgcatttcataatcccacagatcaaatacaataagtcagaatcttacttgtatttggtagaaaaatattcattcatctttgacatccgggctttctttttctgctgccttgtttcaggattaaagtctgctacctgtggtccagggtttcgaaatgccaagcattttaactgccgctctatttgttgctattaaacaaataaatgtattaatagtaagaaccagatagttttatctgttttacatttccccaaaatgaactttctgtaactttcaccataaaggcatgaaagtatatatgttttacacaaagacataaacgatttaatctaattaagtttcaaaagatggtgtacattttctcaagttgggccattctttctgaataaagaaatagtataacactcataaaataaaaatgtaaaaaacaatcaaggggaatagaagaattctttttaaaaccgcaaaacgccactcagctttccaaatctgatggggatgcacatcagaattagcatttgatgtgggtaaggatgaaggagtagaggcccttcctcggctgttagctaaagaagcccatgtagtgtctcaaaccacagtgagaacccaaagtagatccggcactccccttcagtgccctgggatgcatttcggagctactccctacccgggactggcctccacgcggggggtctccaattcagaactcagccacctgaaggatcgactttcagtcaaagccagattggaacaagagaaatattgctaggatgactttctagggcatacggggacattttcaaaagtctctggaggttttttttttttcctttcttttctttttttttttgagatagggtctcgctctgtcacccaggctgcagtgctatggcatgatcatggcttactgcagcctcaatccccggggctcaagtgatcctcccacctcagcctcccatgtaggtgggactgcaggcacgcaccaccatgcttggctaatttttgtgtacatatgcagtagagatggggtttcaccatgttgcccaggctggccttgaattcctgggctccaaggatccaccatctgccttgggctcccaaagttctgggattacaggtgtgagccactgtaattagaaattagatggggcctgagctgaaagacaattagaaattaaatggggcctgagctggaagacaaacaacaaaatgcttcaatcgaatattgtactgataacttattgtgaacatgtagcacatgtcatgagggaagaaaatgctcttttgaaggattgtagaagaaaataatctcagaagcacaaaaacatataggctgacatatacatgaaataccccacctggaaacaaaagggaagctttcaatgtaggaatttcaatgtaacaaattagtaacagaatgtcatggacttttctgcagtttatttagtttaataagagtctagtaagtctaaaataatataatgtttcttttaaatttcatcttggtgtatatggttgtttcataaacttaaccttaaactgttctgcattagatatggttatgacatatacatacaacttagtacgaagcgattactattctaagtagcacagcaagaggttaagaacagagacccagggtcacctgcctgtgctcaagccttggctctgccacgtactagtggtgggccttgagcaaattgctacatctctaggccccagtttctctctttgtaaaatggagttaacaatagtatggtgtgataaggattagatgagttaatacatacagttttagagccataacgtgacataataataacaaaataaaggttcattaaataaaaacatttgtagcttttttgtccgacatctttgcaaggctgcggtgtctgctgctactctccgagcttcgcaatgccgcccaaggacgacgagaagaaggacgctggaaagtcagccaagaaaaacaaagacccagtgaacaaatccgggggcaaggccaaaaagaagaagtggtccaaaggcaaagttcgggacaagctcaataacttagtcttgtttgacaaagctacctatgacaaactctgtaaggaagttcccaactataaacttataaccccagctgtggtctctgagagactgaagattcgaggctccctggccagggcagcccttcaggagctccttagtaaaggacttatcaaactggtttcaaagcacagagctcaagtaatttacaccagaaataccaagggtggagatgctccagctgctggtgaagatgcatgaataggtccaaccagctgtacatttggaaaaataaaactttattaaatcaaaaaataaaaataaaaataaaaacgtttgtatatattctccacaaaaagcagaattttattgtacagaacactgggctaaaaatcagggtacacaggaggtggagaggagatgtgtgaggcgagagcagcccgcagtgagcagtggggaggagggaaagctctatcagcctgggcggcagagctcctccctgtgaggtcctgcctgggcccaccttcccacccacatccatgggcatctcagagatcctcgagggggcactccccagtagcatggaatcatagaatctgtgtgccataccagttgtttctgtccaatttgacagttcttctcaggaaaactatgatctgtgtgtctctcttgaatggaattgtttttctctgattgttcattcatctctgatcacttaaaaagtaattggaaaaagtaaaacatattaatatcatctatctccagtaactatatctggtgattcttttctactctccctacacgtctcactttattcaaaaccagactgtatctgtactcc

SEQ ID NO: 10574 - DNA, 6000 bp, Homo sapiens; identical to SEQ ID NO: 1157

SEQ ID NO: 10575 - DNA, 6000 bp, Homo sapiens
ctgaaacttccccaacagcaacaactgccggagtgcacatgtatccaaaactagaaggatatgtcccaaaatgtgtaaggtgcatccaaagaaacactgcttaccattgttagtgtaatcagaatccccttctactgctttctcagttgtgtttactaacaagataacaaaaggactttaaaaatcaaaatcagctggcatggtggttgacacctgtaatcccagaaactttgggaggccaaggtgagaggatctcttgaagccaagagttcgagaccagcctaggcaacatagtgagaccctgtctccacgaaaaaaatttttttaattagctgggtatggtggcatgtgcttgtagtcctagctactctggaggatcacttgaaccaggagttcaaggttacagtgagctatgatcgtgcctctgcactccagcctgggtgaaagagtgaagacactgtctttttaaaaaaaaacaaaaaaaacacaacaacaaaataaaatcaacagaaggaagggatggagacaaggatccaggcagaaatggagattctggtagtctaatgtagacactctactattgaaagattcccttctctttcaaaaaaagacaagctagtaaaacccacttactctaatacaagtctggctacgacataagcctaagtatgtggttgccagttaacaccttaaaaggttcttggcagaggacataagacacacaacatctaggacctccaccctaaaaatggctttttttttttttttttttttttttaaagacggagtctcactctgtcacccaggctgccacctggttcaagcgattctcctgcctccgcttcctgagtagctaggattacaggctcctgtcaccgtgcccagctgatttttgtatgttcggtagagacgggatttcaccaccttggccaggctggtcttgaactcctgacctcgtgctccacccacttcagcctcctaaagtgctgggattacaggctaccactgtgcctggccagctatcatttttttaaaagcagggattgagactgccagcaacaaggtttattttaacatgctcctccaaaacacctctgggcaacactttggtgccagggcatacacaatttttggagctgggtatgatgaaagaaacatttgcctttttagcataaagcaaatataaagctccctctctaccctccctcccacagaagaacaggaaatttcatgaatatatctgtacatttgcttctccaagtaggggaataactctccctaatcagcaatacatatgaaaagcaaactctcatgtggaggaatgcagacaactacagccatctaagccctgccacttgactcagttaatttgcttaaaaccatttacagagaggagacaggttagattttacttctcctttgccttatcatgaacatctaaagcaatgaaaattgaaacagatcatatggacagtaccttccagaagtagtattgccactttaagtcaaagtcatatgtttgcggaaaaaagctgctctacagcaaaaccaagagaaagtttagaaaaatagatatgtagcccttttagctaaagaaagataaagaccaaaaaatgatacacaattccatcaatgggaactctgcactctaccaattttaaggcaaactccatgtcttctttggttccacagcctgaacctcttgaacccaaagagtgggcaggtgagaaagatggctggtgacctggaaggggctgtgctctctgggcaccatgatactgcaagcattagtgcccacttcctcagaggccttcaaaaaataattactcttgattgcactgatgcttctctgggcaattttccttgcccacaaatctgttataatagtactgagataatataatttaagtagtctccatttattagtatttaagaggtaggccaagcagactaaaaaccaagagtttaagggcacggagatgcttttccttctgcatgttaacacacaactcattcctaatcatggtggctctaatccaactgactaaaatgcttttctccccaaggaactaacgtagttacttgagagaagagtttaatccagcttctcctgcgtggcaaagggtttttttcatcagagggtagctgacttcaataagggcatttacaacatcccaagggcttattttcatttaagaaatttggccgggcgcggtggctcacgcctgtaatcccagcactttgggaggccgaggcgggtggatcatgaggtcaggtgatcgagaccatcctggctaacaaggtgaaaccccgtctctactaaaaatacaaaaaattagccgggcgtggtggcgggcgcctgtagtcccagctactcaggaggctgaggcaggagaatggcgtgaacccgggaagcggagcttgcagtgagccgagattgcgccactgcagtccgcagtccggcctgggcgacagagcgagactccgtctcaaaaaaaaaaaaaaaaagaaatttaagagaccactcctatgagactactgtccttagaacttttgggggcaagttcctgtagaacagcagctctgaaacctagggtgagagaccctgtaggaatcggactcaaccttatccacagaaaaatgaacaagcaaaaaaatttcacaagacagtttatggaaccaggttaagaagttctagcctattgagagagactataggaaggattaaggtcagagggggagtagcattccccgggtctaaaccaggacttgtttccttcccttctttaaccagcaagaaggaacaaagaggacgtactagtgcaggctcattactaaggactcaagagtctgttcactggcaactttggcttgggaatttccattcagcctacaaaatgtgtctaagaaccacaatgccaatctcatcttctttgcttcctctgtcccttcacaggtgtcagacctgccctgtggtacgaagactctcagagcattcctgctgccttctgtctccctttgtacttcgtaggcatttttgcctcttgtacttctaattctaccttgggatcacttctaggaggactcaaaccacacacctgcactgctgcagttttcatagcacctttacacagagccctaaggaagggaccttggagtctcacagctctcactccagcacaacactacaacagaaaaattttacccaagacaattacttcttagatctgcccagtgggatgaatccctcagaaccaaaaaggccaacgatgttcttgtttcacagacaccatcagtagttttaaagatgtctgtccttaggtctgagacaagacccacaaagggtaagtgccaatgatatgggagaaataggtatgttgggtcaaatcaataaggcaagatgtagaaaagggcttacctttgtcaggcctgaaaatataacatctagaaacatcttttgcatttatataacactaaacatggagctatacatccacaactgaggtctgaaaagtgaagacaccattcaacagggagaaactggagttagggcaagcaaaatcaagtcaaaacaaaaatcccagtccaaagcatgagtgaccttttgtattcacaagacaggttctaacaacagcagtaggctcagttaagtcagccacttggtggctgggaactagggtgcaaatgctctattatttcagtgtcacaaccaccaacctcagtaccagcggaggcttttagttatggagtaggtgagattctgaggtaaaatacaaggggccatgtcagaatccagctacacggtatcacttgtcctaaatcatctctgctttgctgttagggcatgtgcattaaaatgactgtatcaacctgccttgtcctcccaggaggacatttaaagatcaactcagcattattttttcaatcagtatggcgacaaaacattgttataaaataggagaaagagaaatctttttagagttcccctgaaattctcaaagaaaaaaataaccacatgctttgttttgcaagcttcccctccccctttattcttcgtttataatgttaagctcttgatgacaaacaagccaagcccacttagctagtttatcaacacatctaaagcaaatcatagtcatactttgattttaaccaagcatgacaacaaggcaactgaatagctttccaaactaccagtgcagcgacactaccttgcataggctggtgttaaatcagcacttcataaattgtgcaggcttctgcccatttagatgatctctctatgcagaatcggcagtctaacactggctctcacaagcattaaaaatcatcactctgctaacccaactcactgttcagatgggtcttcttgaatgcagcctttattacaacctcactgctgcttcctacactgaaggaatatcatgtttttaagtcaggagttcttctttctcgctttattgtaatcagggggtcctgcaacgaccccgatgctgttacaaagcatggtgctttataacagtaaagcttctggaaaacccaaacaaaagacacgtcatccggtgacgtcagcctatatacagttctgtgtggtcgcagcacataagcaaatccattcttgtgccgtttctcggaaaagcttttcagtaaatgcactcatgctgctccaggagctcttctctgcaacaagccacccatctgccatcaacaagttaagaccaagagaactaacggctgcggaaaggagactgaagctttgattaaccagctgagcagttagaggtggagaaatttaataacttatattcaaaactgatttagggatcagagcaatcacagaaaatgaaaccaatgctttccagagggatatcctaaggaaaaaacaactcgtcctggtggattcaattttacttggaaagcctgggacacagaaaacaggaaactggtcaaaggctcctacatgttagagccttttacagactcactgcgttgagtctaacaaccgcgactgaatgcagcctccaatgtgctcagaagaatgggtaagtctgtgcatttatatgtcttgtacattcaacaaggaatcacgcttttaaaataagctaccgaattcacattttatgagggaaatcaccatcatattttggattttgaggtttaggtaaaagcatatatcgatgatgacagagacatgttttatcttctttttaaatggcttaagttttggtccagtcataccaataaggttaatttttctgcagtaaatgaaaaataagttatatgcagtgaaatcttttgctataatgttggtggtggttgttttttttaaatagcccatatgttctgctgaaaaatatcctatcttcttgttttccttaaattatattctgcaggcttacatttcaagtggccattaggggcccctatgctggcagcaatatatgcaatgagtatggttttaaaaatgctgcctgccctgggtatggcgtgtccacccaaatgccgctgcgagaagctgctcttctactgcgactctcagggcttccactcagtgccaaacgccacagacaagggctctctgggcctgtccctgaggcacaatcacatcacagagctcgaaagagatcaatttgccagcttcagtcaacttacttggctccacttagatcacaatcaaatttcaacagtaaaagaagatgcttttcaaggactatataaacttaaggaattaatcttaagttccaacaaaatattttacttgccaaacacaacttttacccaactgattaacctgcaaaatttggacctgtcttttaatcagctgtcatctctgcacccagagctcttctatggccttcggaagctgcagaccttgcatttacgttccaactccctgcggactatcccagtacgcctgttctgggactgtcgtagtctggagtttctggatttgagcacaaatcgtttgcgaagtttggctcgcaatggatttgcaggatt

SEQ ID NO: 10576 - DNA, 6000 bp, Homo sapiens
attaaaactctttgtataactgtttaaatttttagcagctcttaagtggatggaaggtatgcaggcttcaagtttgtgaattcaagagaagcattgatttattttagcaatttaaatttggaatttaatttccatcttccttgttcctttctctttgttctctattttctctctctctctttctcactcactgtctctctctctctctctctctctcacacacacacacacacacacacacacacacaccccacacagcgcttttctgtagctaaggcaccctaaatacaatagttttaaaacaagctttgagacttttaagataatctccatggtgtggtgctgatgacacactccaggccatttgacagactgcaacgtagtaagtacatagcagaatatttgtaccagttgagcaaagtatggtgtggacaaccattcaagtttataagtgaaataatagaatcaaagaacatcatctctttgagtggtgtttctggcctggtagctccactgagctggttgtacagggtccctggcagggaaactgagcctgtggccggaacagcacaggtttctggcacatcgcagggacagggacatgtagggggcatttaggctgccagcttccatgttaccttccaaacagcatcatcaatttactggaaaaatatattgcccattgtgtgtagtcatagtggtgggaccagggcctctccctccaatcctctgactcagaacaaggagaaaaaagacacatagcaaaccttggccacccagtgtattctccagggactctgaatttgggagagtgacccacccaaggatggaaaacttgtggaagccattcaccatgtcaggagtgatgctgtggcatcttggttgagtttgtctgtgaaccggttgctgtgctttctgctttatggttctccagagctctcctggtgcctgcttctccaagcttgcttcctggtatctcagtggttctgtgagtttctcatattatttcaatcattttcttttgtttaaggtagctagaatctgtttctgttgtttgctctcaaacgccttaattaagatggtacaataaatgttcctagagtgaataaattaacagaataaagtatgcccagattaaatttcaagtgttttgtgacttttcccttctttcatcataatcagaaaactgaaccccatctgtagatgagttttcttgaaagttggataaatatgaaagttttatatgatgccttttggaggcaaaacagttttgtaaaaataattgaaacttttaaatatatggctattgtatggtagttagaaagttcagacaagcataaaaagaatataagcatatccacaaacatctttttatacaatgaatatcaattgacaaaatcatgctcaatacctgagcatatctcatgggagggataatatagtttaagtggtgaatctctcatgattaaacatttgagttccctccaagtacccactcttataaaaggcccggcagtgaacattcttttaggcaaatccttgaatgcataagcttattacccttaggatacatttcaagaaatagaattgctgggccaaagactttgcacgtttataatgattttactcacaatagtagccctttaaaaagttgattaaaaaaatgaagagcccttttattgtagctcttcttcagcaaaaaaacaagacaaacaaaaacaaaaaaatggtctacatttcaaggtatgcatcaaggcagccccatttaaaaccacattgcattaactgaggtgcttcaactggtcagcccaactaaatagaaacagatggtgcaagaaaaatgaattaatatccttgtctattcaatacaacaagacattgcacctgctgtcttcattcatatatttaaaactcatttatagagtccctactgtgtgcctggcatggttctaggggctgggggcatatgaaaggaggcaagatctagtttccagctttgaggcattcacaatccagtgagccatgcagacccataaataactcacaaacaacacagtgtggtggccactgccacaggagaggcataaacacagcattctgagagcagcaagccagaagcagtttcaacctgtgtgtaaagtcttcttgttcccttctctctcactagaaagcactatttaaaatgagaatatgagatacaccttgagaaatacaaacagagggttctgcagaagtaaagaagggagagatcaggaacaactccagggagtccgtgggcattggcaagtggtaggactggcatcatgtggagggtcattccggaagagagggcatcgtgagcactggtacagagcaggaaagaaaagaaagcgtttgaagaacagactgcttgaaatagaaggtttgggtacagtaagatggctgaaagtctgggctacctaaattgatgttaataacaagataaagcatttgtgtgtaactccatatgtgaaagagaagcattgcattagttaactgtcattgctgcaacgaattaccacttggtggcttaaaacaacacaaattcattatcttacagttctctagattggaaatctaacatagatctcactgtgctaatatcatggtgtctgtggagctgccttcctttctggaggctttaggggagaatctgtttctttgtcttccccagctcccagagaccatcagcattctttgacttatggccccttcttctgtcttcaaagccagtgacagctggttgagtccttatgtcctctcactttgacctcctcttttacctctctcttttacttttaataatattttaaggacccatttgtataatccacaataatcttcccatctcagaatccttaatcacatctgcaaagtcccttttgccatgcaaggtaacataaccacaggtccttgggattaggacatggatatctttggggagctgctttctacctttcatgggtattagggttttagagcaaagagtgatgctgttggggatctatctgcctgaggaagaccatgctgagctcaatgaagaggatggactggagggagagaagaccagttagacaatctttgatgattacctctctctctctctctctctctctctctctctctctatatatatatatatatatatatatatacacatacatacatacatatatataaaattaggcccagtggaaataagaaggaagggacagatgcaaatgacagagtggaaatagagtccccaggaactggcaaatgtttgagtagaaagtggggagaaggggaacagaggtggaggtgtcaaagatgattcaggctctgagcatccatgagtgaggataatggctttatttaagtgaggtgtttggtttagggaaggggagtagtggcaaattcaagtttagatcttattgtcattaaagaaacaatctacagctcctctccttttaaatttttcataggggatatgagataaatacatattcaagacatacacaccaaggaaagaactaacaggtggaaatggctgagagatgttgagacaaaaacttggcacaaagatggtgaagaagacatacacagaatggggactcagatgggaggagaaggaaagaagagagaaaaaagtgtaagagtaagatggggaagaaatatagaccatgaggaagaaggaaggacctaacaaaatagagggaaaatgagagacaaggcatgtcaacagagagaaactaaaaaagggaccaactcaaaggtttctagcatggataagttggtcaatttaaatttccagttcacttgagatgtgcttacaatcgttaagttaataatttttaagattgtctttgcagatttatttactttcagaagttaatcactgtccacagcttctctgttttgtttaggttccaggaggcctcagtggcccttgagggggtgaattattcacccattacccctttgctccctgcctgcctccgtgaaggaaggctctgctcgctcctgcccttcccaacatgcttaggctaactcttgaattattttatccttggaatttgaggcttttgtcacatgtgttgaggaaaaatatttttcactctgtcaccgtccctcacaggtactgcaactcactaagtggcacacctgcaccacacaactgtgagtttatgcccgtgttacagacgggagcgttgaggcttgactcttgtttaattacatgctcaaggtcacaggtggtcaaagctgggaggacaggctaagacagcaaatagtggactatcaatatggacaggatcatttaggaagacttcaggcaaatggaatcattgtctctggaaaacttgagtcttatatccaaggtgctacgaagctcactctgaaccctgcacccaaactctccctgctctggcagaggcagaggcataagaaggaagtaaactatacagggataggatttccctggcacagacgccacaaacgctttcatgtttattatatttgaatagaggaagtgggcactcagagaggctaaccaacttgtccaaggtcacccaggagcctgcagtcagcccagggctccttcctgccctccatcagatgagcagcgctccggccagggagggcgcgtgctggccagcccggaacgggtgagatcgctccagcccgcctctgtgcccactcccctgtgcgccctgccggcagagcggcacccccgctgtccctggcgcccagtgggggcggcagcgggcagggcagcggggaccaccggggctgggggctgttgagcccgtggagtccggctcggttggggagaaggacgatgcgcggcgagcccaggtgatccggggctggggtcctgcgcccgcagcccctggcccgcgcctcacgctcgccggctccccagcgcgggggctggagcccgcacccgagggggcggcagggagggcgcaggcagcggctgggagcgcagcggcagcggcggcagcagaagctcggctcagcggctgggggtggccgctcgaatctgccagggcacctcgctccctcgcctctggcagcgggtatgtgcggcaagtgcgccgggggtcgggaccccaggagcccacgggtgccggtggggacgcggcgggggcggggcagcacgacggggtcgggggcttgggggttctggactcaggacacccggctttgcggcagggtgggcttcggggcggctcagggtgtaggtgggctggctggttgtatacaacgtgtttccagcgtgggatcactgtaggcttggggctggtgctttccacttgtgtatgtaagtacttgtgaaactgcatgtgtgctcactgactatacaagggaggttgtgtatgtaaagatttgtgtgtgtgcgtgtgtgtaagagagagcgcgcacaggctgtgcatccatagccaagtgtgtaactggatgtgtgtgtggactctatggctggtccttgatgtgcagcccagagtgtgctgtgtgtgtgtgtgtgtgtgtgttagagagagagagacaagatagtgtgtcttgagcgtccactttgatgtgtgtgtatacgtagccatgagtgtgtgggtacgatgtgctgcataaagccttggcggtcactgccggtactcgcaaccatcctgcagttgcctttcacagaatcccaatcccgatttcagatgcatttcctcacagcttgctaccctgtgcggcactgtgctgttagttgtctttgaaagaagtggatgttggtacaaggaagtggcagctggcagaggtcaaaaagtggtaggcatgagcttgtcttcctagagttcaatgttaagagaaaatcttggcttgatttccatttggtccaatcaaatgaagaaacagaatgtttcttagggtataggtttggcatgaaccaaaggaggcttttgatggaaggacactggttcaagtttgccctccctgtcttccatcgctgggatggattct

SEQ ID NO: 10577 - DNA, 6000 bp, Homo sapiens
agggaggagaagagggatgttggtctgggaccctgaggaggaaggcatggcgaggataggtaagggtaagggagaatggataaggggtgagagacgaagttggagagggaagcagaggtagagtcatgaagcctctgccttatgtgccattttaggagtttggcctttttcctttactgataacatggggaagcatccaaagttttttttttttttttttttttttttaagatggagtctggctctgttgcccaggctggagtgcagtggtgtgatctcggctcactgcaagctctgcctcccgggttcaaacaattctcctgcctcagcctcccaaatagctgggatgacagcagtccaccaccacgcccagctattttttgtatttttagtagaaatgggatttcaccatattggccaggccggtcttgaactcctgacctcgtgatccgcccaccttggcctcccaaagtgctgggattacaggcatgagccactgcacccagcctccatccaaagattttaagcataacaatggcattcacttagtaattcaacaaatagtaccagctacctaccatgtgccaggtgtggttttagggactgaggttatagcaatggatggggaggaggaggtgggacaggactccctagggagcaaagaagcatagattggggacagaagaggagggaatgagttccataggacctcatgggtggccagcagggcagggcaggggagaggcaggtctggcggggctggatgaggagagtgggaagctgtacagcgaagaggctgaggccttgagggtggaggagactcgaggcttgtaagggccagtgtgagccccactttgttaactaccgtcaccactccaaccccaactgggccctttgggtgaagtggggagaagtggcctccgtgctgaggtctggattcatcaggctgggggtctcagccattgctccctcagtggccactcactcagtccaccggccactcggtcaggcatggagcttggagtctgaccgagctgtggcagccccagcaagggtgtggactcagaggagaggtaagccacaacccagccctcaggggctccagggctaatgggaggtccaggcaatggacaggaactcagaacaggatttgcaccccgtccagagctctggcagcaaggccagactgactggcagggctgaagggacgtggaggccagcagtgatctgagtgggggtagttactgaggggatggagtatttacaggacagtctgaacgtgtggcctagagcgagatgctgagggtctgacactgcaggctgatggggaggtgggcgcttctattctggacaggatgtgtacggagggatctatgatgccaaagatggggtgaggggagggtagctgcccagtttgctcatggcctgctctcatctctgcctccagccttgccctttaaggtggtggtgatctcagccatcctggccctggtggtgctcaccatcatctcccttatcatcctcatcatgctttggcagaaggtaagcccctccctggcccagtgggtgaagactggcacatcattattttgcataaattccacccctctgccctccttgaatgctgcgtgatctggccacatgcagggctcagcatggaactcaggtggggacttgtgacgctggctgtctcagcttcctccacccccagcagtctgggccaacctgagcctggcccgagctatccaggattcccttcccctactgtgtcattaagtccccgggtcctgctgagacaccattcctctcatcctagccatggagcatgggacctttgaggtggactgcatgggctccaggattcttccaggtctcacccatggagaacctgtgattctactgaaatgcattctgatcctattagtctgtaatttcagtgttctgctttgagattttaccattctgtgattccaacattttaagcttcctgaatcaggattacagcacctcatgatcccatctttctaaaattccagtcctgtggttccaacaccttaagatgtcaacattctaagcttacatctttctgacttgcccagcactggggagggccatccgcatccagccgagtaccctacctggtgtcactttctggggtcacctgctctactacttccatctgaggagcagcgaaggctgggagagaagctagagaggaggttctcatgagccaggccctcagctgccagttgctcctcagtctgccaagtcctgaagcctcctctggggccccttggtccctgttccctccgagcccacgaagaccttggctcagttgagcacttgctgtgtgacttcaaatatgcccctgcccctctctgggcctcagggtctcctgccccatgtgtcctagacggacgaacctaatggggctcagggcctgagactccctctgataactaattcctggggttggtcctccagaagccacgttacgagatccgatggaaggtgattgagtctgtgagctctgacggccatgagtacatctacgtggaccccatgcagctgccctatgactccacgtgggagctgccgcgggaccagcttgtgctgggtcagtcctgagaggcctcatgtggcagtgtggggactcaagttgggtgggaagactctctgaggtctggtcccagccttgccatgactagctatgagacctagggctggtgtcttgccttctctggccctccatctcctactatgtacaatgagagcaagaccatcccccaggaactgcctagcattgaggttctatgatcctgtgaccctgtgagacgggatccctatgtggcaaaagtggaaggattgaggacaggctgagtagcaggcctggtctggctggggaagctgaggaggtacagagaagcgtgctcccttgggagggaagaaactttccagagattaaagatggggcagaaagcaggcaggacttagatgagataccaggaaagacagggaggtattgtggttgcaggagtgtgtttagggaatatcctgagtccaaggtggtttaagtaatgtctaggttgacctaagagagtggctctttcccctcactgggcaggaagggtgatagcggccgggggtaggggagtggggggaggggggcagctgggggagcggtgcagcttcctggtaggccaggagctaatggatcatctctgcaccaggacgcaccctcggctctggggcctttgggcaggtggtggaggccacggctcatggcctgagccattctcaggccacgatgaaagtggccgtcaagatgcttaaatgtgagtagtccttggagccctccacatctgggccttcacctctccctgcccctccccacacacttagcctctcccagggtggcctgatgctgatttgcaggcactagaggggccatcacactgcagcaggcactgctcccgagtctgggtctggtttgggaaagagcgttcctctccctggcctcctcggcctgcttccccctaccctggcctcttcccctcctcagagtgtgggtgctcacccccgccaggctgcctgggtcttgcagcacagggcggggcagaagagtcagaataggctcctgtggtggggcctccatggagcctccatgactgggcctggcctggggcccccattttcctcagccacagcccgcagcagtgagaagcaagcccttatgtcggagctgaagatcatgagtcaccttgggccccacctgaacgtggtcaacctgttgggggcctgcaccaaaggaggtaccgagcccactgccccagaggcctcagggaaagtgcccaccaccaaggccaggccccgcctacccccccctcaggccttgcacaacagcacactcctgctggagggtccgtgcccacccgctccagcgccctcactgcgcggtcccagagggcggtggggtttagaaactcacaaaatcacaacaccttcaaggctgaaggattagtcaggtcaccagtcccagcagcttccagaccatggtgttggctgacacttttttattttcccaatacattttgaaaaccaataaataacagctcacatgacattaagatgagttatatgcccaccattggagaccaccagcttgctacttgggagctaccttcatttgatcatagaagaaagtctctgtggccaactgggtctatttgaagctctgattgccagttaggctgaaaaaaaatgttatcaccatttgcagctgcttattgtgagatttgggattttcctcagcattatgcaaccaaaataaaatacagaagtatgttgggtacatagacttattcacgtttgcaatgatcgctcatttcaacattttcgtttgtgtagatatcttcaagttctcactgattgactttaagtaaatgcattgtagttgaatttaactactaaagtgatcgttgtaaacagtggcctttatctgctttctatactgggctccaaagtaagctttagtttgaaaacatatcaataagagccaacactgcgagctcgccacgtgcccagccaataaagacatcatctcattaatcctcatgacagtgctttgtggtgggtttaattagccccacttaacagctggggaaggtaaggctcagggagactaagtaccttgctctccaccacagaggcaggaaaagaatccagatttgcaaggcactaaagcctcctagccgtcatgccaaagtgtctctcccacatccagcccctgattagcctcatggccttgaagggacgcctgaggcctccatagggactgtccctgagcctgtccctctgcaggacccatctatatcatcactgagtactgccgctacggagacctggtggactacctgcaccgcaacaaacacaccttcctgcagcaccactccgacaagcgccgcccgcccagcgcggagctctacagcaatgctctgcccgttgggctccccctgcccaggtaccaggagggaggccagggactgaatctttgggatacctgaggagcaccgctccttcccctccttttgtccaggaggggaagctgaggctgtgacagggcaggggacagaatcactcctggagctagggctgttccacaagatggtccaccccagatgagggaataacactaatgccaggccctgtgctgctaagccctctacagatgtgacatgccatccctgtgtcgtgggtgtttgcccttcagtccagggcaggcagtgatggaggaaggggcagaggctgtggtgagatgagagccaagcctcccaatttgcacagtggtgctccaggctgtgttcctctctgcagcctctacacatcagcctccacactgcctctcagggagctcaactccagtctttgtcttttccaaaaagaacacttcttagttctgttgctgattacaaaaacaaagacaagagtagcttcagaaaagcgtaaaagaccttaaaacccactcatgtcctctccaatgttttgacattcagtctcccaggagccaaagggcttctcccatctttttcctgcctatagagacagatgtgtgtagagccccacagctctttggggagctgatgctacaggcataggtagcggggtgaatcctggctgcctatgctgggttgcagtcaggcactcccatggccaggtggcgctggggaggccacaggaaggcgcctctgaacacacccgtcttgtgacctttgccctggggtgctgtaatcgcctctgggtgtgagctctctgggttctaactgtcattttggtagcctcagtgcccagcttggcccagcaggttggttgaaaagtcttgatccacaggctttcctactgggatagactgaaggaagatgagtgagtgtgtgagtgagagaagaaattcatgagtggcaaggggcaggaggggaggggaaggcaaagcctgcaggctctcct

SEQ ID NO: 10578 - DNA, 6000 bp, Homo sapiens
tgcatttctagggcattcttcccacacataatctcctctgctcattgtcctgtgaagaaactgtggcctggagaggttgagccactgtgccaaggccaccaatgcaggtggtatgtgggtgggtgggggcctggggtggggagcacggcccaggcagggtctgtgctgaccgcccttgtgtttggaacctagacatccccccttgcctggactctgagctgaccgaattccccctgcgcatgcgggactggctcaagaacgtcctggtcaccctgtatgagagggatgaggacaacaaccttctgactgagaagcagaagctgcgggtaagtggtctctctggccttgctggccccgtgctggtgaagatccagtcccattcctagaactgggcccccagctgcagggcggcatcctgctccggagcgtgcatttacccctgagcaccaggacacgtacttctcttcctgcctttggaggctgtggtgcacattaacatcttagaggctctgagaagtcctgcagcagagacctgctccctttgcttaacctaacgttaaacaaaagagacacaaacagccctattcctttttcctttggagtctgtggatcttaagctttaatgagcatattaactaccccaagaagctgataaaatgcagattccttggccccatctcaggccactgaaacagtgtctctagaaagcaaggcccaggaagctgcattctaaatactccccaggtgatttatgtttattttatttttttgaggcaaagtctcactctgttgccaggctggagtgcagtggtgcgatctcggttcactgcaacctccacctcctgggttcaagtgattcccctgcctcagcctcctgagtagctgggactgcaggcatgctaccacacctggctaatttttgtatttttagtagagatggagtttcactgtgttggccaggctggtctcaaaactcctggcctcaggtgatctgcctgcctcagcctcccaaagcgctgggattacaggtgtgagtgtgtgcccggccttcgccaggtgattttgatgtgggtagctatatggagaattctttgaggtcatcccaggcttctatttttgtgaatgagatgctagtacccatctatgacacctccctcccctcgctgtgagctttggtctggctagtctctgcctgctctggccttctgggaggggtgggagggcccgactggtccagacaatctccatggacctcttgtcacacacagtctctactccctcaggtgaagaagatccatgagaatgagaagcgcctggaggcaggagaccaccccgtggagctgctggcccgggacttcgagaagaactataacatgtacatcttccctgtacactggcagttcggccagctggaccagcaccccattgacgggtaagaccccagaccctagagtgaacagagctcaaggctggcaggtgcactagctatggccagaaagcctctcagcagcctatactgctccaagccctggcatccacagtttgcctggggattggagcagaaggatgaggcatctggagaaaagatgtggacctgggacaaagaaaccgataagacactctcatgctgaggtgaaagtcagtaggagctcaaaatagctccataatcctgcaagtactaggcgtggatatctggataatgaaggagtgtgaattaagaaggagtaccaggctccaaggggtggcaggggacaaggttgggtcagccacacgccccctgtccttcagcagaacatccaggggcagagcagccacctggcactgtctaagccccctcctaaggctcagccccaatagggcccaactgaccctggaagttatccaaaaaagcctgtctattttgcaagcccccagtttgagggctcttgtcccttgtccaaacgagttatgaggccctgtgcaactgcactgccgaacaggcaggcagctggccagttagcaaatgcttatggagtgtgcattttgtgccctgcactattctaggcaggggattgaacagcagtcagagctggcatggtccttgccctcatggacttatactctgttcataacctgtcactaccttctgaacttctcttgtggtgatgaagtgagagcccctgctcagcctcagatggagcaagctacacctgcaccttcccagagtggttttttcttcgtccttgggttgtggaagcagagcatcacacagaggggaaaggaagggctgccctactcacatactcagggaacttcctctctaggatgttcacccctcgctctttgtccagcctgtgtgcctggagtctgccaaccctgccagtgatcctgagggctggggtctcctgggctctgggaatctcccggccacttctctcccaggcttttgccatggctgggatccaactgagtcactcattatggcagggaggggaaaagtcaaaggggaacatctggagctcaggcaaagcaatttgatcccactgcaacagagggcctggagggaggctttcagatggggtgcaagaacagcacatctgggaaaggggtccagcttgggcaaggggacccgcttcctcctcctcccatcccagggctgtaggtgaccttgcctgcatccctgcccctccctgggcctcagttttccaccagtacaatgaaggggaggagaatgttcctatcagttcaaacattgtgtgatttctttggtgagctgggtggggctgcgaggtctagaggttaagaagacaactggagtcacattgttccctggagatcctttgtggatctttagggacaagtagttgggggctctgggaaacaaagaaaaaaattatacacatgctctggagtctaaggccagcagggagaatagggagggaggacagtgggagagacatccaaagggcctccctctcagacattacaggatacacaagcaaagctctatgaagatggttagagctcccgttgaccctcactgccaatcccagtccctttccacattcctccccagaaggcagcactgtcaccagattggtgtgtcatttttagaccctttactaggcatttatagatgtataaatgtgtgtccatagacaatatacagtgctgtgtcatgctagattttgatctacccatagcagaagtgctgaattttgattttaagtttctgtgtccccagttctcagccaattaggaaacaatcaaatacaccaaacagacctttgtttttgagaccctgaaaccttagagctggaagggccgttagtaattatggccatctcctcctctttgctggaaggagaaactgaggttccgaatggtgcactgctgttctctgagtctcagagcagtcagtggcagagctaggggtagacctgggattctggctttttgtcctgctttaaatatcctttcctccatgctctggggcaggctaactccccggttgcctcccaaggctgggtgtggagcttttccatgcctcaggccctcccctgcctccttccctgcaggtacctctcccacaccgagctggctccactgcgtgctcccctcatccccatggagcattgcaccacccgctttttcgagacctgtgacctggacaatgacaagtacatcgccctggatgagtgggccggctgcttcggcatcaagcagagtgagtgtctgaacaaagaagcaaggggcatgggcagaaacactgctcccagggtgctgggttgtcatccccccactctccgctctcttggtctgtctgttgtctgtcctctctgcctgtctctgctctctctgcctatttgactcctgtctcttgggcgtcttcctgatccttctctgtccatccaactgtccctctctctttcccttcctcaagcgttagcactcacccgtgctaaacactattttgggaactggcaggcacacagagaggaaacaggaagtgtaacttggcagcgtgtgtaagagacagggacaggccagagacagagagagcgagattcctccgtcactgacttcctgggtgaccttgcatggccacctagacccctgcccctggggatgggtgggagtccactgactccttgggaagtgcgttatcatcgacacagccttatttttaaccgtgctcttttcttgctttgcagaggatatcgacaaggatcttgtgatctaaatccactccttccacagtaccggattctctctttaaccctccccttcgtgtttcccccaatgtttaaaatgtttggatggtttgttgttctgcctggagacaaggtgctaacatagatttaagtgaatacattaacggtgctaaaaatgaaaattctaacccaagacatgacattcttagctgtaacttaactattaaggccttttccacacgcattaatagtcccatttttctcttgccatttgtagctttgcccattgtcttattggcacatgggtggacacggatctgctgggctctgccttaaacacacattgcagcttcaacttttctctttagtgttctgtttgaaactaatacttaccgagtcagactttgtgttcatttcatttcagggtcttggctgcctgtgggcttccccaggtggcctggaggtgggcaaagggaagtaacagacacacgatgttgtcaaggatggttttgggactagaggctcagtggtgggagagatccctgcagaacccaccaaccagaacgtggtttgcctgaggctgtaactgagagaaagattctggggctgtgttatgaaaatatagacattctcacataagcccagttcatcaccatttcctcctttacctttcagtgcagtttcttttcacattaggctgttggttcaaacttttgggagcacggactgtcagttctctgggaagtggtcagcgcatcctgcagggcttctcctcctctgtcttttggagaaccagggctcttctcaggggctctagggactgccaggctgtttcagccaggaaggccaaaatcaagagtgagatgtagaaagttgtaaaatagaaaaagtggagttggtgaatcggttgttctttcctcacatttggatgattgtcataaggtttttagcatgttcctccttttcttcaccctccccttttttcttctattaatcaagagaaacttcaaagttaatgggatggtcggatctcacaggctgagaactcgttcacctccaagcatttcatgaaaaagctgcttcttattaatcatacaaactctcaccatgatgtgaagagtttcacaaatccttcaaaataaaaagtaatgacttagaaactgccttcctgggtgatttgcatgtgtcttagtcttagtcaccttattatcctgacacaaaaacacatgagcatacatgtctacacatgactacacaaatgcaaacctttgcaaacacattatgcttttgcacacacacacctgtacacacacaccggcatgtttatacacagggagtgtatggttcctgtaagcactaagttagctgttttcatttaatgacctgtggtttaacccttttgatcactaccaccattatcagcaccagactgagcagctatatccttttattaatcatggtcattcattcattcattcattcacaaaatatttatgatgtatttactctgcaccaggtcccatgccaagcactggggacacagttatggcaaagtagacaaagcatttgttcatttggagcttagagtccaggaggaatacattagataatgacacaatcaaatataaattgcaagatgtcacaggtgtgatgaagggagagtaggagagaccatgagtatgtgtaacaggaggacacagcattattctagtgctgtactgttccgtacggcagccactacccacatgtaactttttaagatttaaatttaaattagttaacattcaaaacgcagctccccaatcac

SEQ ID NO: 10579 - DNA, 6000 bp, Homo sapiens
ggggtggtggccgggtagagatgctcctcacctcccagacggggcggccgggcagaggcgctcctcacatcccagacggggcggcggggcagaggcactccctacatcccagatgatgggcggccaggcagagatgctcctcacttcctagacggggcggcggccgggaagaggcgctcctcacttcccaggctgggcggccgggcagaggggctcctcacatcccagacgatgggcggccaggcagagacgctcctcacttcctagatggggtggcggccgggcagaggctgcaatctcagcactttgggaggccaaggcaggcggctgggaggtggaggttgtagcaagccgagatcacgccactacactccagcctgggcgacattgagcactgtgtaagtgagactccgtctgcaatcccggcacctcgggaggccgaggcgggcagatcactcgaggtcaggagctggagaccagcccggccaacagggcgaaaccccgtctccaccaaaaaatacaaaaaccagtcaggcctggcggcacgcgcctgcaatcccaggcactcagcaggctgaggcaggagaatcaggcagggaggttgcagtgagccgagatcgcggcagtacagtccagcctcggcaacagagggagaccgtggaaagcgggagacggagacgacggagaggcagagggagagggttcatgttttttgagtagggaatggcattttcagttgttttaggaaaaattgctgtggcaagggtgtggaagatgtattagatgggagtaaggctggagtctcctgcaatacttcaggtgaagcatgagtgtctagattagaatgatagcagcaacaacaatagagaggggacggagtaacagccatttagcaattaggagtcagaagacttggtggcctaaatggagaatgaaggacggctaattctctgcagttgggagaatgggtcaatgtgtgggttaactggtaaagcagctccatgaggaagagttaagtttgtgtgtgagatcttgagtttgaaatgcctcagaagtgtctaacaggcagttgaaagtgtgggtctgggctgactcatggatgcttgggtgggtgtctttgctaattggcacttatatctggtcaaaataattactacactgattcacattataagtgctaaataaagacttgccagtataccaatactttcatgtatattctctcaaaaggggtagtgcaagactaaggatataatttgggaggtcattgctcataaatgacacttactgagtacttattatatgccaaggcttggctcaacgtgtctagtgcattgtctcattgtgagcaattgtctgaatctatgaggcagattctattataaggtccacgataaaggagaaaaactaaggcttgaagaggttaaaaaattgtccagaatttgaatcccaggtctctttggtgcttgaacctgagctcttacacactttattgtcttgcctcattagcacaggagggataatggaagctcctgtataatcacctaaagatattgtgtgagatgaagagagaggtgaagaggtgcaaagggagactccctccccacaaaggagcagtacactgggggagcttgtggtggaggaagaaaagccaactaaggagctactcctaagccagctaaggagctagacaggaagacaccagaattagaatgggatgcataagcacacaagggccgaggaagctgggctggcaaagcctagggaggctgtagttaaagattaggaaattctggaatgaggcatttagagaggtggctgtgtactgcagcagggtcaccatgaagtgaacagagagtatgagctctgtgggcggactccatgaaatcccaaaatgagcaattgctagaggatgaatgtttgacgttctttcaagaaatttagagggaaggcagggtagagaaggaaggagctgctgaacgagcaagatgtattctggcatggcataggaggatgcagtcaaacatggcagaggtaggtttgatctagacgtggagataagagagaagagggtgaggagagaacaaatgaaggtgtgagaacaatcagatctcgtgttgacctctaggaggtgggagaagactggggaagcaagaccttgaacttggagattatctaatccatgaattccagacctgatcatgtgctggaatcacagggaacttagtaaaaatataggtctccttagtgtacccaagacttgcagatgagaacctctggcagtggggtcaagaaatcatatgtttaacaaacctcagatgagtcttttgaagccacagccctggtcccaagaaggcagttaggaattcctagtatagtacactctccttattttacaaataaggaaattgaggcacagagacatttaaaaagtttaaagaggagtgagcactcgtccttaggtaggagtctcttctggctcccaaattagagctcattgccctacattgcactattttaataaagtaaagataaaattgagccctgtcagaacctgacaattttctgagcctttcgctgatcaagggcatggaaaagttgtaggaggaattgccattctcagtgcaagttcagcagaaggaacagagaaaggcagaggaatgaaggaaaccacatttgtactcaccaatgccattgttaggaagaaagaaattggatgcacttgatttcaaagtcaacatctttcatgaggtattaacagatttgttttatctctcatgcccagtgctgttcacagacttgaatcagttggtagcccggctgggggataaaggaaaaagacaaaattggattcttattattttttctcacaatagcattctagtctaccaactgtacaattttttattaataacattggaattgaatccatgtaattctagcatctaacagctcaccttcagaaatgtcaaccaaataagatcaaagagaattgccaagctttaaaagaggtatgtccatgtaagacaaacaaagagtgaaaaagaaataaggggtgagctgttgaaatagaacacaaagccagccccgagataggtcctcattgatggctaacaaactgagctgggtggcccctctgtaggccaaaacatctctctgatgcagagccagggaggggtttctaggcactggagaggtctctgatttcacagcgggtagaataaaagagtaaacctcagtgtgttctgcagtgtggtctctctctctgttttctgccctataaacaagtcaataaataaaggtacaaacgccctttggtaagatctaccatctgtaactgggggctgttgaaccctgtgatactcagcagtatattagagaggaaaagaagtggaacctggaatcagatgtcattgccctaccattcactagctctcattattagctatgcagccttgggcaagatatggacccctcagagctttcatttcctcctctttcaataagtctgcccaagtttacttagctcatagactcatattaaagctccaatgagataatgtatgtgaaagtgctttgtgcactttcagatgcttacattgtactcacaataataatcatcgataataatgattattagaatctcttttccaaaaactgtacccatccaggtggtacaggactggggtttcatttcctttttttttttttttttttccagacggagtctcgctctcttacccaggctggagggcaagggcgccatctcggctcactgcaacctctgcctcccatgttcaagcgattctcctacctcaacctcctgagtagctgggattacaggcacccgccatcatgcctggctaatttttttttctttttttttttgtacttttgtagagacggggtttcaccatgtgggccaggctggttttgaacttttgacctcaggtgatctgcccacctcggcctcccaaactgctgggattacaggcgtgagccactcttcccattgtattcactctccagcactcatcttgccacattttccaaagtccatagagcccagaggataggagtttgggctttgaagttaaatgatcctggctccaagatttgctctgtcccttcctactatgcaacttgagcaagttgcctgacctctccaggccacaagtttcccactgtgagatgagggcagtaatgggaactactgacgagcattttctgagaattaactaagaacatgagaagtacttcacattgtacttggcatgcagtaagtgctcagtatatggtagccatttattattattgttgttgttatcaataattctgagtgttttaggtcaaatgcagatcttcccacctccctcaatcaagattagttaatttatttatttctgtttttgagatggggtctcgttctgcagctcaggctggagtgcagtggtgtgatcatggctcactgcagcctttatctcttgggctcaagcgatcctcctgccgcagcctcctgagtagctgggactacagtcatgcaccaccatgcccagctaatttttttttattttgtagagatggtgtctccctatgttgcccaggctggtcttgaactcctgcgttcaagagatctggccgcctcggcctcccaaagcgctggattacaagcatgagctaccgtgcctggtctcattgaagatttattgatcagctaatgtgggcaaagcccagtgctagacattgccctccagaggagagtccagtgatgaaggattaggaatgaggtcttatctgtgctttactgagaccctcagctattggcacatgagaacagaagcctaaggaggtgactctaggctctcacagggttgatgagattttgttgctagggtgtctcaaggttgatgagattttgttgctagtggaaggttgaggccaaggttcagaaccaaggtgcctcttgaacaatggtgttctagaatccctggtttccttctatctacctaatctgcgtgaaatgtgacagtatctcaccatttctttctctttctgaaccacattgggtgccaacagaacttgctctctgttctctttcaaaattaccaacatggaccccacccaattcttcccttggaactaaggaacgcctgactgatgtatgtaatgctctgttgatttattcatttcagtgtatatattcatttaagtgtataaaaacatgtaaagtcctttagaatttgaagcaagcatgcgaattcaataaatgtgtgcttccactttcaaaaggagttttgaaattccggatttgtattagtgctgctgggaaaggtcagaaaatatgaattctgagtagaggtcagcaaaatacgtagtcccttcctttgttatttactgtaaaatcttgcgcaaatgaacttttctctctagatttcagcttccctcttgacaaattaaaaaaaaaaaagaaattggaggagacaatttcaaatccctcccaactcttaaacattcagattgtgatttttggattcttttgctcttttggattttttaagaccatatcgcccatgatccacagggggcagcgtaagcccgaggctacccatgaaagaaaagaaactgttctctgaaggcttgcacttgtcacttctaaaattctaggattgcgttgaagttgtatctttgagttgacttatttcagaactaattttgttttaaacataggacagatgagtcccagcatctatgaattcaatgatgagtcaacatatgtgatatctgttttaaaatgcacccactgagaagacagagtgctcttcttttccgttgatttctggctcgaagctcactcattcgagaatttgtgttttcaagtaggattataatatgctttttttcttttctgtcagattcgttaagaacatttttttttgagtcattcagagttgggttcaaatttcctttgtttgtgtcaccttgggcaatcaatgtaacttc

SEQ ID NO: 10580 - DNA, 6000 bp, Homo sapiens; identical to SEQ ID NO: 1187

SEQ ID NO: 10581 - DNA, 6000 bp, Homo sapiens
ctcctgacctcatgacccacccgcctcagcctcccaaagtgctgagattacaagcgtgagccactgcacccgaccccagtttcagatattctgtcataagcaatagaaacagactaagtatctttgacatggagtggatactggaagccatgtgacttctgtgggatcatctcgaaagaaagtgtaaaatgagaagacacaagggcccaggaaagagccctagggaactccgcatttgtacagcaagtggtgggtaaagagagaaaagggagaagcctgctaggatgctgaggaggagcagccagaggagggggaaccccagagagcgtgctggcgtgggagtcaagagaagtgtgtcagaagaagggagcggttgacaatgtcagaagctgccaagaggcacaataagattgagggaacaagtgagtgtggttgtttctttatgggccagaattttaaataccaggatgaagggcacctaacaaatagcaaatacacaaactaacttttgtacctaccagacttcagactaaaatcggtacaaagaatactcgccagggtaaggagaagcccaggaaattacaagagatatctagtttctgaaatgaattacaatgatcatctgaacaaatagtgtgaaaaaatatacacctgaaaaaatgtgtgaaaatggccaacaaaacattgaaaatcagggttactggggaagacttttactgccagttattaaaatttactatcagctgtattgactggaacagctgccagaataggtaattcaacagccaggatgggaagccctgatacataagtttggtggggactgtaggtagcccctctggctaccttctttctagttgaataggttacatatctaactcccttgcaattaggttcacctactcaggtgcccttgagttagacttgaaaggcagaagacagcagaggccattttactgctgcttctgatggagatgcgaggcttccataggaaagaggggtccactggtataaagagcccgacaaccatgttctccagatgttcagtccctcttggccaccccacaccaaatgacagtccgcgagactctgcccatggagactccacctgctggtcctctaggtggagtaactgataacaaaaatctctagcttactcctaagtgtttattctgaaggcagtatgtacagcaagaccagacttttggcccagctagcggtgactactgcaatgtcaaaagagcacataaacagacttaaaaagcaaatgacaaactgggaaaattgctgtaacataggtaacaaagggctgatattctataaagagttcttgcaaatgaataagacaaagatgaatccaagtgggcaaaagatatgctgtaggcaatctgcaaaagtgatgcataaaaacaggttcaacattactagcaattagtggaataaaacttaaaacaacaatgcaaaaccatcgttctatcatattaacaaagatgacaaaaaatggtgtgacagtgcagggtgtggagaaaagttggtgtcaaagctgtgccatctttctgtgtatctttcatatcaaacaaacgccttcaacaatgagcacacctttcgacacgagttcccagactttatcctaaaaaaaaaaaaaatgacgtgcacacagatttagctacaagtaattttgcaaaagtgaaaagttgaaaacaacccaaatgtacaaaaataggggagataattatggtacatttgtataatagtatgccacttggtcattaaaaatgccatagaagtatatttttcataaacttatttctagctgctggttttacaggtggtttttgcttttttattttatcatttatattttcctgtaattattgcatattttttaataattttttaaaaccggcaattatatggtgaaaaggagagaagggcattagtaaattctgaagcaactgaaattaaattgtaattgctcattaataaataaacatcattacatactaacatttaccttaaataaactagatttcatttttctactatgggaggaaagacctaaaatacaaattgactcgaattatagaaaataaagttacaattcaggaatatctgtctttggactgtgaaatttgtacctgttatgtatgtgtgtgtgtgtgtgcctgtgtgtgtgtgcgtgtgtataaaaaatatttggaaagatatccactagtttaaaagtggttcctttcagcagggtgggatgagagggggacaggagacaaatttttatttacacaactctgtatgacttgttataacaagcacgaaaaatcgaaggtcacttaagtaaaaatggttataattatgaaaatacttagaaatatgtaaagtctctatggtatgattagaaatcataatgcaaaatctgtatactgtgcttatacctatgttcatatatttccatgtgagagaagcccgaaggggaatactctgcggtgaaagtagcttttcaagttcattcattggttcatttattccacaaatgtgtgctgagctgctaccatgggccagccaactgttgcagccaccgggatatagcaatcaaaaatcaaatgtgcctccactcagggaacttaaattctagtagtgggagacagacaatacatggtaaacccggcgagtatttcaggaagtggtgagcgtcctgggaaaagtggagcaggccaagggagactagcagtgctctgggtcaggggcaggtttaaacaggttggtcaggaaaggcctcactgaggtgacatgggaggaaagatttgaaagagctgaagggttcagtcctggaaatgcctggaaggggtgttttacaaatagacaacagccggtgcagaggccaatgcagctaacagaggaaggggagagcaggtcagacagctaggcaggccagtgggttgtccggctctgcagccattgtaaggactttggcgttttatttcaagtaaactgaggagccgctgtgcagtttggagcacagaaacgacaggatccctgtggctgctgtacggaaacccagcgactgggagggtagggagggcagggagacctaggtgttcaggtgagggatgaaggggggtgtggacatgttgaggtgttgcatcctagacacagattgaaggtagggtcaacaggatttctagtcagattgtgtagagggggtgagagagtgaagctggctcttctggttctggcctgagtaaatggagccgccattaatgcccatgggaaagacaggtgggcggagaaggtttgaaggtgggggaagaaagggtcttattttcttcttccttgcaataatatatcccaagcaatataattaagcaatatgtatttttccctttaaggaaattccaaaaattatatcgttccaaataaaaaaatcatctccagagtcctgacgcagcaaccattacattcccagtaatggaaatgttaagtcagtccgtgctctggagaaatcccacgacagaacacaggccaggagaccgggcctagattccggttttcgaaccgtgggggcaaacacggaggctgcaaatccatccccagtccggcaagattctcgaacatgtcgggagagggctgcataggaacttcaaaaacgagtagcggctcccctggattcagcgtgagggggaaaccgcggggcaggttcgaaactcaggagtccgacgtctgaaggagcgggaggctgcttccgaggagcccggggcacgacgggaagggccgcgccggccaggcagccctcctcccggcagcctcgggcaggccgttcacgcgccggcgacggcgggcccggccgcaggtaccaacagcacctgtcagagggcagcgcgggcgcaccctgcaagggccctgcctcgtcaagagaggcagcgagaaacagcagcgatgaacgaaacaaaaccttcctccaccacggctacacagagctcgcgtccgaggaagcgggaacacacaggccccggtgctttccgaaaggcttctcgccaggacccgcgaccagcgtggggcggagggggggggtcaccctttttgagaaaccaggtcaagcaggccgtcgctgggcgacctttgggcggagggagagggcagggctgcaccgcacaggttccgcccctacttcagcgtcctcgcccctcccaagctccgcccagcaccccaagggccaacccccccgcgacgcatgcgtgcttcttcccgcgcggctccacctgccgcgcgcttccgctgctggccagtctcttctgcccctccccctcctgtacggccgctactctgcgcccggcttccttctcacaacctggttctgcccacacctgttcttcagccctgtgaacagtggctgtagaacagtctcaggccctgcagacccacctccctcgctcccgtggtggcggtggtgacgggctggggacgttgggtagaaaaatgggcgggatgtggaacgctgcgttgccggggcccacttccggaggacgggcggaagtggctgcggtggatggtgggaggggggaaggagtgcgaggggagggccgggccgctgggggtcgagggggtggggcctgggccagcgctggggatcgggcctggggcctggattgcgacccgcggcgggccgcggctcctagccgagacggggcgggcgggaaccaggtaacgacccggcgcagttagagcgagggtcgtccgcagggcggacgggtgggggtcagagtccaggaagggtcgcagtgtcaccctcttctcttgtgaacacggggcacggggttccggggagaagggtgggaggagttaaattcttggagggggtggaggtcatgtggacgccacgcccctacaggaaggaaaggagagagagagtgtgtgtggatggatgtgtgttgagagagagaatggatgtgtgtgtgtttacgaataaacttggaggggagggggcaacaggggtgggttttcgggctgagaaatgggaacactgtggggctgctgcaagcaggacttgggccttaaacattccaggagagtgttctcgggagtagccccgggaaggactttaacagaggttgggaattacatctctggcacagttttgcaagcagagggggagcttagttaaaggagcaaagaatgcaagtggaagatgccagcatctcggtctggaaaggatttattaactagttgaagagggctggtggattaaaacactcagcaccctaagaagcttgggagattcgattattatgttgcgctttagacaggagggcaggagaaagggcgttcttttctcgatttcttagaagagtctccggttacttttctgtggtgagaacgggtacgatccatcttttatcctgaatcatgtatgtttgtacatacatataatatgtttatattatatgtgtttatatatgtaaacactattgatgaggtgactgtgttctggcgtgtgatacgtgagttaagtaggtgctttgtataaccttgcggagtgtttaacgaaggtgttttgatgatagagcctagtatggactcttaggtggggagtggaaactagaaggttttaggactctatttgggtatctagattagagagcgttataatgtttaaatgttctgcaggttaacacagaaatctgcctcctgggccatgccgcttctaaggcctgtttcttctcatgagccccagcacaagacagatgggccagttctcacagtggataacttcccctgcctgagcaagagatgggatagtatctgggatctgtccatcaccagactctgagcttaataaggcagctgaatgaagggaggtaacggacccctgagaggggcactgaagtctgcagtggggggggaggggcctggacacaccccttcccccccagactcctccccgtcagggtcagctcagccatggactttggacctggataagaagagagaagctgcactttggtggat

SEQ ID NO: 10582 - DNA, 6000 bp, Homo sapiens
atgtctttgttattgtgaatactgctgtaatggacatatgtgtgtatgtatctttataatagaatgatttatattcctttggggtatatacccagcaatggaattactgggtcaaatggtatttctgcttctagacctctgaggaatcaccacactgtcttccacaatggttgaactaattgacatttccacaacagtgtaaaagcgtttttttccctctgcaaccttgccagcatctgttgttttttgactttctgataatcgccattctgactggtgtgagatggtatctcactgtggttttgatttgcatttctctaatgactgctatcttctcaagttcagaatctcatgaagcaaatccatcaattcattcaatccagaaaaaccaatttttcttttaagaaatgttgtcccccaaaatagactgagaaacaaaaacatgattcttcttaaaatgagtacttcaaatgtgttttcagtgtattctgtactatttttgatactggggtgaacaaaagagcacctctgccttaccttttcctatgcagaactctatcagcctggtactttttagtttaaaacagaacaagaacaaccaagaggtgccagcttcactttcaggctgtgctactaaatatgaatagccaaaaaatacataaaaataaaatggaatatctgtattcccctattgtaatacataatgactcactataggagctggaaagaaaaggagttgattttccacactggcaacaaccaactccatatacagtataggcacacctcatgtgattgtgctttgttctattgcacttctcagatactgaattttttacaaattgaatgtttttggcaaccctgtgtcaacaaagtctgttggtgccatttttccaacaacctgtgctcacttatgtcactgtgtcccattttagtcattgtcacagtatttgaaaagtttcattattatggtatctgctatagtgacctgtgacccatgatctttgatattattttaagtgttttggggcaccacgaaccgcagccacatttgacggtgaacttaatacatgctgtgtgtcttttgactgctccactgaccagctgttctccatctccctccctcttctcaggcctccttattcccagagacatgacaatatttaaattaggccaattaataaccctacagtagcctctaagtgttcaatgcaaggaagagttgcatgtctctcactttaaatcaaaagctagaaatgattaagcttagtgaggaaggtatgtcttaagtcatgataggccaaaagctagacctcctgcagtaaacagttagcccagttgtgaatccaaaggaaacgttcttgaaggtaattaaaaatgctactctagtgaacacgcaaatggcaagaaagcaagtcttattgctgatatagagaaagtttgagtggtctggctggaagatcaaatcagtcacaacattcccttaagccaaagcctaatccagagaaaggccctaactctcttcaattctatgaaggctgagaaaggtgaggaagctaccaaagaaaagtgggaatctagcagaggtggcttcatgagatttgaggaaagacatcatttccttaacataaacgtggaaggtgaagcagcaaatgctgatgcatgttatctgaatgatctagctaagatcattgatgaaggtggccacactaaatgacagattttcaaagtagacaaaataaccttctgttataagaagatgtcctctaggactttcatagctagagagaagtcaatgcttggcttcaaaggttcaaaggctaaatctcttattagggactaatgcagctggtaactttaagttgaagccaattctcatttactattctgaaaaatccaagagcccttaaaaattgttaattttattgtgcctgtactctataaatggaacaacaaagcctagaggacagtgtatctgtttacggcatgctattggaatattcatgagctgcatgaacttaaaatatttctgaatattttaagcctactgttgaggcctactgcttagaaaaataaaaagatgcctttcaaaatattacttctcactgacaataagcctgatcacccaagagctctgatgcagatgtacaaggaaattaataccattttcatgccagcaaacacaacatctgttctgcagcctatgaatcaaggtgtaatttcaactttcaagtcttattacttcagaaatacattttataaggctatagatgccatagacaaggattcttctgttggatatgggcaaaataaattgaaaatcttctggaaacaagtcaccattccagatgccattaagaatattcatgttcatgggaggaagtcagaatgtcaacattaacaggattttggaagaagttgagttcaaccctcatgggtgacttcgtctttgttcaatgcatggaggaagtaactgtggatatggtgacagcagcaagagaaatggaatcagaagtggagcctgaagatgtgaacaaattattgcaatcttatgataaaacttgaatggatgagttgtttcttatggatgagcaaagtagtttcttaggatagactccactcttgatgaagatgccataaacattgttgaaatgacaacaaaggatttataatattacagaaatttagttgataaggcagtgacaggatttgagaggattaactgcaagtttgaaggaagttctagtgtgggtaaaatgctacaaattagtatcatatgctacaaagaaatgtttttttgaaagaaagagtacatggatgtggcaaacttaattttgttcttattttattatgtctttatccttttaaatttttttttatttcaatagctttaggggtaccagtggtttttggttagatagatgagttgtatagtggtgaagtcagagattttaatgcacccatcacagaagtaatgtacattatacccaatatgtaggcttttttgttttctttttgtttgttttattgagatagagtcttgctctattgcccagtctggagtgcaatggcacatctcggctcactgcaacgtccgcctcccaggttcaagcgattctccagcctcagcctctcgagtagctgggactacaggtgagcaccaccacatttggctaatttttttgtatttttagtagagacagagtttcaccatgttggccaggctggtctcgaactcctgacctcaggtgatctgcctgcctcagcctctcaaagtgctgggattacaggcatgagcaaccgtgcccggcccccaatgtgtagttttttaatccctcatcctcctcctgccctccccatttctgagtttccaatgtgcattatatctctctgcatgcctttgcacactcatagcttagcttccactgtatgttataagtgagaacatacagcatttggttttccattcttaagttacttcccttggaataatggcctccagttttatacaagttgcttcaaaggcattattgcattcttttttatggctgaattgtattccttggtgtatgtatatcacattttctttaaccactcatcagttgatgaacacttaggttggtttcatatctttataattgtgaaatgtgctgtgatacacatatgcatgcaggtgtctttttgatataacttctttccttttccatagatacccagtagtgagattgctggatcaaatggtagatccactttgaattctttgagaaatctccatattgctttctattgaggttgtactgatttatattcccatcagcagtgaataagtgttcccttttcaccacatccatgctaacatcaattgttttttgactttttaataatgactattctggttagggtaatgtggtatctcattgtggctttaatttgcagttccctgatgattaatgatgttgaacatttttttcatatgtttgttagccatctgtgtatcttcttttgagaaatgtctattcatgccatttgcctactttttaatgggattatttgtttttgtccttgttgatttgagttccttgtagattctggatactagtcctttgttggatgcagagtttgcaaatatattctcccattctgtgggttgcctgtttactctgatgattatttcttttgctgtgcagaggctttttagtttagttagctcccatttatttatttttgtttttgttgcatttgcttttggggtctttgtcatgaattctttgcctgagccaatgtccagatgagttttttctgggttatcttccagaatttttatggtttcatattttagatttaagtctttgatccttcttaagtttctttttgtataaggtgagaggtgcaggtttagttttattcttccacatgtggctatccagtttacccagcatcatttactaaacgttgtgttctccccctgatttatgttgttgtatgctttgtcaaagatcagtgttattgtaagaaattgccacagccacccccaccttcagcaacaacagttcttgttactggcggtgaatccctgtgtgtctgcagcagcctcaattcttgcctcctcagaagaaagaattcgacttaggaggcagaaggcagaaggagagaccaaggtaaattttagagcaggagtgaaattgattaaaaagctttagagtaggaaggaaagacgggaagtatacttggaagagggccaagtgggcgacttgaaagacgagtgcacggtttgacttttcgacttggggaagtatacgttggcatacttccggggtcttgtgtcccttctcccctgattcttcccttggtgggcagtttgcatgcacagtggcctgccagctcttgggaggggagcatgcagagtgtgtttaccggagttgtactcatgctcacttggggccatcttcccttatcagctgaatgttcctaggaggtcatataccagttaaactccgccattttgcctcttaaatgcacctgtgtgagcccactcacccgactcctgagatcttattaagaagatgctgatcaccagtttcaggttttttctatctacagggagactgcttttccctggtgctggctgcaaccaattattattttagcgagacagttaacaactgcctgaacatcacctgagggtcacctgacatttctagttgggtggggggtgccctctcctgccctgttcatgtctgaccagctgtcttctgtagcaccttgagtcagcggctgtcaacactgaggcaagacctttcatcagcaaaaagtttatgacttgctcaaggctcagttaacagcatttttagcaataatgtgcttttaaattaaggtatgtgcattctttaagtagtgctatttaggctatagtatagtttcaacataatttttatatgcactgggaaactaaaaaattggtgcgactcactttatttcggcattctctttattgcaatggtgtggagcccaacctacaatattagtgatgtatgcgtctatttacttttcaattcccaatggagaaaactgttttcagatgttttagaatttaaagataaatttatccttgattcctatcttgctgcctcttccaaatattggtgaacacttcttttttcatataatctggcaaaagatttttatagaagtatttattcatgcaatgttataaaataatgttttgtggcaaaaattataatgtaagtaccttaacatgcaatgaaggaaacaaaactcacagagaattccaactctcagagttgacactatgcttgttttggaagttcctatggggtgttttcttttcatttatgatgtatttgagctcatattgtatcttcaatttagtagcttgcctttttcacatgtgtttaaaattcttagtaaatgttaattttttgtacaatatacctaactctcctttggtttttagatatttaggttattccagatattctc

SEQ ID NO: 10583 - DNA, 6000 bp, Homo sapiens
atgaatgtgataaagttaattttagttcacctctctgtagttggatgtttttaggtttcatatgactataactttaaaataaaacctagttatttaaaaattcaactaaccagacttcaccacaggtttttttgttgttctgctttttacattcatatttaagaagaaaaaaaaatcaaaacaaaatggaagacaactaccacaagttcttctacacctactgcctctaacacatccactgttacactctggggttaagtcaggtcctgttcattgtcttagcattctacaatttccaaattctaggaggagaattgacattcatgatgatcctaaaatgcaagctatttaaacaaggaatgattttaaaaccatcattaaattaaaaatcaacttggaaaatattgaaaaaagattaaaaggttttctaatccattttgttgctcaaaaaaaaatccaattaaccaaaatttcctaattttgaatggtgaagtttgactggcctgtaccatgctaagatcagcacgtgcttattaccgtaatctcttgttcttcaaaccaataaatgctccctttaaggacaggttggatttggttatttcttgttatactgacattttttcccaaagaaagaatttactgataacatacttcatcacacaatgttcacagaaagatcttgacagattttttcagcaggaacagcatttgctgctggtgtttgtgtttttttcatttgataatactaacattaatatgatcccccagcttctgtgtctcccaccctgagtagctttaaatgaaatacagcatacagagacttgttcataatttcttgatctttcatttatttagtgtttctagaaggaaaaaaaaagatgttttaaagctcaagggacttaactataaagtagaggggaaaaggtagaaatacgcgttgaggaaacccaggaggcccccaggcatgacttttgctatagctttccagaaagagaaagtggtgcttaaagaagtaattcccaatgtttccctccagactaaaattggatgaactctgaactgagactctttgcatctcattttctcattaggttttattacagccaacaaaactttcagtggtgaattacttcccttctcaacagaataccagactcccataatgtctacacaaactgaaataatgaaatggtttttaaccaagctttagggattagagaggaaaaaaaaagtgaaaaagaaagggcaccagggtcttcccatctctatgctaaccaaagtgtggttttccagccctttttcttgcctattaacaaaaataaaaacaaaaaatggaaatgccactgggcttgaaaccccatttaaaatcagatttctctttcgagttcccttgcaatacaagtcaaagtcatttccaccaaaaaaaaaaagcggtggggggggggggtgtgcaaattaatcctaaactcatggctcagataggacctggtatagtaaataaatgcttttaaaagtagtcatggcattgagaaatggctccatgcacctaaaccagaggcaccaatgtaaaaactagtaattgtgttttaacacaaaagattgaaaagcgttttgtttcacatcctaatattattccacccacttaaaaagagttacttaatattgactctgtattaggtataagacaagttcttgccctcaaagaacttataatttagttgagaaaccaaaacttaacatgagcttaaaaagaaggatgcagtacaaaacatggtataattaagtgctaaacaatgtagtatagatgctcagtgacctaggagatcagaggaagggaagggtcactgagggctgggaatgtcaaaagcatgtactttcagtaagttcttaaaatgatagcatgttagaaagctgttataattgctgctgatttgtaattttaaagcattgacatgattcaccattgctttccaaccagtagctgtttaaaaggacatacagttgagggtgaaaggagatatttctttatgatctccagagatttgtattgaggggaaaaaagacatactttcttgttgaataatagaccaagaattgagcatattttgcatggggaatattaaattcagtgaacaagaatccaaacctcaggctgtgattctggtataaatttttgtttctaatgaaccattttcttccttctaaagaagatttaagttttgggaataagtcacctcaaaaaaatttttttttattttctaatatctattttcacaatttatttttcttttaagaaaagtggactagaagctcaagttaccttctcaaggcaatgagaattttttagctctaaaaaagttgtgtgtggtagggagaacatttagcatcctttaaaatggagacatctgaacagcaacctatcttttgaatcaccaaatctcaagtgtactttgcactcttggtcttaaaatgcttttcattttctagtttggcaaaaattccagtctctttacatttgctaccttttccgtctttgcaacacaggcagtgtgagctaaattaggtttgttaaaatgaagttttgaagtttcaactgctgaaatagaggcatgtccctaactttagacaaatttagagaatcgtagtaagcattattttttttctacatacttgtctgcattcagtgtcttcccaagaaacgtcagttaattccccgattcgaaaaaggaactttctcgtaacagttgtacaaccaggctaaagagcacaccctcgtcttccctgaaagggaggaaacatgcaataatgtgaggtaattaaatttagccttagaaaagtctttgaaacgttctaatcaagactttcagctttccgattgtgtgcgctttatttttcaattcttcctagtcccggttttgcatttctaatgacagtgaactgacaaagcgtgaaagtggtctaaggagcaaaacaaagccagcaagcctgcttctggtgtgccaagattaatcaatattccagaaacctcggggtttccccctcctccctgtgcggtttccattccccactcctcctttcccgggcacagactcctccccttttcttaagttgccctgatagtaacttgcagtttcagagcacatgcacactgtcagggctagcctgcctgcttacgcgcgctgcggattgttgctccgttgtacctgctggggaattcacctcgttactgcttgatatcttccaccccttacaaaatcagaaaaggtaagtgtcacattctgtgttcctgctgggtttaatttctcctttcacttctctgccgatgtattttgccttccaagcagaggagtagcctgaatcaaggctagccattttggtagataaagtccttgttagtcatctcacgtcgtgagagtgtggtgtctgtttatgccgggtccgctgttaattcggagttgagtcattcggggtggattgggggcagattgtggcgcgagatctagaaaaggatcaaggttgagcggatctgcttaaaagtgactggtaagaggaatcagagctattagtttaaaaaaaaaaaaaatctggtctctcctatttcccggtcttcacttctccctaagcatttaatccagtgtgaagtcttaaacaaattagaagtcttagtatcactgaccccaacttgcaattttatttaaaaggcaaactgttaagacaagtctttttttttcctgcactgggattgcgagaagtcatttgcgaggagtcctttggtttccagttacctcccccacaggcgcacacgctggctgcttgcgttggcagcgacacacatccatggtacggctggttttcactcggattgattatgggaagggctatggattagagctcctgtaaagcaccaggaggaatcccttgatttttcagaacagctgatttccaccaggaaagagatttactgaaatgtagttaaatagcgtgagtgctttaaagaaaccagaaaccacaagctgtaatgtttggaatgaaaattggtttcatctcatctgttctagaaatcctaaattttaaaacgctaaaaagtcagcgatagtttcctcggaagattccagcatgtgtgtcacaaagaaaaacactacttcatacttctacttgtgataaacgaagctgaattgtgatttcagatgatttatagatgtgcccagagcactttgcttatttcatggaaaaaaaatgaaaaaattaccctgtaaaatagtcacatgtatttcccatgtactgtgggcacttgtgttctttttatgaccatatttactagtagatattattatatttttttcttaatgaagaaaatagctggttactttactgcatgtaacagagacaactcccacctatcagtatcttaattatttttattgacctggttatgctttcaaccatgtatacagcataatttgtcaagtaatgattgaatactttctgtgcattcagttcaattggacatttactgattgtgtacgttgtgcaaggcatcagctgggttctgcgggggagggtgggaataggggttctcagtcagatctagctctgaagaacccttttatagcctcattggaaggggaaggacggatttttaaaaagaaaatagaatatattccgaatttatgcacatttctcacacgtggtccactaaaatatgcacactgcaaccttgaggtctggtattgtggctctccagtccttgattcctgctgagattatgcaatttgccaagagcttgcctggtgtggagcagcactgatttctcacccctggaggctataactcatgtctctttttctcccattctagttgtgttttctaataccaaagaggaggtttggctttctgtgggtgattcccagacactgaagtgcaaagaagagaccctcctagaaaagtaaaatatgactaaaagcaatggagaagagcccaagatggggggcaggatggagagattccagcagggagtccgtaaacgcacacttttggccaagaagaaagtgcagaacattacaaaggaggatgttaaaagttacctgtttcggaatgcttttgtgctgctcacagtcaccgctgtcattgtgggtgagtcatttgattaaaaacaaaaaaacctgtatcttgtttctctggggcatctggctgcccggggaatattatcagatgaactagttgtaggtatcaaaatggtagcctaggctttcctctgaacttgatgatttttctccataaaaatgactgttttggcttgtttggagcaatatatagtaaacacatcattaggcatcattaggcattatgcaaatcaattgtgtgaggaagaaaaataaataaaatattttcccatttcatgtaaggataaggaagtgatcatttaatcattaggcatgacaaagcaagcatgctagatttggccaaaatgtaattatatacaatgtcagttgcacttaaaactaatttatacaattagtacacctaaaatgacatgttggttccaaatagtaattatattctaactggtgctgacttgaagctgagtatcaacgcttaggcacagagaccgaatattttatgtgtttgcactctctcacccagcaactgggaaaggtagattggggaaaatgttaacacagatctctttcattcattgctttgcagagcctgccataaccagctatacctttttttgaatcatttccatctcttactaatttagcagggttgacagcaatctgtactaataaaatattattgttttgttttgtttattgatcttaaaagttatagtttattacttatgggtggcattgatcctactttaaaatatagctgaaaaaacctacttatttggaatttttgaccaaaccaatacagaaatccttagattgacaaacatatacgccaatgccaggttgtaaaaatattccaacttaacctaccaatttgccacca

SEQ ID NO: 10584 - DNA, 6000 bp, Homo sapiens
gggatgggcagtgagggataagatttctaagcatagagaacagcatttgcaaaggccttgagtcagaggaaaggatggttcatccaaaacattgaaagaagagccagcacagctggagcacggtgagaaggaatacattggtgagagatgaggctcaagcttgcagggccaagtcacttaggatcttgggaagactttgaagggactcaagtcacaggtctgacctgacattattccgtctaaccaaccaattcttgaacatttgcactgaaagagatgacccagtttctgtctgtggcttacagcctcatggagagaaccattcttattctggtgggtattagggttttgaagagacacaattaatagcactttttttggcccacttttgaaatcaattgaaaaataaaacaacacagtcagcagaggaagatgataaggatgaagatgaagcagatgaatcaaatgccattcttatttctaaaaaggctgggtcagaagacgtagctcattctaagagccaaagtgagcttgcaaactcccttctgtccagtccagactatgggagagcccacttgagggaaagtttgggtttgcacaggagtcacacctacccaggctactgttttccactatgctaggtggagagggaaggtaggaagaactgaattaattcattccaaatcgaattcctcctccctccccaggttcttttttatttttgttttcgttttttttttttttttttgagatggagtcttactctgtcacccaggctggagtgcagaggcactgtcccagctcactgcaacctccgcctcccaggctcaagcgatcctgccatctcagcctcctgagtaggtgggatcacagacacatgccactatgcctggctaatttttgtatttttgttagatatgggttttcgctatgttgtgcaagctggtctcaaattcctgagctcaagcgatccacccactttggcctcccaaagtgctagggttacaggtgtgagccactgcacccggcccccaaggtcctttgatagattagcttccctccttcagaaatgtggacctactgcttccacttagcagccaagtcactgtccccacctctgtaggcagggaaagcggttggacaagaatccagcagtacttcgggagactctattctcatgactggaacttcaagagtagggaataagtgttcctcccttgttgttgctaaaagacattaagagaagggactcaaaatacaacctgctccttttgagtgaagatggattccgataaatgacaatggatcacctcctacaggagaacacaatgctacaatcccaaagcatgtgacttccatgctggactaacttctgtttgctttttcatccacataagtaaaattctccagttgtttcttcttcaaaccttgcttgatgtgacagatacctgcaatatgtctaaattaaaagggtgacttttaggatcacagaatgttagtgctggaaaggttttcaaggtcatcaagtctaatcctactccttattttattggaaaacacaagacccagagagatgaagtggcctgctcaaggtcacccaagccatttatgtccttctcccaattatttggattgtatgactaccgatatttccaactacatcatgttgatatagctgagaaactcattatttatagaaaacctgtgatgcctttattaaaacaaagcacaggtttttttataaaataaaagtcacccttttatctattaacaaaaatttgtgttttgtttattaactttttttaataacccctgaactagtggtttgattattctggttctaataaatgtctcctttttaatgttctcttttcctaattaacaaagtaccaagtagaaagagataagttatgcactttaattacaataaccccaggctacagggagaattcttatcactggcttggaccgtacattctgtgctcacttagaaataacattggtaaaaacttcctgtaagctgtggatttgggatctgaggtggcggggcagtcaggaaagagaagtagtgaggctttagttccaggtttcttccatcatgctgtgactggttctctctgtgctcatttccttcttattaaaaatgggaaatgactattatcctggattattatgagagagggagtttgggatgctgcaaagaggactgggttgcagcagcaggagcccagaattctagatcaactctgccactaatgagctgcttctctgggcgagtctcatggattctttgagccttagttgactcctctgtaaaatgggcttgttgtgttagctgatccctgcggtctctctatgaaagttaaaattactttgactctaaatccttgtgattccatattccttttccccttcttcttccgtaccctatgtttccccaaactgagtgaactcaggtttcaaagaaataggttacaaaaagtgtcaaaacggaaacaatttttacagagaccaaagaacattatccattgaaaaatatgtgccttattttacttgtcgaaatgagcagagaatccaggattatttccattctcattatggtatcattttgtagcagcagcaatttgcttgtggtccttttctctgaggagttcccttcaagaaacagaatttcctagagcagatggaggggcagtaagagatctcagccacctacactctaacccttggcttctctaggttccaggttcttctgactgaactatctttagatacttgatgccaaaaaaaattgtgcaatagagtcttatggacattgaactagagtcatattatctgattctagagttagagcttcctctaatgggatgcatgatcttgattttaagtcaattcttttctgtggcctcggtttccatgcttgtgaaatgacaagattgggctggatggtgtttagatctctttccattcttacttctagcttcatttgggggaaaaggacaggattggtggcagttttcggggtctttggattgggaggcagagtcccaccatgttgagcaagggcaggacatagttcagcactgtgggagtgtctcctgtcactcctctcaaaggtgttgacctttgttgagtacatgaagtgttagtgacatggaggaagggaaaggatatgaagaaatctaaaatatggtttctgccctcaaaggatttacaatcgagttggtaaacacaagggcaagagtctaaggccaggagcccagaagatctacataccatcttacacgtgtgttgactttatcaagcaatgggcatttatgctgattggaggcatatatccatggctgggttgccccatccaggagaagatgaaggaatgtcctacaagtcttggtggcttcttactttgtggagtcaccatttttcccagaagagtctgttttctttttaaaatgtcgcttgattttggtcttctgatggcacacattcagctctgtctccatagaatgcatgccctctgggagaataggtaggctgtgtgtaaggagataggagtgggaaaaagatgacaatgggaaaaagcattaaccaaaatcctagggtaagaaaatacaagatgcattcaggagacaactggcaggccagtttggctattatatagcttttaaagagtattttttaaaaaacaacaaaaacctgaaaacataattaggattcagattaagtagcatgatgtagtcaaaagagagaccaaggataaaatctagccctgccattccccatctgtctgccttgagcaagttatttaatctctctgtgtctatatctccacttggtaaaatggaagtaataacaccaattttatagtattttgtgaggattaacttaagcgatgtatgaaaagctcctggcacactaagaatgatcaacatatggtaattttctcaaattctaggatctttctacctccacagtggcttcttctgcaataggcgattaggagagcagtcaccagacagaccttggatttgagtttagctcagccagttataaagtcttcaattttaggtaaattacttaactactcttaactcagttttcttatgtataaaatggattagtcatacttaccttgtaagattattgaaaagtttagaaatatatcatgttaagcacccaatagtacctgataagaagaggagatggagtagaattcaataaatcatggtgatgggggaagaaggaggaaaaaaggagctgttttaattgagaaccttgaattcttgaccaagaagcctagaatttatgttgtaggcagtggagagtcactgaaggtgatttttcagataggaaatcataggataaagatgaagagaatcttaaccttgttgagaatgtgttaataaggtgcacagggcaaggaagaacagcctggaaggagagagaccaaactactgaagacaaaagccagcttgctttatgtatgtgctgtataattcttttactaccaaatggatttcttcttctggaatctaacaattctgaatatgtgagagaggcagagatagaaatgaagagtgagggaaaggacagaggggagaaagagaaagagagagaggggccgagagagatagatacagtagttccctctccgcaggggatgtgttccaagattcccagtggatacctgaaactgcagataatactgaaccctatatatgcagcagaactagcataaatttcattttccttcttcacagtttcacagatagaagattcattcttgccatagatcttagcaacctcagcatatgatttttttctttccttaattcagttgagaactttcaccttttaatttaaaagatgcacttcatggcttctctttggcatatctgaatcccagaatcactgctcttgcactgtggggccattatgaagtcagataatggttactggaacataagcacttcgataccatgacagtgaatctgacaactgagacggctgcagaccatggggcagggagcatatggagcacggatatgccagacagagggatgattcatatcccaggcaggatggagcagggcagtgtgctatttcatcgtgctactcagaacttatgaattgtttatttctggaatttcccatttaatatttttggactgtggttgatcgagggtaaatgaaattgcagaaagcaaaaatacagataagggggactgcttgctgtacaaagatagagacaagaggaaggagctgtcctcaagggccttttgtgtgaagacatctggcacacagatacgctgcatgcaggtggcttgagagaacatgcatccaggtataaatctggcatcgacaggttgaattttcagttgacaggtggactactttaaataaaactggggaattggtgtggaagggatgagaacaccgcctcccctttgttatcccacctccaccaagaagtgcccgaacccctgagaacagctcactccaccctgtctctgggtcatctgcatcatctgctgactgcacttctctcgtctggtctgggaggagattgatttctggtcaacagcacgccccctgacaaaaatgactttctgccatttccttccactccattttcaatctgattgctattctgtttggaggagtgctatggtcggaatgtttatgtctccctcaaattcatatgttgaaatcctaacccccaaggaggggcctttgggaggtacttagatcataagggtggagtccttgtgaatgggatcagtgcccttattaaagaggcccaaaggggctggtttgccctttccaccatgtgaagatgcagtgagaaggcaccatctgtgccctcatcagatactgccagccctttgatctgggacttcacagcctgcagaactgtgaaaaataaatgtttgtggtttacaagccatcagtttatggtacttttgttgtagcagcctggacagacaatgtaggagggtg

SEQ ID NO: 10585 - DNA, 6000 bp, Homo sapiens; identical to SEQ ID NO: 3427

SEQ ID NO: 10586 - DNA, 6000 bp, Homo sapiens
tgcagtggcgtgatctcggctccctgcaacctccgcctcctgggttcaagcgattctcctggttcagcctcccgagtagctgggattacaggcacgcaccaccatgcccagctaatttttgtatttttagtagagatgggtttcaccatgttggccaggatggtctccatctcctgaccttgtgacccgcccaccttggcctcccaaagtgctgggattacaggcataagccgccacgcccatgcctggcctagcaagccctggctgggtttttgccaggaaaacatgatagcaggtcatctaggcaaggaagttaaatccattggcaagagaatgattgaagtcatgagccaagaagcctaagctgaaacaggaaggaagtgaaaaaactgaaagtattgatagggagaaagggggagaataagtggaagaacatgtttctataatgtgaaataatagatgtggcaataataaaaatgagagttaaaagaataagagatgttagaatataggatggttgaatttgggatttcagaggaagaatcagtcttggagaatccaggatctaagctggaagaaggagggtattaattaaagaaaatttaataagaccacaccactttgagaaagatgattcctgcagctatgtgtaggtagataggagtgagaagatgctgaactaaagcagctgagaggtttatttgtatttgaattgtggatataaagacaggcggaaataggctaattttttttttttttgcattgaaagggatgtgtataacttttctttctccaaagagataataaactaaatattttttaaatcaataatatatatgtgtgtatgtgtatatgtgtatatacatatatgtgtgtgtgtgtatatatatatacacacagacatatatatattctcccagcccaagctgaatttttgcatctgacttttaaacaaaccaatttcataatgtgatggaaataatgctctaataaaagatttgttgaaatccatcttcttatctttcttatctttttagcatgcatatctaatactcaatgggggtagtgataacagtcatattgtattttctggtattttggtgtatttctgtcttgtattttttgactgggcatatacttgcatgattgtggttaatagcatcttcacacttatacctgtcttcttatttaatgtgacaacatgaatattttgctttcacaagcatcatttagtatgactgtgtaatattgtcattttctttccttttagttttcaaaaaagtatatcatttccatcagttcaatttcctctgttccttatgcttggatctcaaacgcagatgtgtatgtatatataataaaaacacaaatgcttgtgaaaggagagctcccaatttgaatatttatatagaacaaacacagtgagagggagtcttcttgcctgatttgtttcattcccacagggactgacatttttagcaaattagttgtctataactttaacaaatcaagagagttttacatgaagagtcaaatttatcccttggaaaaaatcagacaatttgtcaataccagaacctgtagttacatctagtgactgtctagtggatttgagtgttgtgtgtcccttttagacagggtacgtgttcactttttcatcaccatgctgtccactggaggtttccaacattgacattacttgccagttccctgtgggcatttcattttgacacttgatctaaagcaaaataaaggataaatgaatgattgtctcttcaataaaagctgaagctgtcacttctcatttagctacatgtgactaacctattgtctactttaaaattcttttggggtgaccctttcttctatctagcaaagaaaaaaatgcaattttagcatttatccaagtgaaacagaattagaaaattaaatccactattggatcacatagaacattccaaaacaaagtccaaaagagctaattgtttcatatcacctatttgcatctctgttcctctttgttagatgaaaaatcaagaacgaaattctttctagttctctgtcagtgtagcttttgttaatttgctcgcttctgggccaaatgctgacattaaaggaacatggaagttgtttgtacctaaatgcattttgtgagtcacttgggattgccattgttggtaccatgtgtcctgcttaataaaaaaataatcgtagaatgaactctttccttataatcatactggcctggtcttaatgagagtcacagttgctttgtgccaatgaagagcttttctctttgggaagattgcatgaagaaagtatgcatgataaaggatccagcattaatttagtcatagcaaaatttttcattttctttgtaggtgaaaataaataatgattttaattatgaattttacaatagtacttggtcttatgtaaaacatacgtcgacagaacacacatcatctagtcggaagcgctccttttttagatcttcatcatcttcttcacgcagttatacttcacataccaatgaaatccataaaggaaaggttagtataaaatgtcagttaacttttccatgttttacttttttaagtattgcttacattaataaacttgtatttatcaaaaggatcagctttcatattaaaattagtaatagtaatagtacttcctttaagagtcaatgcaatatctttctctaaaaggtacaatattgtctcattaaatctctttgataatatatttatttatactggccaggcacagtggttcacgcctataatcccagcactttgggaggccaaggtgagtggattgcttgagcttgagctcaggaatttgggaccagcctgggcaacatagcaagaccctgtctctataaaaacacaaaaattagctgagcatggtggtgcatgcctatagtcccagctacttaggaggctaaggtggaaggatcacttgagccttggagggagaggatgcagtgagccaatatcatgtcactgcacttcagcctgggcaacagagtgagaccctgtctcaaaaaaaaatacatatatatatatatatatatatatatatatatatgtatatttagttatagttttaaacttctcattaaaaatatttgtttttatttgaagatgtttacaaagcccttattaccttgaaatcttctattttaaacgatcttaaatttcttaaatttgtgattactggtgatactattttaagtgtcatatacaattttaaaaaatctaattaatgcttatatatgcttcttaaatgcaaatgctagaggctttttagatggtgcatgaagataaaatactttaaaaacactttattacttttgagataccaacatttttatctaaggaagttaaaagacatttttaaatacttcattgttttgaaatactaaaaccttcctcttgagaaatctgaacagtagagatggattgtactaattgatatacagttatggctgaataatttttttaggctaattattattcacaatctgcacatttcatcacatcttaaagttagtaacttgattaataaatcacttaggaaaatataaggaatattgattttatttgttttatgactgagaaactgactatggagctatgagttgtaaaaacatttattgtctccacattatattgttcacaaagtggggatttggcaaaagtagatctgtgatctgtcttggacatcattaaaagatgcttaggaagtgtttaaaagacttcattataaagtagcttcacctgcaaataccctagcatgggagataaatcatacctacaagtcattgtcaagatgtggaccatagggacacattattttatatacttatatttatcagttgatagattaattctctttttctagttgaagatggcatagcaacttggtcttggggttttggagtttatataagaaattatcatataatttcttcacctgtaatctcagcactttgggaggctgaggcaagcagaccacttgaggtcaggagttcaagaccagcctggccaacatgatgaaaccctacctctactaaaaatacaaaaattatccaggcatggtggtgcatgcctgtaatcccagctactcaagtggctgaggcaggacaaagctgaattttcctgaattaatcctgaaccctgaattaatgctttgttgatttcatattgagagaagggtcctcactatctgtccagatgtgggaggggatggtggcttaacatagcattactcagattttttttttttttttttttgatattgggtctcactctgttacccaggctggagtgcagtggtgtgatcacggctcacttcaatcactgcctcctgggttcaagcgattcttctacctcagccacttgagtagctgggattacaggtgtgtaccaccatggcaggataatttttgtatttttagtagagacagggtttcatcatgttggccaggctggtctcaagtgctctgcctgcctcagcctcccaaagtgctgggattataggagtgagccaccttgcctggccattactcagatattattactatttgagactccaaatattcctgattgcgtccagtaagtgggcccataagagtgctcatcatgcgtcaaaaataaaaattcttgtagtcttggttgattggagatgagagctgatgaaggtattgaacagagaactatttccattgcctttttatcttccacctaaaactccttgtactctttcttctttccacagagttaccaactgctggttgttgagaacactgttgaagtggctcagttcattaataacaatccagaatttttacaacttgctgagccattctggaaggagctttcccacctcccctctctgtatgactacagtgcctaccgaagattaatcgaccagtacgggacacattatctgcaatctgggtcgttaggaggagaatacagagttctattttatgtggactcagaaaaattaaaacaaaatggtacagtattaaaaaattcgttgtctaaaggcatttctgggattttaatggggaaataacatgtagttaatgtaagcttttgagctttaaaatttgacaaacagaaatttaaattgcaaaggaatctaaaattgcaagaatgtattattgtctacttaaaatcttatatggtttaagaaaagcctgtctactgttttgcatagtaccttgagctaaatcattatcattattggctatctctagagggtattggctgggtttttagaatgctttttaaactttccactttctcaaactaaacagcatttctcaagaaaaactaaatgaggaatttagcaatatttcagaaatcaagatgtttaaataagtatttcatttacctttgttttttaccctctcattcttttaaaaaaatcctctctgaatatcataagtttgtttactacttaatacttgtaacaatagcttaaattgatgggataccttcctcatgacaagtgagttacatgtattagtaataatccttactactacccaatgagatgggcattataatctctgccccacagtgagaaatagagactcagtgctattatgagacttatccaaggtcatgaagattgcaaggagggtatttaaggctgggtctaactggcctcaaagtcagtttagcttattccttatgctatgtcactgctaaaattgcctgattttggttagaatcaggacatacccctgaattaatgctttgttgatttcatattgagagaagagtcctcactatctgtctagatatgggcagggatggtggtggcttaacaaccactcctcctcttcagagactagccttggcttactaatgttccaagtcaaaccttttttttcctaactttgtcttttagctgatgcccacatttccctctctattccaaatcccctcttcaaggtctttctcttcagaaaagattctg

SEQ ID NO: 10587 - DNA, 6000 bp, Homo sapiens
actggtggaagaggtagtagacatggaaagacacaatggtgggagaggctcccaaggtgctttataaggaataacaaaaagattaggtttgtgttgcaggaaagtaagccttccaaaataaaatacaagatgaaaacaagaaaatttatacagccccgactgtttaagggtcacaagctaagcagagggtattaaaacaagatttccatctttcaggagcccataattccatttcatgtcatacaaaccatttcttttatattattataataggaaagatagtaattcaactcaccaatgaggtccatgaaccattttattcagtagagctgaataacataaataacataaataaatgtaccccaaagattatccatcagtcaactctaccaaaccagttatttttccaaggctgaataattatgatcatgttaaaatgagctcttgtcccttgttttgtctgatccagttttctagcttcaagccaggcatttttagagctctataatttattaatatcaagtatcataatatcactaggacctcataaggatggtcaaatgagagagcaggacaaataatcttatttatcatttagaatgaaaaataattagctttattgcggtctgggacttatttcaagttggtagaatccatccaggaaagaccatatttgaggtctgccaattcttggtccacaaacaagaaactttgaatcagtctttcacctctgaaatgggtcttagaaaaatcagatttgaaagatagcacgcaaaattgaaaacaaatatgttaggatgagattataggtgttgtttaaacacttaaaaaatattactgcagcataatttttagttagaaatttaattattgaattcaattccctcaattcttcagtgaaataaattgggttccagagagactgagtactgccaaaagttacagtaaaaacaattgaagagtaagagctacaatccaggatgcttgacttctagcccagttctcttcttgagacactggaagtgtctcaagagcaacaaattaaaaacttttggaggtaacaatacttttttccccttctggagagattaatataaataagacattgtagggaaaatagatataattaaagttactgatataaagatttatactgatataaagttactgatataaagttttctattttaaacagccaatacataagtataaaattagtatttaaagcaaaagagctaaaagccctggtatttttctcaatactttgctcatttggaaaaaaatgaaaataaatatataactacagcagtttctgaactaccattattaagtgaaatacagtcaataacaatataagtaagtgccttaagaaatgtcttgaaatgtctgtaataatgttaaaatagctgccatactttacatttgactcacctagcttatcattaatatatgagtgcctactatgtgcaaaggacctttaaaaggacaaaggagtataaagataaatccttccagagttcaacaaaaaagatacatgtttaaattaacatggattcaagtttacatggtttcaagtttgagataacatttaagctggactttaaagataggcagcactaaaggaagcagggatgaaaggaagtgacattttaaacagagaagttagtatgagttaaggtagcaaacgagaaagttcctagcatatgtagggaacaaaggttactttcaaggtggaatatagggtgccctgaggggaaaagtgggaagtaaatttgtaaggccagtgcaaattgggattgtagacgttaattcatagggaatgggaatccaaaatgaatcaaaataaaaatataatgattggtctagaaatactaagccataaacaaaatctgggtgaaaacatctaatagtcaactacaggcttaaattactaaggaaaaaaaaaagttcccaactattgcagttgtttcacatacaacagtaattctatgaaagattttatagtatactgaattatggaggcacactgatattttttaaaatggcccaaagtggtttgcctcataacttaaaaaaaaatttttttaaccatggatttaagagtcaataagggtttttcacaggtttctaatgtacagataaatatatgtatatttttctaaagtagaacattagatctttctctaagagtatgatgatgacctaggctggacagaaggaaaaaaaaaaactatgtagaagagaaaagtataataattttaagaggtgataaaagagcaggaaagggactagtgcctttcaaatcctctaggttggttcccaagctgtgagtttttgtttagctggtaaaggtgacagttgaggggaagtgacagtggataatagcacataatttgcagtgaaggagatgattacaaacattcataatataggatggtggtagtagaaagagagggtatggagttatgcaggcctgaatttcaatgctagtcatgtgatcttgaaaacatttcttaacttccccatagttgattttcttctataaaattaggataacaaatatttaccttacaggggagaattagagcataggaaagaacttgataaacattcaatacgtgatagctcttcaataaaaaccttttgttaagatcccactgtgtgcttaccactgtgattctgtggcttttaatctttggcagactatgggaaagataaattgtacttagaaagatgatcaaggagcacttcaaagccccagttcaaaattatctcctcattctctctctctttctctctcacaaatacacacacaagcacactttcaccctaccaattaggaattttaagttaacaagatactttttttaaaatacagtgtcctttggataggcaaatcaccttcacacttgagtgtgattagttctttgcttagtgaaaagttgctgggttctcctggaattggaagaaggcaatgtgaattaggaacttcttgagggtactcagtatgataggaaggtgggaagaaggaggaagtaaggggagacatagagagcgagaaacaaagagaaaagaggccacaaatattaataagtagtggttcttatttggactttccccttggaggggacctttccgtcccctgataatctcttaggaagataatgacacttaagtttaaattgtgaagcctgtcagttgagaaaaatgttgagacaagtctcaatcattttaggacgtttatttgccaaaattaaggacgtgcgcggggaagacaggtctatgcctttctgggaagatgattttgagggctccaaatttaaaggggaaagggtgggatactgagaaatacagttttcatgtgagagggtagcagggggaaaatagtcattcatgcctctgtctggcttagtcaatctgaatctgcatttttacgtaagataacatagacaaatggggcaggggaacaatcagatatgcatttgtgtcaggagggcagaggggtgactgtacctgaaaacagaagctatctatttacattgccatggtaaattttcatagaaacactttatggtaaagatcttggcgctcactgagaatttccttgtgggcaaaatatgagcgaggtgtgtagcttttcatctggtagccatctcatttaaaaaccaagaggcaaggcagttttgcgtgacccagttcccagcttaacttttccctttggcttaatgagtttggggatccgagatttattttccttccacacgcctatgccaaactcagattccttcctttcatccctgtttcatctgttcaggctggttagttcccctttccaatccacacagagaaagacagaaaagacagtgagaagctatgtgtgcaggacttctctgccctccactccatctaagctctcaagaaacttttagattcttttgttttttctattcatcggtctcttaaagaggcaatcccacttctccatttccacttcctaataaagaatgctaagtaacttaaggattttctttaaattatgtagctattcaatcagggtcagtcctagttaatagtttttccccacttcccatagcctcggcttttagcttagctttggcagtgaagatctggccctaagctcttgcgacccaacccccaacctaaacatttcacaggctactgggctgcggaaagctgaggctgccaactttggagcctaggattcccaggacatcaggtcaagcaactgagaggtccacccaggggtaaattccacacatagtttcttctctcttgggaccagcgctttaacatctgggtgaatcagatcgtgcagacacggtaactaggcgcagaaaacagctggacacgttgctgggagcccagacagaacgtgaccagtagttctcagaaaccgcttctaaataccagctccaacaggcttgtagcgtccgagtgcggataaggcaagagcaaaaacgagcatagtttgggccgttggggccaaatctgcacttctgagagctacttttactgctaagctttgaaattggatttacccagagggaagcgttgcagtggcagccgcaggcaggtaaaactagtatttgcactcacacactccccggattcttcacagacagggatggaagagaaaacttaggaagttgaagtttggcattaaaataaaggactcgccaccactctgtgcaccttcttgagggagttcattcgtccggagcgcctcacagcttagtgcgcctgcgcacgcgcgaactgcggccccgcctctcctttggggacgggagacgtgcgtcgggtcgcgggacgggggctgcgcatgcgccttcatttcgtcagcccgctgttgcgtgctgccagcgggaactgtgtaggggtagattttcgctgcagtgttccccgagcctgttagacgcagcgcgccgggagactgagagaggaaaggatagaggaagtgctgccctaggctgcatgagtcgaagcaagcgtgtttccttcccgccaggcaagtgcccttagaaaccgggccccgcccccttcctggcctgcattcccatcccctctcccggggcggaggtgaggacctccttggttcctttggttctgtcagtgagccccttccttggccatgaagctcgtgaggaagaacatcgagaaggacaatgcgggccaggtgaccctggtccccgaggagcctgaggacatgtggcacacttacaacctcgtgcaggtgggcgacagcctgcgcgcctccaccatccgcaaggtacagacagagtcctccacgggcagcgtgggcagcaaccgggtccgcactaccctcactctctgcgtggaggccatcgacttcgactctcaagcctgccagctgcgggttaaggggaccaacatccaagagaatgagtatgtcaagatgggggcttaccacaccatcgagctggagcccaaccgccagttcaccctggccaagaagcagtgggatagtgtggtactggagcgcatcgagcaggcctgtgacccagcctggagcgctgatgtggcggctgtggtcatgcaggaaggcctcgcccatatctgcttagtcactcccagcatgaccctcactcgggccaaggtggaggtgaacatccctaggaaaaggaaaggcaattgctctcagcatgaccgggccttggagcggttctatgaacaggtggtccaggctatccagcgccacatacactttgatgttgtaaagtgcatcctggtggccagcccaggatttgtgagggagcagttctgcgactacctgtttcaacaagcagtgaagaccgacaacaaactgctcctggaaaaccggtccaaatttcttcaggtaaaacaatcttacccagggataattaagaatgggcagagggattggtataaactactcctaaagttttagaactgggaaaaataagaagagaaagtctttacttagctgggattttcatgaga

SEQ ID NO: 10588 - DNA, 6000 bp, Homo sapiens
accacgctgggctaatgttttttgtatttttagtagagacggggtttcaccatgttggccaagctggtctggaactcctgacctcaagtgatccacccgcctccgcctcccaaagtgctgggattacaggcgtgagccactgcacccggtctgatctcatctttatttaaaaacaaaacaaaacaaaaatcagccagttgtgggtgcgtgcctgtagtctcagctacccaggaggctgaggtgggaagatcgcttgagcccaggagatagaggctgcagtgagccatgatcatgctactacactccagcctgggtgacagaggtgactcaaaataatttttttaaattatgaaatacaaaattcctacaaaaatgtatataaaacatatgcacagcttgataaattgttgtaaggctaacagccgtgtaacttggactcgggaagaaacagaatattgcctatattgcctatagacaaaaagtagtcctaaaatatagtaaaactgttcagaacattggttcaggaatcagatgacctgtatttgaatcctgactctacaacttagtagacaacttgagtaaatgatcaatactttctgagctttagttttcctatgtgtaaaatggggaaaataatagtacatcataaagttcttgtaaagaccaaaaaaataaaaataaaaacccagccggggccgggcgtggtggctcacgcctgtaatcccagcactttgggagtctgaggcaggcagatcacctgaggtcaggagtttgagaccagcctgaccaacatggagaaagcccgtctctactgaaaatacaaaattagctgggcatggtggctcatgcttgtaatcccacttactcgggaagctgaggcaggagaatcgctcgaacctgggaggtgggggttgcagtgagccaagatcgcgccattgcactccagcctgggcaacaagagtgaaactccatctcaaaaacaaacaaacaaacaaacaacccagccgggcacggtggctcaagcctgtaatcccagcattttggaggctgaggcgggtgaattgcttgaggtcaggagtttgagaccagcctgaccaacacagtgaaaccccgtgtctactaaaaatgcaaaaattaactgggcgtggtggcgggcacctgtaatcctagctactcaggaggctgaggcaggagaatcgcttgaacctgggaggcagaggttgcagtgagctgagattgcgccattgcactccagcttgggcaacggagcgagactccgtctcaaaaaaaaaaaaaaaaaaaaaaaaaaacccaaaaaccagaaaaaaataaaaaaaaacataaaactgccgggcatggtggctcacctctgtaatcctagcgctttgagaggccaaggcgttagtatcacctgaggtcaggagttcgagaccagcctgaccaacaaggtgaaatcccatctctactgaaaatacaaaaattagccaggcgtggtggcaggtgcctgtagtcccaactattcaggaggctgacataggagaatcatttgaacccaggaggcggaggttgcagagagctgatcacaccattgcactccagcctgggctacggaggagactctgtttcaaaacaaacaaacagaaaaccaaaaaaacacttagcatagtacttagaacatgtttttccctgagtaaatggtgctattattattcttccacctgttgaagttcctgttcaggtgctgagtctctttgtttaaatatggattcctcccaggaggatcttgcttaacacataggaatagagaagataaaggtttactcatctagtgtaatcatccttttagaaattgtcttcctagtggcttccccataaattcttccatacacctgtccaaggaaactgtcctgtgtggaccagaagcctccccctcctcatgactgggcagagaaactagaggcctttcaggccaggccctcagcaactccaaactgagttgccttggacacataccagtctttgaattcatttactaagcaggcaaggcagagtggaaacagtggaactatgttaatctcccgtcttttctcctctaaaccctagtactagagatgtaagccttgaaatgctactaaggaacgtgcgggtttcacaatagcaggaggccatctgagaggaggacaagactccacaggcatgttggatttgggaagcagggctatagtcattcattcattcatccaacacatagttatgtaattcctatgtgacaggaactatttcaggcatataggatacagcaatggcttgctcaatttattgagacttgtttcgtggctcagcatatagtctgtcttggtgaatgctccacattcccaccaacagacttataaagacagtattgtttattatcatctcaaatttacggtggaaaaaaatgaaccttacatagtttaatttcctttagtcctacccagctaccaagtagcaacactggaatttgaactgagatttctgacaccataatctgagctcttaagtttctcttttacacatagaaaaggagaaacaaattgtcttttcatcttatccatttgactgcaggtaaagtcaacaagtttctaatcatggggttctgaaaataatatttacattgctctgagtcacggggattttcatcaaataatattcaatagtggatactactcaatactactgtgagttgccaagaaggaatatttggtaaaaaatatagtaattaaattttgctataatttatgattatgtaacatgattaaattgagcatggcatcatttaacatccaacaaattttgttttggtattgaagaatgatgtgtttaagttttaaggctggattttctttctagacactttcaactatgaaatatacacaatattggacaatagttaaccgttcttttgatgttgttgtttagaaaattaatctcaagcgaataaaatagaattcatacaattaatgaatcctattattccatatggatgaactcagaactaactagaaagtaagtttcacagagatttttgagttttgttcactcgtgtgtgtacagattaggcactcagaaaatagttgaaggaatgaattgggaaagcaaatagaatatgaaagccttctacccaacacaacatgtctttgagtttaggtttagggtgggaataagaaaaataacatgatatgcataagttatcttaaaatgataaaaagtttaatttaaaaacctaatttaccaagagaaccgaaaacatatgtccacacaaaaacttgtacacaaatgttcatagtaacattattcataacatccccaaaggagaaacaacccaaatgttcatcaacagatgaatgattaaacgaaatgtgatacatcgatacaatggaatattattcagttataaaaaggaatgaagtaccaatacatactacatcatggatgaacctttaaaatattatgctaagtgaaagaagacagacacaaagggcacatattgtattatccattcatataaaatgtccagaataggcaaattaatagagacagaaagtacattagtggttgccgagggatgaggggagaggggaaatggggagtgactattaatgggcatggggtttcttttgggggcgattaaaatggaattagatggtggtgatggttgtacaatctggtgagtatactaaaacccactgaattgtacgtgccctttaaaagggtgaattttatggtatgtgaactctcttttataaagtggaaaaaaactcctaagatctcttcagaacatgtcaaaatacattataaaataatagacatgtgtttacaaatctgagagtattaggaaatgttcccttgtttaattataaaccaaatggaatgtttggagatttcagtaatctgacagggaacattaaggggattaacctgacttccccagtgttaacaataccaatttaaactgcatcattcaaaaactacatagtcatattaaagcatttgtagcaatgacttccacgaaaaaaataccaattaaattaattacccattaaagctgccatcatctgaaatacctcatatttatatagtgcttttacttcctcaagtatgaattgtgccttaagatctaatgtatgggagagtcacatctctaaccatttaattaaaggtagagaagtgggtgggattggatagaaatttattagcaatgctgacattccagattggaacacaaagacaagcaggatgtaagaaacctaaaagttcgctttcaatgcagatagttaaatgccaagaactataattgccacatcctggagtacaattaaaaaatatgttgaaaaacaaccaacatacataaaaatatacacagtgttaagtgcagactatgaaatttcccttggaaacagaatccagatcaagaaatagaatacagcacccggaactaaggtgctttttcgttttcttaaaaaaaaaaaaaaagtaaaccaagtttattttgctttttaagtagtgttgttcttaaagcactacaggttggtaaacaacgtataaggtgctttttctcaggccaaagagccataatagtttaaatttcccggtcctcaagagcggaccgggtgggcaggagaggaccctggggtggtgatgtgtaaactgtattatgcactttagcctgctggatggcaactaacacctacagtagttcaccctcattttaacccctctaagtaattgtctcttattctgaatctagagattcagaaacagcgccaatgtttacacacgacttttgaaattttcccaggagtctttcgttggagcaatacatctagatgcctttttccagcaacagtttaatcaaattctggaagcagaaaagtgtcctgtgaggacgtgcctttcctatcaaagtgctgagtgcctggaccctctttccggaggaaacagtcccctctggacctcgttcggcctctctccatcagacaccccaaggttccatccgaagcaggcggagcaccgaacgcaccccggggtggtcagggacccccatccgtgctgccccctaggagcccgcgcctctcctctgcgccccgcctctcgggccgcaacgtcgcgcggttcctttaacagcgcgctggcagggtgtgggaagcaggaccgcgtcctcccgccccctcccatccgagtttcaggtgaattggtcaccgagggaggaggccgacacaccacacctacactcccgcgtccacctctccctccctgcttcctctggcggaggcggcaggaaccgagagccaggtccagagcgccgaggagccggtctaggacgcagcaggtgggactcgcggcgctggcccgcaggcttcccgcacccccttccacgttggtgcgcatgcccgggggcagggccggttgtagggaggagggaaaggagagggagaagggggaggagacgtccccagcccagtccccggctgagcgctggcggtcggtgcggcgtcaggtgcgcccgccaggtgagcgcgctccctggcaccgttggcccccggagggtcgggcccagttgcggcgagcgggtgagtgttgggcgcggcgtcaggggcgcacgggagcccgagggtccccgtggggggaccgcggcgactatgttaggggaggtgccggggggaggacgctccgcgctggtttcggtggcagtttcgtccccgagctgggactcgtgggaaccagagaggcgcgggtctgcggagagagcagcaccggccaacttgggaggctgcctcctggggcgaggggtggcttggagccgccgatcaagctttattccgcggaaacgctgaaagctagcagtgcctcagcggcgcgggcaacttttcacttttatggggcacgacattcctgaacagcgacgatcctgcatccgctctggggctgcagtttgggggggcggccttcatggagagggat

SEQ ID NO: 10589 - DNA, 6000 bp, Homo sapiens
tatctggtttgatcttaaatgtttgaattcatataatttttaagaaatggctgctttaaagttggttgccagtaagtaataaaggatttattgtttgagtgaagaagaaataacatagttctcttaattttataattattttccagaattataaggaacagtatcaaatagtcatatgtatgggacactgtgcatacaaagcagggtttatagcacacttttccttaaaatcttttcctaaaaatacaatgagctgtatactaagtgttcacccttgatattccttccaggatccaaggattctgtagctacaatgttgtcaagactttttcgaatgcatggcctctttgtggcctcccatccctgggaagtcatagtggggacagtgacactgaccatctgcatgatgtccatgaacatgtttactggtaacaataagatctgtggttggaattatgaatgtccaaagtttgaagaggttagtgaagttaatttgatactgactaaagtaaattacattttcaatttttgaagagcccttaagcccctatagggagcacataatttttaaaagttagagtaaaatatttattttagtattttggaacttacctcaaatttctgcttacatggaatgcactggaaatgctcttattttgctttgtctttacaaatgaatgtaattgactttatttgagaaatacatcttttataagtgactaatagtcaaaaatgattgtgggccgggtatagtgactcatgcctgtaatcccagcactttgggaggccaaagcaggagaattgtttgagcctaggagttcaagaccagcctgggcaacctggacaacatagtaagacccagtctttaaaaaaaaattaaaggccgggcacggtggctcatgtctgtaatcccagcactttgggaggccaaggcgggtggatcacgaggtcgggagatcgagaccatcctggctaacatggtgaaacccgtgtctctactaaaaaatacaaaaaaattagccaggcatggtggcgggctcctgtagtcccagctactcggaaggctgaggcaggagaatggcgtgaacccaggaggcagagcttgcagcgagccgagatcgcgccactgcactccagcctgtgtgacagagcgagattccatctcaaaaaaaattaaaaaattagctgggtgtggtagcatgtacctgtagtcctgctactcgggaggccatggcaggaggatcccttgaacctggaggttgaggctgcagtgaactgtgattgcaccactgtactctagcctgggtaacagcatgttaccctgtctcaaaaaaaaaaaaattgtggtgatgtattggcttaccacagtggtttgattaaaagttggatttaatttttgatttgtaggtttgatatttttattggacttgtattgtgcttacatttatgttctcatgactatataaatgaattacacatgcaaaataaaaattcttagttttgattacttattttaaaagtcaaagctaatggaatttccttttctttctctcctattaggatgttttgagcagtgacattataattctgacaataacacgatgcatagccatcctgtatatttacttccagttccagaatttacgtcaacttggatcaaaatatattttgggtaatagttttacatatttaacttctggtgtcatcagatttttgatttgctgtggaaataaacctgttcattcaaatcatgtatttggaaatatgtgtattgctgaaagtgtgctgcatgcattgaatagtttccttattattggcaattagacattctgaaatttgagaccttaataatttggagtaaactagtattatctcagaatgctgtgtgacactgttattatttgtgtagtaaaggataaagtttttttagtattgaacttttgtcattttaggtattgctggccttttcacaattttctcaagttttgtattcagtacagttgtcattcacttcttagacaaagaattgacaggcttgaagtaagtatttaaaacctaaatatactttctgtcaaaatacattttaaaaaacttttcttccccatgctgtaaaggtacattttcaaaagttaagaaaataaggggaaatttttttgtataattttactattagctaattttaataactattaacattttggcatatatccttttctactgtttttatacttaaagaaaatatctgatatcatatatattgttttataatttctttatgcttaataatagtttatcaacatctttccatgtcccttttttttttttttgagatggagtttcgctcttgtcacccaggctggagtgtaatggcacgatcctggctcactgcaacctccacttcccgggttcaagcagttctcctgcctcagcctcctgagtagctgggattacaggcacctgccaccatgcccatttaatttgtgtatttttggtagagactgtgtttcgccatgttggtcaggctggtgtcaaactcctgacctcaagtgatccgcctgccttggcctcccaaagtgctgggattataggcgtgagccactgtgcccggcctccatgtccttaatgttaaactaaattgtttgtaatggctatatgtattctcttctgtctaaacgtcttgtagtttattaatcatctaatgttggactgttaggttatgtaattttttttattaataacaacactgtgatgaatgtctttgtaacgaaatttttgttcatatttgtaatcattttcttaagatacattcctagaagtgagacagtggttttgctttttttagagctttgcttttttttttttaagagctttttagtgctattattgccaatttagtttacagaaagtttgtttagtttatccttccacaggtagtgatcaatgaaaatttttatatattccactttttttccctaatggtaatccaaggagatattttttactaaggatgatactttgatacaaaattatcaaaaggtgtttaaatgtaaatatacttacattttaacattaaaaatatttttaacaaatattttgagcaactactatgtttagctttgaggatgccaaagaaatatagggtatacttttttgtctgcagaaaggtacacatactacaggatcatacagtatggagggggaaaggttttgttctaaaaagaatttttttaaaatcatactttttcccgttaaatttatctgatcattttgttcttttccagtgaagctttgccctttttcctacttttgattgacctttccagagcaagcacattagcaaagtttgccctcagttccaactcacaggtaagtattatttataagataggaatgtgaatagtattccttttttcagtttacattaataggaaggattaatagcgtttcttcatagcacaagatttaagaattgcccaaagttttaagtttaattctcaagtcccaagactggtctccataagtgccccaggaacagtcccctgtatctaacaactcaattatgattctgtagctactggaatttggaattgcccccatttttctttttgaaagttttcagaacttatggtaataataatttttgggtaaataagagtattttcctagtgaaacacatcagagagcagaacaagatctaatggaagagaaacccagggtagattgattgattgattgatttgagatgtagtctcactctgtcacccaggctggagtgcagtggcgagatcttggctcaccacaaccttcgcctcctggtttcgagggattcttctgcctcagccacctgagtagctgggattacacatgtgcaccaccatccccggctaatttttgtgttttcagtagagacggagttttgccatgttggccagactggtctttaatttctgacctcaagtgatccacccgcctcagcctcccaaagtggtgggattataggtgtgagccactgcacctggccagatttatttttaaaccccttaaattaacactggcattatttcctattttaagtttcatcttaatgttcattagtcactttgaagaacctaaccattttaacaatattatatcagagtatcttgagtataaaatagcacacaattctgccctgattatttgttgatgaaagtgtgtgatcatttgaacatattaacaaggaaataagtttggttttattaatactaatatgatctcataaaatttgcaactaagcttctgtcatggtaggtaaaaatatagaatgttgtaggatttaattatgtgtgatttaaatgacagagttaatgcactacctcaaaggaatattcctaacaaatatcttattcagtggaaagggaatcagggcactatatgttcttttttaaaaatttggctgggcgcagtggctcacacctgtaattccagcacttcgggaggccgaggtgggcagatcacctgaggtcaggagctccagaccagcctggccaacctggtgaaacccagtctctactaaaaatacaaaaattagctgggcatggtggcgggtgcctgtaatcccagctactcgggaggctgaggcaggagaattgcttgaacccaggaggcagaggttgcagtgaaccaagatcacaccattgcacattgcactccagcctgggaaacaaagtgagactacatctcaaaaaaaaattttttaaaatcctttatattacaatcatactttgtatcttgaatacctgttagttttatcatattgtatattttactctttgaatagtaatttgatattaatataagccataggatgctctaacatttaaaaaagttgttctgtcccttgccttcattgatatgtttgatctgttttaggatgaagtaagggaaaatattgctcgtggaatggcaattttaggtcctacgtttaccctcgatgctcttgttgaatgtcttgtgattggagttggtaccatgtcaggtttgtaagcaatttttgccatattttaaaataggtatgtcgctaaagaggaaaaagaacatcttggatttgtattatttattgttaaattctgacttttaaattactcttaaaattttttattatattagtgtgtgggtatatctggcctgtttgctttggtggaaacttagcagcaggttactgatttatttttcactcctgccatcctctctttgtgttccactttgtgatatttttattcatttgatttcttttgtttgtttttttaaccaacattgcattccaaggttggtctggaaaacactttccagcccctgctgttacttagactcaattggtgacttggttctttgtgttttaattatcatgtagggagaaaagagtcaggaattggacagatctgagtaagattcacctaataaggtgattggaaatatttaatccgatagtaagcagtacatctcagcaagtacccagcattagcttcaacacatgtttcttcattcttaattggatagtagagaattagatattaatatcaaacataggacttcattatgtagaataaaaattacagactggcatggaaatttgccagaaggaatatattacgctgtgtgaaggtctcctaatcattaggattatattttatggctttcttataaagaccatacttggttaactactgtgtatttcctggtaccttagagccctcaatgagatgcctcattctttcagaagtaaattatctaacttttaagggggtaaattattgtcattagtttaggcctcttcagtagatagtatattaaaaatgtaatattgcttctaactttctgagagcaaattattatttatttattttattcaacaaagattttatttagcaaataaaatattttttaattttaaaaatttacttactttaaaatttacttttgggagtacaattttatgagttttgacaatgacatagtctt

SEQ ID NO: 10590 - DNA, 6000 bp, Homo sapiens
gtaaaagcatgtaggatataatacaaaatggacagaaaccctgtaaaagaaaaagtacatacatgctccccaaaatgtacaaaggattggcggtactctcaatagggaaagccatagctagttcaggcacaaaatggcagacagagcattatttgagatagtgcttaaagggtgcgtgagatttcgacatggtgaaactagactggcaattcaaggggttacaaaagggatatctgacccatctgtgggcaggagggttcatagagggtttccagaaatttcaaactgaaaatattaggcttagacgtccatacttttttaaaaactcaaaacaagaatttaaaaaatatatttaaaaaactcatttgtttttattttcccagcttttataaaagttgaaataattttggcatgacagggatcttaataaaagcacagtttcttgaaatggtattctatatgttttaatgaagacatatgtttgggttatttaaataaagtgccattattctttacttcccacacgatacagtttttctgtgtcatataccaccacagcatgtattgtctctgaagctgcattaaggaggcaggactcctttatggagccgcatctacattttggctgtgacacttcggcagatacttaaaaattaatttaacttatgttagtgtaactcatttatatacattctgatttgatctttaggaaaactcagaggagcagatagtgtaacaaatattctttttttatgggaagcagacttgaagttttgagtggtggccagccagctagaaagtagtggaattagtatataccaaatttaatgccttttctgtgattttcctagaactaaatattattttaggagtaatgcagttctcataagtagaaaagatagtatttaagttgtttaattttttttttgaattctctaggctattctgcatttatggaattttccactaggtaatatgcattcaggtcacatacacagtgagattttctaaagtgacagtacagataaaaaggctgtgcaacttggtgataattgtgctccatttaagcaaccatcaactggtgcatttttttaaagataaattagattttatcaaaattgaaatattttttctttttgatactttatgttctgggatacatgtgcagaacatgcaggtttgttatgggtatacatgtgccatggtggtttgctgcacccatcaacccattatctacattaggtatttctcctaacgctatgcctccccttgccccccacccccaagttgtgtaattttttaaaaaaaattatagtacttggtgtcaaaaccttgtccctgatatcagcagtatgaattattaatagataccatctgaaaccctggagggaagtaataagcttttaaagatgttcatcctgatgattagcctgtcatctttcatggggccctgaaatcaagaatccaccctttttcacatggatataatggatttaatacagtatttagcattatgcactgtatatatatgtggtcttttccctctaggtggctctctgggtctatatagatacaaactattgagaaatgtggctattcctacctttattttgcttctgtgttctgtgggactgtgaattacattttagtaaactgtgaagcccatgaacacatagtatcagctgctcaatttagtgcaagtttgaaaaaggaaataataaagcaaataagaattaacatttatttattacatgctcacaaacttgggggaagaggggaagagacagacaagtgaatccaattgcattgctctggtttggtctagtaagtaaagaaggttgataagatttctataatacacttcattttctaggatccagtcatttgtactcactttgagataagtgtctggaacataggagtagtgatttatctatatctttaattttccatagaaaacttggttttaaaagggaataaaaataattacttttatacttaatgatagtgctaaggtactaggggaaaggaatctttggatttaccagtatatgtatttgtcagtgctctttttcttcctgaccatttgacactttgatctgtagtaatatggcgtttgcttttaccactgtatcagaagcactcagggctgtgtgggttatttttgtcttgtaccgtgatagattttcatgcattaacttgctttcttgatagtttttctgacagcttttcatgtgttaacatgctttcttctcttggcatcagtgagaagtatctgtatctggttcttccctttcctctcccagtcattctttcttcttgtggatgcctcttaaatagtgtctttttaaaacaatttcaagttttattttagattcaggggatacatgtgcaggtttgttacaagggtatattatgtgatactgaggtttgggggacagttgagcctgtcatccaggtagtgagcatagtacccaattggtagtttttcaactcttctccccctcccaccttcccctatcttttaagtccccaatatctatcgttgccatctttatgtccatgtatacccaatgtttagctcccacttaaaagtgagaacatgtgatatttggttttctgtttctgcattaattaggttatatacttgattttattctctttctactctgggttctccatagacagtttcataaatgccaaggtttcagctatcatttatatgttgttttagtccctttgggctgctataacaaaaataccatagattgggtagcttaaacaacagataatgatttctcatagttctagaggctgagaagtccaagataagaaagacactgacaaattcagtatctcaggggggccaacttcctggttcatagacagtttctgtgtccttttgtgatggaaggttgtcagagagatctctggagtctctttaaaaaaaaaaaaaagttctttttggagacgtatattgcccaggttggagtggaaggctgggaccataggtgtgtgccaccacactgggccttgggggtctcttttataagggcatttattccattaatgcaagcttcaccttcatggcaaaatcacccccgaaaaggcctgcctgctaataccatcatattggtggttgggattttaacataagaattttggggggaacacaaacattcagtccataacatatgccgttggtttccaagtccatgtctttagcccattcctctcccaagctttgaaccaaacctttacctgcctgctgtggcaggcctagagtaggttgtcagtagagttggaatgaatgaacaaatgtttagaacttatcatctgccttctccccaaaccagcctatcctctcttttctctgtcttcttgaaactactttcccaaatgcaagcttgctttgagaatctttgactcattctttttcttacctcacagttaccagttcctatccaggtttggaaaaaatactgacttggatgcattggcccttccctaagcctgctttgattgcattccagtcaagcttctaatttagatccagtcacagtgcagtgtaattaccagtatctttctgtccccactctgcgaagtttgtgggcatataattaataaatgtttgttatttccttcttcaaatttgtgttaaaataagtggctgatgttatgtattgatggactcatagtttaattatgcaggttttaagacatatactgatagaaaatttttgaaccctactcctgaaaataaattccaagatttgagtgattaatcagtatggagaaacaattcccagaagtgtttctttgtgcattctttaggacttgaccatacacaaaaagttaaattgtatacagagtgcatagcggcaatatgttgaaggacataagtagtgcttggtacattaaatgataaaatgatctcatttgattataacagggcctgtggtgtatatgtagataaaatggaaatagataaggtactgttctctctgaatagtctggggtaataaattaatgtattgtttcttgttattatgtttaaaccatttcattgtaatgctgtaataatttcacttgactaattgggtgcagaggaaaatacaactttttgaagttggctaagaagttctttatttttggtttaaattagcataattatctcttctgcttggagaagaaaaggaaaacctatattaagaaaatgtttaaatacaattattgtgtgtcagtttggtggctaatattcttgatcttaggaatcatgactacaatctagtatttttatgtttgattaatgttgagattaagagctgctggaaatgaatgcgtaggttgctacttaccttctcccacttttttgtgcctctgtaggtacatggactatatcgcacaacaggtgctagttttgagaaggcccaacaggagtttgcaacaggtgtgatgtccaacaaaactgtccagaccgcagctgcaaatgcagcttcaactgcagcatctagtgcagctcagaatgctttcaagggtaaccagatttaagaatcttcaaacaatacactgttaccttttgactgtacctttttctccagttactgtattctacaaatatttttatgttcaaaacacacagtacagacagcatggatatttcctgttcacttgtgcatgggctaaaaccaggaaaacttccttgtcttattactttacctaatagtttcttaatatttcagtgccccttgcagaaaaaatattacatgctaaataaatattctccatatttttgggggatgacattcagtgaattatttcagtggtgacccactgaaaattaataatggtacttatgattaaaaacgcatttaatactaactgcagtagttctttcaagaatctttagagataaggattgcacattggaaaagtaaaccatgtttcattcctttttccctatttatattgaaagaaataggccagcagagacttagggattttaaattggcttgctttttagctgtttcagtcaccagtgaagagcctatgtgcattttgtagtagataatgtaaaatttgtcatctttttcttttcttttttttagaatagctgatattttgataacaatctctaatttgcatgggcaccacatttcttatattaaaagaattagtgttttggcttctgtactgcttatggttgtaggattcaggggttaatggaatcacagaaatgatattctgcaagaatttcttttaaataaaaagtttgggggtgcaatataagaagtttatataatatgcagtacattatccaaaagagaaggtagttaatgcagtagaaagtagtggtaataattcctttttaaaaaaatttcggtagtcatatagtaacattttgctatatgaaaactttggtatattctgtggttacaactaagattgtgtctggcagctcttttttggggatgtgtgtgtgtgatttttaacagaggtattaaaggctagcctaactgttgtctaaaaagattgtacagtatttaagggattttccttttagcttttcatctccagtggcattaaacataaaaagaccctggcattttttcacatacttgaatccctaaatgcacctgtctttcactttttgagacagactgaatatatctaaaatttccagcaataaaaaaaaaagcatttaacttgcaccaagcaagaaaatataaatacagttaactgcattaagataatcacgttaaaattgttactatgcagcacagaacttcattcttatagtattcttgggttcaacctttgaatcaattttaccactgattaaataaatgactcaaagacatctgtaagtcatgctgctgtgttttgaaagtctttaactaaattaagattgcagaatgatagtgattattcaattagattttaagtaaggattgtgatattagaggctggaaatccttattttttaaaaaatcagatagg

SEQ ID NO: 10591 - DNA, 6000 bp, Homo sapiens
agatagatcctgaccagacagtaatcagagctgagtctttggatggtggtgacaccagttctacagttgtagaatctcaagaggggctttctggcactcatgtcccagagtcttctgattgttgtgaaggttttattaatactttttcaagcaatgatatggatgggcaagacttagattactttaatattgatgaaggcgcaaaaagtggcccactaattagtgatgctgaacttgatgcctttctgacagaacagtatcttcagaccactaacataaagtcttttgaagaaaatgtaaatgactctaaatcgcaaatgaatcagatagatatgaaaggcttagatgatggaaacatcaataatatatatttcaatgcagaagcaggagctattggggaaagtcatggtattaatataatttgtgaaatagttgataaacaaaatacaatagaaaatggcctttctttaggagaaaaaagcactattccagttcaacaagggttacctaccagtaagtctgagattacaaatcaattatcggtctctgatattaacagtcaatctgttggaggggccagacctaagcaattgtttagccttccatcaagaacaaggagttcaaaggacctgaataagccagatgttccagatacaatagaaagtgaacccagcacagcagataccgttgttccaatcacttgtgctatagattctacagctgatccacaggttagcttcaactctaattacattgatatagaaagtaattctgaaggtggatctagtttcgtaactgcaaatgaagattctgtacctgaaaacacttgcaaagaaggcttggttttgggccagaaacagcctacttgggttcctgattcagaagctccaaactgtatgaactgccaagtcaaatttacttttaccaaacggcgacaccattgccgagcatgtgggaaagtaagttataaaaatcttttaagtcttttgttcttttgagacattttaaacaaatacaatgtgatagaaaaggctgatgaacagataattacaagattgagttagtttaaaatcagtgtttttcatctaccagtcagggaaatatataaagcagtgtcattttgcagattgcttgatggttgaataaatgttacattgtcaggggcattaagtacatgctgggaaatgagaaacaattatttagttactaatttttgtgacatttaagaatatttgttcttatctctctaatattgacacattaaatattccagatttggtcagattcccctttgtccttgaacatttaatttcaagaccaatctacagctagtgttgtgatcaatgcccagggaaacactccagagcaaattggcttccacagggttcagaatactgaagctgaccttgagttctgactgataacagtcaagataaaaagattgtctataaattctaagggttgcccatagaaatcctattacatttttattcagatttttcagtaatatgttggtttcagatcagtcctatttttttttaacaaaataacattttactttaaaaagttttaaatgaagaactacagagaactttttaatattatgaacttattcattaaagatagtttttgttccctttccaatgaacagaattgatttaaaggaattctccttatcagaaatatggtatcaaattgcagaaacctcatttaagttacaaaaaaaagaatcatttaagaattcctatgattatggtgattaggaaatgatttatacaataaggaaaaagaattttggttaattaggtttaggacctccccacactgcctctagtaggtgtaagtattcttgaaacaaagacaaatttgatattttattctttataggtattttgtggtgtctgttgtaataggaagtgtaaactgcaatatctagaaaaggaagcaagagtatgtgtagtctgctatgaaactattagtaaaggtgagtattaacttgatatattttcttccagtaattgaatatatcttaaaattaattggattgtgacaaagataaacttctttattttcttaaggcaaggacctagtgttgaattatctggcttaggtgggacatcccaaggcttggtttctcttctttttgttccactctcacaattaatactaccaatctggaaaggaagcattcagtttctggagtggcagttcattaacttttaacaggtaccaagtccctaaatgctgcatttcatctgcctatttgtttttgtcatcatcattgtcatgttaatcatcttaatctaaataaacacttacagatacctaccaatagtagtactcaatattatgtattaatagcacagggcaagataatagttcacaccctttagaaaataacaacctaaaatgagagtagaagataaggtggtaatatttatgattttataaattcataggactgccacactatttgcacatttttgtctcatgtttttttcttttctcaactttagaattttgcatatgtacacttcccattatttctttggctctctaattagctacaattattagcaatattcttggtggtctttgagttctcacaggtgtgtgtgtgtgtgtgtgtgtgtgtgtgtgtgtgtgtgtgtgtgtggtgtttttttccccaagtccatgtttattcttttgagtaccacttggcattttcaaagattcgttgacagtttaattcctagcaaatattacttgggccttttttgaccagacctgtgcactagctcaggcactgcttcctgttagccaggggaatgaatacctgataataatttgtttttctcttttgaatgaagataacttttttcagcaattctccaaaaagctctgatgtgagtctgttagcctgaggtaagctgcttttctccctgctgttgacctctgctctggaagataacaaagcgtaaatctttttatgtttccatgttaccaccattgtttatgaagaggttagtttaagtgcttatagttgttttgttttttcttatgctgtttcagtagcctagaagatgactgctggtgctgttagccaaggcaatctgctagaattcagaaattttagagcaagctcccatataattatctcccccacttaaaaagaaattaaacatccatgaagatttgaaacgttatttatgttgacaggtcagatttttgggtgaacattcagacatattttgactctaagggtccaggaggggagaagatatgatcattaaagaaattcagtagaatactgagatcaagctttggtttatcaaagaaaatactgtggaatgagcttatttagttatctgttcaaattctattttgatgtcttatagcatatagtttcatttatggtgctatttgtcattaattcatatgccacaggagagcataaataaaagttaataccagctttagggttgaaaataatagaagtgatcatttaaaataatggtatcaaataagaagagaaagacggttcatgggttgtgagacatatgccatgaaggattggaagaaaaagataatttgaatagagattgtagataatgagaaagctgtcctgagattatgtgagtttcaaggaagcacacgtgaatatcaataagtagatttgaggcaagttagaaattactttgaaatccagagtaaagtgtttggatttcacttggttaatggaagccattttatgagtgccatcattcagtggcacttgaggaagattgttttagcagtggcagcattgatagcagatcagtttggagaaatgctgaagggagagctatcagtgttccttattttttggatgaagaatcactcagcagtattcaggcactattctgcattctgaagttcaagcagagagcaaaatagaagctatattctcatgaaatttatgaatgtatgtagagatggatagtaaacaaaaagatatcagatggtgataataccctaaattaaaaaatttaaaaagtgtaagagtgatagatagttaacagattagtggcaaaaggaaattttttctttttgagatggagtctcactctgtcactcaagttggagtgtagtggtgtgatctcagctcactgcaacctccacctcccaggctcaagcagtcctcccacctcagcctccctagtagttgggaccacaggcacacactaccacgcccagctaattttttgtatttatggtagagatgcggtttcaccatgttgcccaggctggtctcaaagcaatcctgagcttaaacgatctgcctgctttggcctcccaaagtgttgggattacaagcatgagccaccgtgcctggtcttaggtggtattttttataatgtgatcagagtaaggctttatggtaatatgacatgtgagcagagtcttgaaggaagtgagataatgaagccgtgtgagtacgagaagaacattctaggccaagggaataataggagcaaagattctaagctggaggaatacttacttgaagaacaaggaggtctgggtagctgggccatagtgaatgagtgggattgtagtgagagatgaggtcaaacaggtaactgggaaagtggaggaggtaaggatgaattatgttgggtcttgtgagccattgtaacaacttaaattttcactttaggtagccattaaaggattttaaacagaggaataatgagatatgatttatgtctaaaagaatctctctaaactatgttggaaatagactctaggggtacaagggcaaaaacagagacagtcatgtaataagggttactctctgtagatatcaaacatacaccagatataatattgaaataacttattggtagcttatcaaagtggcatgctgccaactaaagagcctgtgctggctactcagacagtatctttgccaagtgctacttctttttcttgattagccatttctttctttctccttacaacttgaaaaatagaatatttattgtaatttactttgaagtaaattccaaaaacatctgagattttaacactattgttttcccctttatagctcaggcatttgaaaggatgatgagtccaactggttctaatcttaagtctaatcattctgatgaatgtactactgtccagcctcctcaggagaaccaaacatccagtataccttcaccagcaactttgccagtctcagcacttaaacaaccaggtgttgaaggtaatagaagaaaactgtgtcttagactaaagataaattattgaaatagaaattctctaatgtagccagagtctagtcaggaaagagaaaccagactaggtatcaagagagatttaatacagggaattggttacacatgcaggctggaagactggaagagcaaaaaggctgtgctcaagtgccgcagcaattagtaactgcaggaagcaaccaccacaactggagtttggggctacaaaaggggagaggctagagctcagtacaggagcaccaggaggtgcttggatctcagatgtgggagtcagaagccctggtcacagcaccatgaagaggcctcatatagttggtactcagatgactaaagtagacctccagatttgatgttaggagtactgaaaatcatgagtctagcagctgtatctgttggtggtgctgctgcaaagatcctggcaggaaccagaaacaaagaattccttcttatttcttcccaccttatggtctcccaccagtgcctgctattggaaaaagctgaccaaagccagtaacaagagagtctgggaattgcactttccagacttccagcctggcatccaagagcccactgtagagggtgagcttgggtttgagaggcaataggtaaataattgttctatctccttttccttaaaatctatttttaattgtgtattttaccacagaaataatattttttaaatctatttttaaatctttgagttgtctgttcttttttacaacctgtcatc

SEQ ID NO: 10592 - DNA, 6000 bp, Homo sapiens
ccgccactgtacccattttagaaacacttggaagacccttaaggatcatttacggagagaaaggtgtgcattctgcggctgccggcgggcagctagagaacgtggcggggggcagcgcatctggcgccttggccggggcgcggagtgggaacagcccgcacgcgtccgctgccgccctgcctggcgacgagtggcacaatcgcccaccaggaatcggctggtgccgcgggtgggcgaaggcagcgccgccggcccggagggcggcgcggagggtggcgctggcggcgtgaaaggcgtctttgtgcaagattgagtgtggtggggggaaggcgaagagagaactgatccaggacctggacgcgggggtctgcggcgcccctacgcccccacgcccccagccgtccgcagtgccggaatgagccggatagcgccggcagggggcagtgtggcgatataggggttgccggggggagaggagggtctctgttcacctctatttgaggctgactggggagaaagctgcctggaggaagctgctggggtgcggggggctgagggatttggctccccgccctctcccctagatggcggagaaatcgggctagctggaagggcgcagctcctctcccagagctcattctggagtcggagaactgggagagcggcccccgaggcggagcctccctcccgccccgagtcgcgctgccccccacctgggggagaggggcgggcgccgcgctgccttccctccgcgcctcggccgcgtggcttgcggcttattttcccagctggcaagcgtcgcgctgcagacaagggaatgcctgtggtgagttgtttattttgttgaagtttgcggtgggcccgggggacgtggggggcgagcggcaggcagcggccgggactgttttgtttaggtctccatccacctgtggggtataaatctgccagcctcaaggcggcgggggaccggagtgagaaagctctgacgctcccaaaagccccttttcgcaacttacagatctaggaccacatttgattctccacgcctggaaccggctagatcctagtttacgctcaccccgccctccagcctcccatcaacgcttcccgcacccgctgtgtgcagggctggcgctccgcagagcaaacagcgcccacgacccagggacagctggccaccgaagtccctccccggcgcccttccccgttccttgaggataggggagctgaggttttcatgtgaagggcgcccatgaaattcgtgggaacttgttctggcgtcttctggagtggagttctttcaggggtttcgggtctgcccgggactacaaaatgggatcctgggttggctggagtttcccagactaggctggagagaggtcggctgttggctcgcgggagagcccagaggaaccccttgggcgatggcagtcaagaccggcggctgcgtttgcctggaagaaaagcctaaatacattagcgagctggtaaagcttttaaggccttcttgggagcgagtggctggctaatgagaggttaattttgtttcgaagggaaggctgcactggtttcctgagataaatggacaggaagcgcattacctccgcgcgctggcaagcggctcccaaatgctttttgcacctgccgttttgagcggtgagagcagcggcggagcccgcagggattgcgggggcccgttgtctacgagcgggtgatgagccccccgcaagccccgggctctctccctccgcgagtgcattgctcacgccaagctttgggactcttctctcacacccaggtcctgcgtgttccgaagttcaggggccccctgatcccgctgagccccctccaggagcgaaagggttaagaatgatgtaagtacaggcacttgatttctcaagtcgcccgcttggccctcttccaagttgtactttccttattttctctcctttcctttccttactgttctaacgctttttaataaactttcactcttgctctgaaaaaaaaaatgatgtaagtacaaaccacgagctgcttgacgctgagctgttggactccgggctatttcagccgctgctttgggtacacagtggccggggagcagccggggagcccttactctagaaaggattgcacaaatcgcaagcttaggtgatctgttaagcagtcagagattctcctgttagatttctggaaatggagacatattaactggagaacagttaaaaacatcacgtataggctcaggaaatgaaactgcatcttgtttagaatccattagtgtttctggcatgtgttttaattctgtccacttgcacgttcatgccgtagtatgctttgctggattctccggatgtactgttcaggtctcctccttcctttctgaaaacaaagagaaagggagaaagagtaccagtggcaagaaacagggtggatgtgtgaattacacaagtcatcagccacttcatgattttttttctgattaaaacataaaacttttataagtcaccgatttttttgtttgtgttctagctccctccccgatttttctttgtacaatataaagtcgtttgtaacttgcagctcacgggcttgaggagtggctgcggtataagcgactattcactacgctcttgctttccaagccaattcctgatcttgtgaacagtacgaatttacccgcgagtgtgtcaactgacctatgtcttgaaaataggaaccaccttgcggtttacttgtgaaaattagcattttcctctagcggctgaacacttatgcagcaataaaaagtgaattgttaggcttataaatctcgagcttgtcaaattttacaacagaggagcaataaagcaccttatagagatgaagtttttcctctgaagaacagttccgtttaacgacaccaggatttgcaatgactcgaggacgccctctattgataggaaaatctagagcacccgtgtacttatggaacaggatatagggggaggggagtaaaaaatcatagaaagtcacgagtggaaagacccaaaccaaacagaaattattgatccttaactattgagtatatgctttgaagtatgatcaataaagtgagatgctgcttttataggggtcgaattaaatcttgggttaagagaaaaaaatgtagtctttgttagccaaatactttgaaaatcagtattatgtttgattacttttttaagatgcttcttagtatgtcatgaactgtatctaattatatgaagtaattgcaagatagtaaatttttgctctaataatacttagtccgcagcattatctaaaaatgtcatataacttcctccccaaaagtcatttctccaggcaactgtgaagctattattaagcgtattatggatatacacaggcttggattatattgtggatagtgaaaggtgtgtttaccccttaagtcatcatagtatgtaacaagtaagtaatgaaaagttacagtaaaaacagataggcatccttcattagggacctagtggtttgggcaattcaaaatgtgtctaataagtgagctggtgagactgaaggtttgcccctcaattatcctagtccattgattagctcatttaaacatgtgtggaatatcagcatgtccgtggttgataagaaattcctaattagagattctgagtaacatagcgggtacagttgccaactacgatttggatgttagtggattttaaatggcaaccctgtgctgtttggggaaaggcaaaggcgagggcggtatcaagtgtctctcagccttgaggtcattcttgagattagataccacttcacacctaccgataacaaattggaatctatcatcagtctcataactgcttttctgtctccacttggcagcctctttctttgtagacaattgtctttttcctcactttcggacccatccgatcataaaaggagaaagtgagctgccattgaattaatccgtagaaatttgtggaaaatttaaataatctgtagaaatttgtgaaaaagccactgagcaacaacaaatcgtggcataattacactgcataaaaacccaccactctcattaattacactgtaaccgaacgttgaagtttgcccactcttagacctctccttgccgctttcaggaagggaaatgtcaaactagaacacctgagcctcgcacagctgccagcgaattccggcggcagttcgcgggtaccttcccagcccatcctatctgctccggaccgcgggtgacattcagatttccaacaccgccccgagcttgctttaccagacaccctcaaacgactcggaacgcggttccgcagatgtgattggctgaaaggggacctgccgcgcggcgctctgtaaaagcgcctgcttcctccaaggaggtggagctgaagctggcagggccagggcagggaggggtaattaaattaaaaaaaaaacttggagggaagatgaatcggatcacattaattcaaggagaggtcaaaggccggtacctttgtaacgccggcgagagtaagacttgcggtcgcccatttctgttgggcgcgaggaaacagtaaatcgcggaagggggtagagggggaaggaaagggagcgcgaggcagcatgcggcgcaggagagaggacttggagtcgatggacagggaactcgaattacactgagcgggcgggggagagggccctctgggtcctgcgattggcaggctgagtcgggctgacgtgcggtcacaaccaatggggaggaagggagggacacggcgggggattatggcgtcgtggattggcgggcacagggcggggcgggacggcagtgcgggactgagattgatcgaccgcgggggctgccgcgcagagatatccgggccgccggtgggtggtcgctagggctgggccagcctcttggaggtccacgcccgccgagcccacgctggctggggccggggtgccggcgcgctcgggactcgtctcagcagtcgctcacggtctttgtgtcttctcttccgcccctttccctgcctgccgcctccggccgccacgatgcccctgcgccccgctgctgccgccgcggactggctgcgccggctgcgcgctgcttgctgcggcggtggtggcgccccatctgctacacgggcctgaagaaggaagaagaggaagcgaagcgcgccccccggcccatgccgcagccacgggcccagacccgccacggcgcccgcgccgccgccctcgccggagcccacgagacctgcatggacgggcatgggcttgagagcagcaccttccagcgccgccgctgccgccgccgaggttgagcagcgccgcagccccgggctctgccccccgccgctggagctgctgctgctgctgctgttcagcctcgggctgctccacgcaggtaggacgggagcgcgcgaggggagccagccccggggcctagggctttgttcccaaatagccccaggtctcgaaggcgctcgccggggcggaagggcggcgtggcgcaacgggaaaggcctcccgagcccctgacacgcacctctgtcgggctccgggccacagtaacgcagccacccaccgggcggccgccgggcgcagagacgagccttctctccaccctccccgccttcggctcggaccgctgacaaatctcccctccgacagccgcttatcaaacatttagcgggcgggggccgcgcgcccgagacaaatgttccggatgctttattgctctctgcgctggtgtttactgaaagtcaggctcggatcaggtttccgccgtcgcagccgcctcggagggagacaaggagccttgtgctgcttttctggagttgggggtggcggcgaggcgaaggaagtacaccagatggaaagatttttaccagattttgcaaacctgggagttaatctcgaagtaacgtcaacttttttgagcagggatttctttcgttttggcaaaagctgcgtttgttcagcgatcagcctcccggg

SEQ ID NO: 10593 - DNA, 6000 bp, Homo sapiens
cctggagctgatcagagtgtgttgatccctttgttttcaaaggaaactttatgttcacactctcgctacaggggttagcagagtaagacgagaaaatagtcccatagtgtttctgccagctaatgaggaaaatttttcctcctatatatatcatgataggtaattgaattagtactccagtaggaaagggtttgctatttcatacttctatagtcttttcttaacaccatgaaattaaagacatgccagcatggagctgcctattcctgatcgatttcaaataagcaatgtagtatattattgcttttatgtgcttttacagcacatgctgtgcaagataattgactccatgacagatgtctatatttcagaggaaaatttatttgttaaagaacaaacatgtattactttaacatggggctattcattatattgcccacaaggtgctttttgatgacttctaaattgaaattaatattttctcttgtcgttctgaatatgcataagcaaatttgactgtttgatataaccattttgaagcttattctgctacttgaatgtaaccttctgtactcttagatcatgtttgaagtgctgggaaatgagaaagtgtgcatttgttttttttttaattttcaaagaagcctgtaggcctgaacagttgccaagttgttcagagtaagttctgtccatcagacccatctttacataaaatgactatgagaaaagtcttaaagggtacaggaaatattttccatgaatcctcctttactctctcacttctgcttgaaatgtcactctttttcaaggcaaacactagtaggaagtagcatctgaagtccctaacacttttgtgtgaggcaaactgacttggagaactggcagtattagttggacaaggctgctatgaaataaaactgaaaaaagagagacgtttacaaaggaatgtccatctccatctactttgcaacactgacggagaccaattctcctgtctgtaaataaaccctcccattcttttagctgtcagagtttctccaggaagaaactagaccctttatcctcatcagctgactggtcaccttttgcagtaagatcataccattaatataaaattaaaataatcaataccaagggattaccatattcagaaaggatataagtttaataaggttctttcaaggactatttctcttttgatgagaagaaaaagagaaatttctaccctcttgaactttcaatggcctagccttttgagcattagaggaaacaagcggggggcggagaaagagattttttaaattaaattggatatagtatttttgaaagtaaaactgggacactaaggactagttttgtaatgacagagtgcagagacaacctcaggtggggtggagccctgaggagagtgaaaagggaggcttctcctcacctaagtggaggtggttggctccactgcccaagctggcctgcacacagaatggaatgccttgaggctgtaagtctgaggctctgaggtgaggtgcactactgggcgtctgacagcacagctaaaattggctgtgccaaccagtgagaggtgacagcatgccggcagccctcgcttgctctgggcacctccgtggccttggcgcccactctggccgcgcttgaggagcccttcagcccgccgctgcactgtgggagccccttcctgcaatggcggaggtcggagccggctccctcagcttgcagggaggtgtggagggagaggcgagggcgggaaccagggctgagcagggcgcttgcaggccagctagagttccgggtgggcgtgggcttggcgggcccacactcggagtggccggccggcctcgcccgccagggcagtgaggggcttagcacccgggccagcagctgcggagggtgcgcctggtcccccagcagtgctggcccactggcactgcactcgatttctcgctgggccttagctacctccctgcggggcagggctcgggacctgcagcccgccatgcctgagcctcccccaaggctgtgggctcctgcgctaccgaacctccccaagcctcctagactagcgctgccccctgctccatcagcactctgtgtctagctcagggtttgtggatgcaccaatcagcactctgtatctagctaatctggtggggacctggagaatctttatgtctagctaagggattgtgaatacaccaatcagcactctgtgtctagctcaaggtttgtaaatgcatcaatcagcaccctgtgtctagctcaaggtttgtaaatccaccaatcagtactctgtatctagctgatctggtggggacttggagaacctttatgtctagctaagagattgtgaatacactaatcagcactctgtatctagctaatctagtgggacttggagaacttttgtgtctaactcagggattgtaaacgcaccaatcagcaccctgtcaaaacggaccaatcagctctctgtaaaacagaccaatcagctctctgtaaaatggaccaatcagcaggatgtgcgtggggccagataagggactaaaagcaggctgccccagtagcaactcgctggggtccctttctacactggagaagctttgctcttttgctctttgcaataaatcttgctgctgctcactttttgggtccacactgcctttatgagctgtaacactcaccacgaaggtctgcagcttcactcctgagccagtgagaccacgaacccaccagaaggaagaaactccaaacacatccaaacatcagaaggaacaaactccagacatgctgcctttaagaactgtaacactcacagagagggtccgcggcttcattcttgaagtcagtgagaccaagaactcaccaattccagacacaccaggaccttgagggtgtgagaggttaccgtcaggttacatttagaagtgttgtcccaactactctcccacatttaaggcaaaaatatagtcaccactgaacaagaaaatcatcttggcacaaaaatgtactgaattgaagaaagaaaacaaagagaaacaaaacaccatagcctagaactcctgcccctccacattttcttctctctctcacaccacaaactttctctctgtgacacacacacacacacacacacagaggagagacgtatttgagggagggtctcaagtgcttgctttccttaacaacccagaccaggaggaagagataaagtgacttaggagatgcctaaagatgaagaacagcccgggatccgtaaacagactcagctcggtgtcttctcgcaccttctcagaatcaagtttccaaaatgagggtcatccgcctgccttggaatttgggttgggaagtggatggagttcctggacacatgctctaggccctgaccagtctggccactgctcactaggaattctgttgggagggtgtacaacagattttccaactggtctacagcgagcatcggtagtttccctatggagaaaatgattttctttctgggaatccccctatagcctgaaggctttgcctcatttcccatagctcctctccggtgtaccccttcggttcgcactttcctaccttcttcccagtccactggcttctccttctttatcttcctcagtgtcccttctcacaacctccctgctaccacaccagattctgaaggggaggagttgtctggaaagaccagagctgggtgctggggatctggagcagctcgggacccgcgctgcagggagctgggatgggagaggtgagggagaggaggatgggactctgggagaaagagagggggctgggctggcgctggggatggaagaggcgaggtgaacgcactcaagcggttacctgcagacagggagagacagtggcaaatacctgccttcaattaaacgcatatcaatttgtgtgtggggtcagtactgcacatcatcaagcctcttgggtataaaaccttcctactggaactctccagccccgcccccaccaccccacgcgcggctccctgctttctcttgctttggggtgaggctggggatgtgggtggctccagagttccctgcccgcagtttaggggcgaagtgatcggtgtgtgcgcgctgggcactctgcgggttaaaaaggtttagcagaaagggatgcagatggaggcgggaagccaggctaagaaagggataccgacctccctcctcgggtcggaggtgtgaactgggaagcactgcgcagacctgagcgaggtggcctgaatccaggggccgggcaagggggtggtgtgaatagaaatagcacatttcccaggctttcagccccggtactctgccatccttccagttccatgcactcagccaggtctccaggctggagcaagggctgggggtcaatgggtccttccttctctcgggaaacgttcttctggcgcgaagctgggcggagggagagtcggacattttcctctgcttctctcagggcagctggcgtggccacctcgcaaggctgcttctagggacacgagactcgggagggtcagagactttcaggccgggccttcactcccttccccggggcacttgggcaagagttccagctcttggctacctctggcccgcgcgtgagttcagacacccagcacacgcgacccccgcagggaaaccccgggaagctgcgcgcaatcgctggggactcgccagggctccacttcccaagctccgcgccccctgcgcccaaagaggcagggcggagcagaggccgccggcgtggaggaggcgagcgcggggctggcccgggagccgcccccggggagggactgagacctgccccaggagtcgagggcgagcggcggacccggctgggcccggcgcacgccgaggagagggagcccccgccaccgccgctgcctccgcgtgctcagcctgtccccgcccagggagccggagcctccaactaactccgcccgccgctccgccgcccgcaggctccggcttccgtcccggacagagcccgtggtcgcgcaggttggtgttgttgccgctgctgccgccactgcgaggcggtcagggcaagggtgagggtgggggcgcggaagggggcctgggctcgggatcctgctgccaccaattcctggtgccccaggaggttgttgctttttctcccgggctgcccgggtcgggggtggggggatggggcggggatccagcgatgcggccagggaggattttggggactgagctattctcgcatttcccaaacctctctcacgacccttcatcaccattattaagtccctggccagtttgtgaggggtcgtcctcccctccggtccttctcacctccgcacttctccttgtgccctctccctagggggtacaatttgttcattcgccttttctgcccccaacttggagaactctccgtgacgcctagaaagcctcctcggttctccgcccgcccttcagtctagtttggggaagtagaggccgccgcggagtagcaacctggggtgtggagtgggggcgagtgccgggaagcagtggaaattccttcccctctttctttcccgtccttgcccagctttgctctcttcctgccgttttgccagcctccgaatgtaatacgcgggcgaagggcgatctccaaggcagaatgggaagtatccaccacttgggatactagttaagtctaggttcagtcaccttcccagctctgtggccttgggacccgccccatcggaacctgtatgttgtcatctgcaaaatatgcgtcagctctgcctgccgctgagggtagttgtggggctcccttgggatgacttagggtattacgtgattttgagcacggtctcttgtctcgtgcagctgcctgatggcaggtcctgtgttctgatcgtctgagttcaggtcctttggctgagatgtgattatctctctgggtgatttggtcagtagctttgcggggctaaaaggcatgtgttcctggagctggtcattg

SEQ ID NO: 10594 - DNA, 6000 bp, Homo sapiens
aaatgtcaggaaggtaattatttaaggaaaaacaactaagcagaatgatttattggggaaaacaatttttagcttgagacagacccattatcacatttctctgcttaaattagacctgggactttagacagatttcttaacctttataattttcttatccataaattgtgaatagtattttaataactgacgtgtaacattgaatgagttatttatataagtgcccggctcactatgtgatagggttttttctgtgtatgtgttttttttaacccagtatttactccttgtttcctgcttcaagttccacttgctaactccttttgatctcttttgtctgcttttctagaactcttttttctttagatttctctctcttgaacatcttttttcaataatgcctttgccatctcttgtcttataccttaaggcccaatccttgaccctctgttttttatcctatactcattattctgaaagagctaatttattcacaggaatcattagctctaatctcatgtgagttaaatcttcagactcaacttttaaaaacaatctcatctgtccctctaaaaattagcttcctttagaacctcttctccttggcaatatattagtgatactattgttatcttcacactaaagattcaaaactttagtttttgttttaggaaagttttttatttttacatttctttcatccttcataattacccagtcatcatgaactttgtagttatctatttcttcattaagaatccttgaggcctaggtgggcggatcatgaggtcaggagttcgagaccagcctggccaacagtgaaatcccatctctactaaaaatacaaaaattagccgggtgtggtagtgggcgcctgttgtcccagctattcaggaggctgagatggaagaatcgcttgaacccgggaggcagaggttgcagtgagctgagatcacgccactgtactccagcctcggtgacagagtaagactctgtcttaaaaaaaataaaaaagaaagaaagaaagaaatccttgtactagtctccacattttaaaagtcaatactcatacaagattgttttcaagttgcaatacttatatatatccttttactgattaaggattcatattgactcatattccctaaaatcaacttcagacttcttattatagttttaaaccaaggttttaattacatcactttacctttcagatttgcagattatcttaactgctaaacttttaaaaaaaatgtatcaattgtttattgagtacttgcctatatcaggtactgttatagaccctggggatacaacagcaaacaaaaccaaaatgctctgttctcatagcacttatattcttatggggaaagtagacataaacaactaaataaaaggtatatttcatggcgattaactgctaaagaaagcaaaaataaagcaaggaaggcaaataggatgtgtaatgggtagggaggggcggttaatatttttttaagaagataagtaaaggtctcactgagaaggtgacatttgtgtaaagatcaacatgcatatttgggagaatattctaagtagagggaaggcaagtgcaaatgcccttacatgggactgtgtcatgtgtgttgtatcatacatgcttgagaagtaggaaggatgccgatgtggctggtgctaactaagcacaaaataagcaaatgttgaattgtatttagagggaaagcaggtgcaaaaactctcaagtgggactgtgtcatgtgtgttgtatcacacatgcttaagaagtagaaaggaagctgttatggttggtgctaagtaagcaaggggggaatacaggagatgaggcctgagtggtaagaggggaccagattacataggacattgtaaatcattgtaataattgggcttttgtttgagaaggatggaaagtctttgataggtttgagcagagcggtggtgtgatctgacttacatctttattaggatctctttgactgttgcattaaaaataaactggagtgggaaggatgtcagggtcagaagtaggaagatggattagaaggctaggcaagctcactgtcatctcatagttttaaatatcatctatttactaaagactcccacatttataatacagtgctcctccactcacgatgggattacatcccaataaacctgtcataaattcgaaaaatcttaggttgagacatcgtaagttggaaaccatctgtaggtccattgtgtacctttttctgtaatttctattgtgaactccatttggagttaatttacttaacatttctgaactcttgatcttcaccaaattgctactctggcaatttttcatctcaataaaaggcagtgctattcccccagttcctctggacagcaaccttggggttatccttgacccttctcttgcataccccaaatgcaattcaccagtaattcccatagactttgattttaggataaaagcacaattgaaccactttacttctgttgccaccttctagtccaagccaccatcatctctttgttactggaatcattccagtaacttttgaactggtttctcaactgatcttgttctcctttgcacaacagccagtattctttcaaaatacaaattatgtcatgtccgtcttctgcttaaaatcaaccagttatttcccatctgactagaagccaaagtctacagattagtctctaaggcatgatatagcccctggctaccttataaatttcatctgctactttcctgcagtcattgctgcagccaaagtgccttttggcaagttcttttctatctatctatacctcggtaatccacatcaaactttcttattcatatccccaaaattctacaaaagcagacattgcaggtggtaataagactaacatttattgagtgactcctgagtgccaagccttttttcatttaatattcacaacaaccctgtgcataaaaagtagacagtgctcatttccatttttgtagaatgcgaaactgtgcttaggagaagttaagtaacttgacaatggttacatagccagtaagtaatggagccaggatttaaacatgtttaagaactataagcactatattgtctccttaagcgttacatagttattgcctttccatgtgagttctaagaagtttcttgagatgtatccacctacacatctccccagtctccctaccccaataagattagctcccaacttcactgctagcaattttatgagatttcatttgaaaaaaaatctgatgcctagataacagttaaagtctgcaaatcatggatgtttccctcttcagtcactatgttaggatttaaaaggaacctaaaaagagtcctttttctgtggcaaaataagcaaatgttaagttttacttatttcatcatttttatttcagagtgagataattcgagataatactggcattttggagtgtgttaaagaaggaattggaagagtgataggcatgggagtgcctcatagcaaacgacttcttccgcttctttccttgatcttccctacggtgcttcatggagttcttcattacatcatcagctcagttattcagaagtttgtcctactaattctaaagagaaagacttacaatagccacctagctgagagcactagccctgtgcagagtatgttggatgcttattttccagaacttattgctaactttgctgccagtctttgttctgacgttatactttacccattggaaacagttttgcaccgccttcacattcaaggaacacgcacaataattgacaatacagaccttggctatgaagtgcttccaattaatacacaatatgagggaatgagagactgtatcaataccataaggcaggaggaaggagtgtttggtttttataaagggtttggtgctgttataatacagtacacactgcatgcagctgttttacagattaccaaaattatttactctacacttcttcaaaataacatttgagatttaggttccttcactgagtagtctggaagatataatctggataatttgctatgaagttatgagggatacaagtgaaatactggggaagaaaatggattggaaagtaaaattggtactaaagcccatactgattatcttgactttgttttttaaggcataggtatatattttggatcaaaatccttccaaatttgaaaactcaataaaaataacacttattaaattctagttagtgtagcactcatgctgaagtaaacatgatcgtaggcagaagcaaaattttattataaaatctaaaacaaaactttatagagttgaatctattccatctgacttcaatatttgccaaacgtttattttacctcctagattgatgttggtatagtatccttaatacagtgtagtatattaatgtccttaatacaatcaggaggtttttacctttaagcaaataaattatgtcattattgaaaaagacttaagggatgattagacttggcaatctgtaagcaggagtataaatgttttaaattgcattgtccctatgtaactatcttaatggctatatatatgtattttataaagccatttatgtatacacatgtaacttggaatttccttcatccctacacattttctacacttacatcaccttattgcataaaacaaagtcacgcgctttctgcttgaacatcaaaatatcaaaaaccaaggtacccaaaagatacaagtcagagacaacatccttgtccatatccaaacccagtgtttcagtgctagcaacttaatttctcatacatttatagagtttggtttgctttgctagttgtgtgaatcattgggctgtttttagagccactgttaagagagaatataaaataatcatgacaattactactgtttccacatttacaaattgtgtacttaaatgaacctcatttcccttttatttctgaatggcttgtctgagaggaaacaaaattaaaattcatctgggaatttgtgcctcttgtctagtatatagtcaccactaaataatggcttccgtttttattttctttcaggttttgctttaaattttgttttccaaaatagatgtacgtggagggaaaagcaattattcttatcaccttttatttaaacttctttagatgaatactgaagaaaaatccaaaccttaaaggaaatgtgcccttgtattttatgggtgaggggaaaaagtacatttgtacatttcaacatataataagcaaaaaaattactaatcagtttaataaaaacattttgtctattcctaaatgtaatttggtgggttaagcactttgtgtagtaaaatgatatgtgtctgctctatcattagacattttaaagtttcatgtcttcacgtgaataatcacagttgtatcatgaaccatttagcgctctgaagcacagtgactttgcactgatattgtccaaccaagaatgcatacgaatagaaattcattttacttgctaaatgtcacagaaatggttactttttgcaaatagtagtgttggaacaaaaaagtgatatccaaaaagtgtaaaaacagtaataagtagcaaatctctcgtgtgtgtgtgtgtgtagttactgaaacacctacattttccatttttaaattccaccaaaagggggaaaataaaattaaacaccactgatcacattttatattttatggtgactattttagattaaggtttactttgtccaaccaatagcatttaaattgttttcaattaggatagtttcagataagagtaaaccagaaaatttcaagtttgaaaaatttctagaaaagaatctgaatagaatcaagtatttactagtgaaaatctgtaggatcctttgtttagctaaaaattaaatatttcaggatattttttggaagttagcatgaaaatagttagttacataaattcattttattgtagaataattataagactgataggctgaaccatacacaaataag

SEQ ID NO: 10595 - DNA, 6000 bp, Homo sapiens; identical to SEQ ID NO: 2358

SEQ ID NO: 10596 - DNA, 6000 bp, Homo sapiens
cccaaaaattcctgattttatttaaaaaatacttagcaattcttcaattacctatccactcatgctatctgagttaatactatccaagattgtgatctatttgcagataaaggtgtctcatacatataattatgtatatataaaaaacacttaatgtgccaaatacatgtagacatttaaatttctgtagtcaaatgccaaattaaaatgcagtggcatttaaagaattaacctttactacaactgccactgtgaagtgcttaacgtgtactgttaacatgaagtatttcctagttctttcacaatatatggcaaagatacattgcttacctcaagaaaaataggaaaaaagtaactgctatcaaaacaaactgaaaaaatccaaaacttctgtagtaatgtacagatattgcaatgctctatgatagatttttatgcatgggtattcatgcatactttcatgtgactttctgaggaaaacaatacaggaggcaaaaaataaatacataaactggttcacattgtaaaacaaatctaaaacatttcatttcagaattccccagagaatcctttgataaagtacataaactccactaacaagagataaggcagggcacagtggcacactcatgtaattctagcacttctgaggcggccccgtctctactaaaaacacaaaaattagccaggcttggtggtgcactcctgtaataatcctggctactagggtggctgaggcaggagaatcgcttgaaccaggaggagaaggttgcagtgtgtcactgcactccagcctgggcaacagagcgagactgtctcaaaaaaaaaaaatgaataaataaaaataaagggataaaagggcataacaaaagcgacatatgtggctccatatgcatttctataaacaacagttaattcactgttgcctaggaactactgcaaatttttgtaggaaaacatcaccattggtttcataccaactgttctgaggccacaagtttaagaaactttttgatgaagtcaatgagtccttggatggttcgtgttcgctctactgcccacttctttgttttcataataggagtgtctcccacagcctttagcaaaatgtcaactgtaaaagaagaataaaatttactgacaattacactgaaacatctaaagagaatggaatataaaagacttagaaatcagaaatatttaatctacatccatcttacgtatttatgatactgaagatatgtgagagatgtaaaaatgttagattcttttccatcatttttttcttgatcctacaaagttctcccaacaggactaatttttaaaatgccttttatcttaacaggcagttccaaagagaggaaatacaaatgatcaatacacaaacaatatttaagttcacaaaaagcaaagtaaaataatgtcatgtcccttttcacccaccaaactagttaaaattagagtaattaccagtgtagatgatactacttttgagaatgtaaaatggtataccctttgtggaatgcagtatggtaatacagatcctaataaaggtatactttgattcaataatacttctaggaatccagtgtaagaaaatatgagatgtgtgaaaattcacttaaaaagatttcacctccatttaagcatttatttttatatgaaacactggtaaacctaaatacccaaaaaggatatttggaggtgactgattaaatagaatgtagtaaaccgcatacacttttaactgcctggggttcgaatcctggctctgccacttgctgggtatatatgtggatatttaatctctccaacagcatgtataatatcttaaattcattaaaaaccatcacaaacacattcacataaatatggaagaatatgcaacaaaatgatatttctcagtagtgacattgtaggcaatgattacttggatttacttatgctgtttgtaactaccaaattttctgtaataaactttttaataaaggaaagcaataagttattaacaatagaacaaccaaagccaaaaagaagttgcagaaagagaaatcttaaggtttcaacgatccaaaacacagatatgcaaacccaaaccctatgaatctgtctctcagacataaagttatttgctaaaacaaaacaaacatacatctggctgggcgcggtggctcacgccagtaatctccacactttgggaggctgaggcaggaggatcacttgaggtcaggagttcaagagggcccagtccccttccaacttcttgttcacgaccagcctggccaacatggtgaaaccccatctctactaaaaatacaaaaacttagccaggcgtggtggtgcatgcccgtaatctcagctacttgggaggctgagacaggggaatagcttgaacccgggacgcggaggttgcagtgaaccgagattaagccactgcactccagcctgggtgacagactgagacatcctctcaaaaaaaaaaaaaaaaaaatctacagtcaaaaagcaagacacattgaaagcaaaacagtgtattgctgccccctaaagttaactctattctattacacccttcttgctccattctttaggtattaaatattggggccaaaagatcagaggtcattttattcaagtttactcctggaatgaacgcatctagaacacatgatctttatcttcctactaaagaactacttaattatcctaggtccagttatcttaggaataggaatgaatttggagataacgtgggattttagttagcctatctttcatacctcctttcactgctccctcaaatcccctggggctatcaataaatcgattaattcaattaaacatttccagaaagtgaagcaggaaatatcatgagttatgctaccaaggatgaagtgtaagacagtgagaaaccagagaaggaaaataatttaattatagctgccctctctttttaattttaaaggtgatttgcttgtagttctgaacccggatacacattagaatcaactagggaaacacttactccccaggaaacctaacatacctccagtgccaaaaccttggtctgtttcaacaatctttcttctgtagattaacaaaggctgaggatacaaaacagttaagctgctttcatcatattatcctcaacaaataatgacaagcacaaggtaggaatagttagaaactaagttttatattggagaggcaaactcaaatgctaacaagagccagaaaataaaaatctcatccttaaatgacagttcaatttgcaaaaaaatactgtccagaccaagaaaatatgccctcgggcaatatttagattgtaagccattttttttagcttttgttttgcacagctatcatcagagtcaagtaacaagttttgactaagactgttagaccttaaaacgaatctccgaacgtccgctcttgcctatagtaaattggaagaaaaaatgcaacaaaacactgtaaaacctgcggaattcttttgaagaaagattccagtggctatccatggaaatacttatagtgcatcaggtggaaatgggagtctgatttaaagtgggaaggggggcagtcttgggagagaattatcctccacagtagcagaagttgaagaaaaagcaatgagaccaatgtcttttttttttttttttttgaggcggagtttcgctcttgttgtccaggctggagtgcaatggcgagacctccgcccactgccacctccgcctcgcgggttcaagcgattctcctgcctcagcctcccgagtagctgggattacaggcgcgcgccaccacacccatctaacttttatatttttagtagagatggagtcttaccatgttggccaggctggtctcgaactcttgacctcaggtgatccacccgcctcagcctaccaaagtgctgggattacaggagtgagccaccgcgcccggccagagaccactgtcatcttaagacagaacggggaaaacgtctaaggacgaaatcagcctctctgaatcgaggatgcttatatgctgcttttcccataggcaactctaactctaaacagagtgctttagaacacgtaattttagcaatctcttttacaaagggaaacattctcaagcaataaagggttgaggatagctgactcaagcaatgaaataactcacaaaggttccaaaatgtgtttcttaaaaaggtaacatctatgcctttagctttcccttagcagtcttcattctgcataagaatttggtttttggtttaaggagtgaattcacaaccaactgggagggggaaaaaagcaaaagcgagttaagttggaaggcatgaattctaatccaggctttgccaatgaccacccctaccaccataaaacattactcaaataattagctcctgtgttaagtacctggaattaccgagacccccctccccccgccccactcagctccctccctccttcaaagagctcgcagtctggccaactcaaaaaaatacagtataaaaataagtgtggcagccaagtatcaggccctacaccgatagacagagatggtattttaacactcaacttaaaggccttaaaaatcaaaaagtacacttcttttcttctgatgactggtcaaaatgcaggtctaggacaggcgctcctctaaattttgcttctttactggccgccacccctactcggatgcaatctgaacctcccgcctctctgcccggaaataaattcagttactttttttcttggtgtcgccagcaggttcctctgttcccggggaaactgcagcggaagacgggggctccggggtggttgtttctggggagacatccgtaagtccttcccctccagcagcaattgaagtaggaagctgcaacacagactgcggctcctccgccatcttgcttggagacactcgagagcggaagtagcgactgagcgcgtgcagtgggcgtgcttttctccagggagcgtcgcaaaggaggcgccggagtagggggacgcaattacacagtgaaacttggtgttcccggctagtcattcaaatcgaagctgtcgcagacctctgaacgttagtaacgcaacatgtgtttctccgcgactacagacctcgggagaggagcggtgggcaacgtgtctgtgctcggtcgaatgcgcacactccagttaggccgctggctcggacctagaaatgtttccgctttccttagtgcctgccccgcccaggccccgccccttgggccccgcccgacggctcgggagcgcgcgcggtcgcgtgcgggagggggcgggtggggaaggatcgcaggcgagattacgaggcgaggctcgcgcgcccgcccccgccctggcccccagtgcccacccggtcggcccggcacagccatgatcaaggcgatcctaatcttcaacaaccacgggaagccgcggctctccaagttctaccagccctacgtgagtatccagccgccgctgatccgggcgagggggagtcgttggcgacgggcagcgcccagcgcggctttctcagagcgaccccctccggcgcgctgcggcccttgtcccgtcccggccgcctggcgctcgccagctgtcagcctcctggtgggtgtggacagggtgcccacctccctgccgcgcggtcagccaccgacgtggctttgcccgggcggttcctccgcccgtcggtgggctgcatgctttcctggctgcgcgggcgaggccctggagacttcccggggcccggccctcgccgatcgggcagccgcagcccagccgcgccgcggagccctgcgcccagtccccaagagcccaccccgcgcggctgccttcctgccgcccgcggctgcagttagcccgggaggaggaagacggcgtggaactcgttcttctcgcccccctccgccgactcccatcctttccaggtggacttctttctgttctttggacagatgggctaccgtttttcactgtggtcctctcatagcacaggaacttt

SEQ ID NO: 10597 - DNA, 6000 bp, Homo sapiens
attacaaaatgtagataagatagagtattacacttgtttctccataatatgaatcagtacgtgtgaactaaaatattttatgcaattttttattccataacaattttttcttttgacttagatgattaaggcaaaagaagcaaacctttagaaactttatttctctcatcgcaattttgttgacagattgttctggtctctcataaaatatcttaatggccactatctgcccagtattcttatgtttacatttcatgactgttccgtaacttccctctcccacttttccaagggtttcatacatctccattttcaagctgggcttttactactttatagaaataaagaaagaaaatggaaaatgttaaacgtttatacttttatttattaaaactagataatgcatatccacaataaacccacagtctcaaatatagagacattaaaaaaaaaaaaggaatcttttccactgagcctttttgtctttgggaactaaagacagcttgagtaaggtgtccttctgaggctccacctctcaccagaacttaggggtactcctgctgtctcggtcatgcccatcaacactgagactaccacactataagtcaccatccatcaagcatggggtccctacacttcctgtcatgttcctgtcaaataataggttcccgcactactgcagtcgcccacttatcaggcccaaggtcctaaaaaaagcctggtctcgcccgcaactcaaaccacacgtcttaggatgccggaccggcgtcacgccccacgtcccgctgttgactttatccaaacagccgccgccgcctcagcccattctgtggtcccgctggtctggctctgcgtagttccagtggagccaccgaacactgatactactttgttgctcagccccgcaaggaaccggccacttgccaccatggaaacgccggcggagttgctgcgttctagactcgtgcgcaagaccggaacatgggcagggtcccgacccggaaggggaagtgggaagaaacggaaacctactctgggtaggcgcaaggtggaagagtgctgtgcttgggaatgggggaggggagtacagattgctgtcgcagctgagcctcctcacaaggttgcttttgaatgtggataggaaggatctgcatcttttttttttttttttttttttttgagatagtctagctctgtcgcccaggctggactgcagtgtcgctgatcttggctcactgcaacctcctccttccaggtttaagtgattttcctgcctcagcctcccgagtagctgggattacaggcgtgtgccaccacgcccggataattttgtatttttagtagagacggggtttctaccatgttggccaggctggtctcgaactcccaacatcaggtgatccgcctgcctcggcctcccaaagtgctgggattacaggcgtaagccaccgcccccggtcaagatggttcttaaatcaaaaacttttcttgaacacttgccatatgccttttaattttttccaactgctagtaatcttttttaaagaaaaaaaacctccctcaccacatgtcaaactctaggaaagcaagtaattcgaagagttccaccatatacgaaatgatgtacaagagcacggaaataaagaggccagtgtctaactgcttaagtagacatagagttcaactggaatgacagtccctaatgaataaccaccatatcactagaccaagtgcctagggagtgctttctttattgaatagggctttctttgctttcttctataaaatgagttaaatgtaaaaaagcgaaatctcgctatgcttccgctaaataagaggaaaggcattatttaataaatctagtctggtgggtcccacccagcatgcatatttaaatcacacctggagagcttttagaaagcatcccaacccccacctccacacccctgccccaatgccagagcacctgatttaattgggatagcgtaaataaattagtatttttgaagcttctcaagttttttctatgctgctagggtttatattgagagaaaggagaagtggtcatcgttttcattgatcacctaaaatattcagaattgtcttttctttgaaggttattcagacgggcgcagtggctaacgcctgtaatcccagcactttgggaggcccaggcgggcggatcacgaggtcaggagatcgagaccatcctggctaacacggtgaaaccccatttctactaaaaaatagaaaaaattagctgggcgtggtggcgggcgcctgtagtcccagctactcgggaggcggaggcaggagaatggcgtgaatccgggaggcggagcttgcagtgagcggagatcgcaccactacattccagcctgggtggcagagcgagactccatctcaaaaaaaaaaaaaaaaaaaaaaagaaagttattcaaccacaatataaaataccttctataaataagaatgtcatagtaaatcttatagtgggctcaaacttggtgtaagcatattatttgttgtgggctaaatatttgcaaggaggctgcgcacagtggctcacacctgtaatcccagggaggccaaggtgggcagatcacttgagcccaggagttccagaccagcctgggcaagagggcaaaactccatctctacaaaaaattagccgggcatggtggtgcacacctgtggtcccagctacttgggcgtctgaaggagaattactggagcccagaaggtcaaggctgcagtgagccctgttcacaccactgcactccaacctgggtgacagagcaaaactctgtctcaaaaaataaaaaaatttgcccaggacaaagatgaaccaaactgagtccctgccctcaatgaactcataatccagagctacagaactgataacagcatacagttaatagctttaaaattattccttctacaagtaggttatggcaggcctggttaacaaggacagccagtgattcttgctaatacacagctgtaagactttatgatgcacattcactgaatcagttaaaagtgttatatcattttggaaaataataaactgtttccaaaacaattataaatccctgtagtctctgaattccttacctctattgcctccagttcccatcttcaggacttcgttggtgggtcaggaggactctgagcacttttgtatccattcgtcagctcaacagggaaagagggggtaggaggaggacctcagcattgccctaatcttgcccatagttccatggaaccagaaagggttaacttttcccactttccttgtacctccctttcttcaaaccctgaattctgtctctgctttcagtgactgccttgactgataaattacaagggtttttttggttgttgcgggatttttttgaggcagggtctcagtggcatgatgatggctcactgcagcttcaacttcctcgtctcaagcgattcttctgcctcagcctcctgagttgctgggactattggtgtgcgccaccatgcctggctaattttactttttgtagagacaggatctcctatgttgcccaggctggtcttcaactcctggcctcccaaagtattaggattacaggcatgagctaatgccccagctcatgagggatatttttaagatatagtttctctttaccatttttctccatgtaaccctacctgtgtgtcttcctcctttgctattggaagggttaggactgcaatggcagaaaggcaaaaaaattaagaatattcagcttttaacttaaaaaacacattgcgaatgtctaacaggacctatcaagagttaggcctggctaacctgatcaccaaggcagtcactggaagcagagagggaattcagggtttgaagaaagaggtacaaggaaagtcagaaaagttaactctgcttccatggaatcaggggcaaggctgaggcaatgttaaggtcctcattccaccctccctttacctgttgaactgaacagttccccaaatggatacaaaagtactcagagtccttagtataacaaagtcctgaaggtaggaattggaagcaatagagggaaggacggtgaccacagaaaatattcaaggtctttgggaggtcaacacctctgaaccccctggtggtggggggcccttctggcccatttgcacctttcttgctagtgtagaaaacctgaagttatctcaggctagatatataaccctcactcatgtctgccggagctctcccccagaatatgaatcatatttgtaggtttctttgacaaccaaccactcattgatatgcttggaagactgcacccccacattccttaaaaatacaatggtactcccccaccataggcaagtccccggactctgacacatatcttcaattgaaagcagacccagaaaggaaaaactgcataatacaccatcctttaatatttgcccagaatttccaatactagaaaccccactgcaaagcagaaagactatctggtagcttcaaggaaccatttcaggagattgttgtgtgggcctcagtattcaaggctgccttagaagatcgtgcgatcctctcactcttcttgccccaagtaccagagttaataagccactgaaccaaccagaggggaattatttttggtcccggtttaaagaaaacaaaacaagctgttgattctgccatgacctcttgggtaatgttgtctctatacctgtgataaacagaaaacaactaataaaggtttatcccgccctcaccctcttaaacccgcttcacagacctggctgaaactcacatccaggcgaggcgctcacgtgacccgttctaaacgcgtcatagggacacgtggttctagatacttctccccctcccactcaggggtggattgttgacaaggccgcgggcagtcacgtgatcttacatcatcccacctcctttccctgaaatctctggcccggatgcgtccctctttctccaccccgccgagcctaaactagtgacggggagggagacgggatagtgtttctgtttcgtggtctttgaatccacaacctctagtctgaacacagagaacacaaatttgtctattacttcaggaagcccagggggaaccgcgccccgctgaagggctcggggaaggcgcgctcccgcgtcccgccccctcctcccccagcactcacactgtggtagcggcggagggcggagggatccggaggcggcggagggagacgtcattgcagggttgtttgtcagtctcggcggcggcggcggcggcggcggcggcggcgatccacagtgattcggccgccgcgccggggggtgggggggctgcgcgggactttttttttttcagactgaccgcggggcagctgcggagcatgtcgaccccggcccggaggaggctcatgcgggatttcaagcggtaagggccttcaccttcgcctagatgacggcccctcaaagctgcggggctgcagggcgtggatcccagacaccttcccctttgtgaccctcagagggccggctgtgggcccagcgggactggcggaagccgggtcctagcctcggccctactcccataagctttgccgctcgttctggcgcccgaagaaattttgatactgcttcccctccccacaaaaagtaaaacggtgtcgatcgactggtctagggttccctgctgcccatttcggccagctgcccggcgtctcgcccaggcgatcagacattatccgcccgcccctgcaccctgcggcgcccccttcttgtcccctcaaagtgagctcctgcgggagcttgttcctctccggcagcaccagtcagctttgtttcacggccccgccgtcttctccgaggagccgtgttggggcgaacccctctcccgactcctgccaatcctttccatttgtgccctgagggtggggtccagtgcgtgaggcccggaggttaacccatcccccgaaacccgactctgtccccgcccgcctgaaaggacc

SEQ ID NO: 10598 - DNA, 6000 bp, Homo sapiens
atcagagttctcatgattaagacttcatgtagttaaagagcttcctagagaacacaaaattttcatctctttcccctctcctcaattccataacactttcagattttcacctgctgctctggatttgtggtggggtacacatgtggtttggcttatctgagactgtctctgaggatgaaaattgagaaggtagaaccccggaggttattcaagttaacttggggggtgttcgccatcaggagaaacagatgctgtttaagtcaggaagaaatgagtgttcgctccaaggcctgcttcagaaagcctctttgttttatgactctgggtgcaagcaacccttttaattttgtgtcttggattccagccataggaggccttctttaatgtggcagatggctggagacaggcaagccaggtttctagactctacattaagctgccttccctagagaggagtctcctaattatgttgctctgaaaaagagaagaaaagataccttaaaatggacacattaaacttataccacgtgtaaagtaaccactgtcttaagcatctgcaaacatgtggaggtcaggaaacctttgagaatctgatgaaagctataggctttttctgcagaaaatttgtatgtaggtatatacacaaaaatgtgcacattaattcccgggggtggggtcacagattctctgatatccgtccctgaagcttcaaggagtctgtggctgccagattcctgtgctttgagtggaggcagctgtcattcttttactttttcatttttcaatacattatgatctcaacttctgagctatgaaaataaagggtctgtggattataagggaagcatttcacaccagaacaccaaaattttactggaaaaaactcctttcaaatattggataaaattacttttgcatattctctggtcagcatggaaggtttgctcattctgttaaagactgacatgaaatctcttctgacaaacatgatgagctttttcttactggattgtggggtgcgcctctgcacatcatttccttggaacctcactcatctcagaactcctcagttgagttctggcttctgcactgtttccaatattaagaattgggtgcagtgggcagtctgccaattaaagaataacacagaattctcagaatttggaaaggaagctttattgtttccaaggactctgctggaggagtcatacaaacttcgccatttcttcctctgatgtccatgtgccatgattgtctgaggaagggagaaaaagtctttgaagtggctaccaggatcctttgcagatctctgggatgtcattcactcatgcttctatgctgggtgactcctaccatcatcacattcttccaattctcccagtagggtatgcagtagtcatgtaggcagagccttctgagctacagcaaactacaaaattaagatatttattaatgattttcaaaccaaaaacaatttgcctcaattactagacattttaaaattaaaaaatacagaaatgtttctaaattattccagttcttcatcttccatatattgtctcacctttcctgaaagttgcctccttcttagacctgaaaaactcaaggagggagtaggtcatgggctaaacatttaggctaattctctacatgaaattgataatataaatgattattgaaaaaattcaaaggaaaggatcatttcttctgtaaacatcaacccaacccaagaaaaactatttgggatttaaatcagggtttctcaaccacagcacaactgatattttgggttgactaatttttggtagaaggaggctgttctgtgcattgtagcatgttcagcagtgtctctgacctgcaacgcctagatgctagtagcaccgccctcctagttgtgacaaccgagaacatctttaaacattgccaaatgtttcctgggggtgcagtcacccctggttgagaattataggactaaattgtccagaaataggtttctctacaagtaaagtaaaattgagtattggagttgcttttatctggtcttcttgatcaggtgaatggctaaatgaaaaaagcagtttgtctattttgatgccccactgactatgtctatctgttcagatcatcctgttctacatttgttcttagatcccatttgattgccaaaaacagggacttccttacttcattcttatggttctgggattcctgttcatttgctgttttataatgtttttgactgtatagatatttagtgatccctctgattttccatagtctttgaggtctaggtaatttcttagaccttcggaaggctgctggtgtggtactaaaatctccattcctctcttctatgttatctcttccaactttagacctaaactgagctcaaatagcaagttggagaggctggagttgctggctgatttgatcagtatgtggacacataacttaggaagcaaaactgttggctatgagattacatatgtgattatgaaaaggaatcttgtaatcacaaattcttctgacgtatgtacagtgactgcaaaacagcaaataatttgttttgggaaggattttattggctgtttgaagtgaggagtatctctactatacaaaatatttaaaccaaattgttatgtcctataatgttcaacaaagcactctgcaaacatcagttctggaaaaaaaaaaaacgtatcctccaaggcaggattatatgcacttctgggagttgtaaacccatgcaggctccagaaatatttgccttccaagggctggaaacttctgaattaacaacaaataatcagtgagtgtgacaaagagttaaagtacacagactttactttctcaaagtttatgatgtagtaaagaagtttaagatggagacctgaaattgcaaactggtggccagtaggctaaatcgggaccatggatttgttttgtttggcttgcatgtagttggcctccagaatgtctaacagagtgagaggaagggagcggggtggggggcgggcaggagacaggcaaagagagagaaaaatagaaagaagttgctaaacagatataattgagattttcacataaaaatctaaatttccagctttgcttgaaaaatcagaatatctgccaacactgggtccttattcccacatttccctatggtaacagttggctggaatgaaatagcagtgacccctttggtctctggaactagacactcactctctggtctcttcccccacttccccttcactcctttactagccctctgtcaccatttcagatggccacccctaatgcagagacttctggacatttatttagtttcttctccacagaaataaacttctagagcctggagcaaaatagtggctgcgccatttgtgtgtcagatgagatgaccctggctcgggccatggaggtggcaattgaggtgtgagaaatggtcagatttaggataaattttgaagaaagagtcagtagaatttctgatggattggattagggtgtcaaagagcattccaaaatgaccccgattttgatttttacttattttaaaaagaaaacctataatagaacattggagagccagtattgaccttttcaaataaaaacaaaattattcaaaagctttttcttactagtactattcaaatcgggtaccctatgtggtaccaatattatattctaggaaatactgacggttttggaaatttggaggaaaaagcatcgagaagagctccaattacttagaaaagagagtccaggagatggggtggtgtatataagcctatggatggtgtctctgcaactcagtggccccgcctgtccaggggctgggtccccacgggatctccctccccacaaggaggtggagaggctatgtgtcttgaacaactggggttgcgatccagtgtatgggcagtcccactcctggaactccagggtgggcactcgctccatttccacaggccctcaagggttccaggattgccccgtgggaggggttttagtgctgcatctagtaagaagctgtaagatgctcagaaacatgttttgaagctactttgcacagaaagaagactcttcattcagatttgtattacagatcaataaaagtagctaagtcgtatctgaagatgtttttgtttacactttgtatgtgacagaaaacctccagttgtctgtgtcaaggacaattacttaattttattacaatgtatactgatttggttagtggaagcttctagcgcctactgtggtggtggtgggagctatctgattcccattcccaggcctggccatcgacgcgaaggcctccagctgatcggaagtcggcgttggccggcgcggagcccggcgcggaggcttctttcagccgcccgggcaagacacccctccctcggtcccgcagcggtcactccgcctctggcgcgcatgcgccgaccccagcgggcgtcctcccgggctccctctccctccctccctcatccgggtcctgggcgagcgggcgccgtgcgcgtgtcccgcggccgagctgctaataaagttgcagcgaggagaagcgcagcgacggcgtcgggagagcgcgcctagccggctcgcgagtgagtgagggtccccggcgcgcgcgggcgaggggaactgggggctgcaggctctgccccggcggactcgggccgaggcgggggcgttcggccgcggacggagcggaaacgacccagggcctgtcgggcgggaggtaggccgagtcctggcctgccggggtcccggctggcggacacggtgcggcccagcggctgcggaggcctcgctggctgcccggggcgtcctgaggcggggccggggctggccctcgtcccagccccgctgttaccgcccagactttggagggaggcgtctgggacgccctggaggggaccccctgaccccgcgctgtcctggggagcggtttgctttcctaactcatcggatgtaccaccctggatacacacccttgataggactgcggtgctcggccgggcagcctgggctgctgcactgcgaagctgtccaatggcttgatgaatccgtgccgccgtcgctttgtgtttcaaagataaggatccgcgcttatcggtgggaattacactctgggcagttgtgaccggctactgcaatcagctggtagttagacctggtttctgccacttgccatgtcagttttcaccactgcaaggatttcttctacttcatgtaaacttctctgtgctgcaaagagaatgccaaagcagcgtctttttgccttcaccatattcagccgctggccgggtcctatacttcaatatcagggctcaaattaatattccagtctcttcccctccccttttcccctctcctcctttcagctgctgttactacgtggagtttggagcctaagctttgaaaactcccatgtggcgcgcccgtcttaagtctgagcatgctcagtagccaaaacagatttttggttgcagaactcgggcgaggatacttggggtatttggacgtttgccggcttcccaacagaatgttccggttctggtggtgatggcattggagaatggggcttaggcaagcctgtaggtgaggaatggctgaacaccctgagccagatgtttatcttgattgtaaagacaatgtttcctgaccagctggagctttggggggggggggggggtgttgcggggggagggagcaattttggttgcttgtgcatttaaatgggtgtggcgctaagtatatcttgtttaccttatctttctgtggaaaagttttgatgtctaggtttgtcacatcatgcctgttgcctagcactaccaaaagggttgttatctagcagcaaagattgaataggtggaggtcgtggcttggcctcacagaagttgagaggaaagggtacttgggttgcgtttttgaaaattcgtatttaaaactagagtacttgaatttccttagagtacctgaattgcccagagt

SEQ ID NO: 10599 - DNA, 6000 bp, Homo sapiens
atttttagtagagacgaggtttcaccatgttggccaggatggtcttgatctcttgacctcgtgatcaacccacctcggcttcccaaagtgcagggattacaggcgtgagccactgcgccctgccagagaaaaattatttaaaggagtgattatctcacacagttgagagcatagctgaagatccatgtggagtagtagatacctcttagcattttgggaggtcaaggcgggaggattgcttgagcccaggagttcgagaccagcctggccaacatggtgaaaaccccctctctaccaaaacaatgaaaactagccgagcatggtggcatgtgtctgtagtcccggctacttgggctgaggtgggaggatggtttgagcctgggaggcagaggttacagtgagcctgggcaatgcactcccaggtgtgatgccattccactccagcctgggcaatgaaggagtcagacactgtcttttttttttaaactaaaaatcttttcatttttttctaataccttctaagaaattaaagttagcttgcgcttattttagtaattctgctagatattactctgaaagaatgactaaggacttaccggtaatctttaaggaaatttagatctggaacagctgtttgcttctgttctccgtgaattttcagggtatgtgaaatttttcagaaatattttagtactctagttcttttaattggagaagaaaaagccaataacaaaaatcagattctcatgtaatgggaggtagaatattaactgaaacgtttcctaaccatacatagggatgatactcagatttgtttagatgttgaatgtgaagctaacatttttaaacagcttaaaattgtatcataaaataattttaagttacagtttgttttgagttgcctataaaaatgaatttttaagctaatttgttaagaatttggttatcgggccaggcgtggtggctcatgcctatataatcccagcactttgagaggacgaggcagggggatcacctgaggtcgagaccagcctgaccaacatggagaaaccccgtctctactaaaaatacaaaattagctggaagtggtggtgtgtgtctgtaatttcagctacttgggaggctgaggcaggagaatcacttgaacctaggaggcagaggttgcagtgagctgagatcgtgccattgcattccagcctgggcatcaagagtgaaactccatctgaaaaaaaaaaaaaaagaatttggttatcaagattgtagtaaatggcatttgtgtagtgaaattgtgggtaatgttgatagtttttaggggggtgcaggtgctttcttttttggaagtgaagggttctgcattgatgggcatttacactagtatatagagattttaaataggtaaattggattttgataataaatgttctcccaaagctactatatttaaaattgttttaacctctagtgcagtttcctatagaaaggcaattttataattacaggaaaaaacaatacagtaaaaggagctaatcttttgtaaatctttagtaagtgtctccatattgtgctgcctttgctaataggcagtggggcccatgtgaatgagcctttaaaagtggcttgtacatcttatgttcagcattgacatgatagaggaactgttttcattaatgctttttcaacaatgttgccacatctggtttctcccaactttgttctaataaaaccatttttaagaatttggtttatttgtggtttaatccaaaatctaacttaagttgcttttcactaattttaccctaatatccttgatggagctgcattttacgttgaaactgagtatcttaaaactactaaggtggttatggaattacacgttgtcatgggatttacattgtttgtcttgactcttttctgagtttttctgacattcattttctgtttgtcttaaggttatcctttacctttgcttctcttaactttttccttttgttgatccactgttttcctatgagctaccaaaaaatgtaattcagagctctgtagtctaacagtcacatttccttaaaatatggccgttttaaaaattttaaacataattgtaataccattatataatttctcttagggaaaaaataattcaaaagactgacttttcagtaatgcaaagctttggctacaacatgaaggtcaaagctgcaattaataaccctgatacttcaacatttttattttgaaaaaccctctaaaggatttgatttgtaaaaatatgtgtgaaaatttagagggtccaccaccatttacatagcatctcagccgccattctgtctggcatttataagacatatcaaagaaactttcatctgaagaagtccacttattctcgtctttattaatcttaaagcttaagtagtttacatagtggatcttgtctagaactattaatagtttctttggtgtattttctcaaattcatctttcttggtgtgcaaaaacatcttcctgtaactccagccacctcttatagcatttctgtgtcttttaaaacttgattatatctattttttaaaatccagtctaaatctttcttgcctgcaactttttttatacttcctttgccactgtatttgtccattgtatccttgctttaatctatcattggtgaaattgatcctgtaatagacttgtaactactggatattgtctggttttactgttaaagtttcacatattaagctaccagtgctgagtgtattggtgatcaaaaaatagaaaatttaagcaatgcctcatagaattctgtaccaaacaacttcagatttacctctgtatgtagttgtgattataaaattgtttcactgaagatgttatgtatatctttcaactaatattttatgacaatcgtgatataaaagatttggaaattcttatgtgacagtttctgaggtacaacaataatgatttaagaaagaaaacaatttcatctagaaacacgtcttgggggatcataatcagaacataaatttaccaggtgatttgggctattcttgtgaaaagtttacaggaaactgtgtaaccaagatctcattttcatttttacctgttttgtgctctagatgtgctgtagccctgagcattaaatgagtactgatggatgctgatttggggagttcccttctttaaatcacctgtatttcctgtacctaggttttttcttgggagggctcctattcctgtactgaccagagttagttctccttactttaaaagactagatatgaagtaaacactgcctgatgtaggatggtcagtaagaaggcaattagttgtataacttaaatttgggcagcaatccttaaaactataggaaatgacttatttttcttattcacatctatcttcacctcaaattgattttgctgtataaaggtctcagctattatgtttggtcttatatcttacattaggtacttgaaacctaagcttcatttacttgtgattttacttggttctttctgatagtgataataggtctcattttccaaagcacagtacaactgattcatctttgacttgctgaccttgatttttttgtttttagtcttctggaacttaagcatcatactatagggtgtatttttattcttctaaaagaagaaacccatctatatttttactgaaattttgatgtactcagacatctaacctttcaatttacatgtttttaaactcagtatgaaagtccctttaatagttaagctttagcatgaaatactactttttaaatatctatatgcaggctctgcatacatcaggaatctgtttaagatatgtaataaattccttgtaagtttgagatcttaaatgttttttttttaaatcaacatgatgcataagtttttttttcttaaaaaaacggcatctgcttaaagggatttatgactaaaattgcttatttttctacagagttgtctgctggttctcagcttgaagaagattctgcagtccttattgatcctttttcttggcgttaccatttttgaagcaaagttaacctagctttctagtttgagctttctttttggccgtctttaaaaaaatttttttttttaatctataaaatagacaagagctagttctacaatgtccaagtcattccagcagtcatctctcagtagggactcacagggtcatgggcgtgacctgtctgcggcaggaataggccttcttgctgctgctacccagtctttaagtatgccagcatctcttggaaggatgaaccagggtactgcacgccttgctagtttaatgaatcttggaatgagttcttcattgaatcaacaaggagctcatagtgcactgtcttctgctagtacttcttcccataatttgcagtctatatttaacattggaagtagaggtccactccctttatcttctcaacaccgtggagatgcagaccaggccagtaacattttggccagctttggtctgtctgctagagacttagatgaactgagtcgttatccagaggacaagattactcctgagaatttgccccaaatccttctacagcttaaaaggaggagaactgaagaaggccctaccttgagttatggtagagatggcagatctgctacacgggagccaccatacagagtacctagggatgattgggaagaaaaaaggcactttagaagagatagttttgatgatcgtggtcctagtctcaacccagtgcttgattatgaccatggaagtcgttctcaagaatctggttattatgacagaatggattatgaagatgacagattaagagatggagaaaggtgtagggatgattctttttttggtgagacctcgcataactatcataaatttgacagtgagtatgagagaatgggacgtggtcctggccccttacaagagagatctctctttgagaaaaagagaggcgctcctccaagtagcaatattgaagacttccatggactcttaccgaagggttatccccatctgtgctctatatgtgatttgccagttcattctaataaggtgagttaactcaacagatgcttctaatttcttttacattgtagtgcctatttacctatatctttgactctaattctgtagtctgatgacattgagttgatcaagcatttttaaacttttgagaacacttactttatttggaaggtaattgtttttgagcattttaaaccagggctttacattaatatattctgcctagattacttctggccacaaagctatcatccactgagattatcttgttggtttttggcatcaatatgttcttcttaatcatatatttaagcaggttttttttgtctgctttgttgaattgttttaagtattttttttgcagtcaatgtgctctgccattcaggatgctagatttcagctctccatctgtcttgattgctgatttgtatgtagtaaagatgtattcttgaacaattctctttttttccttatctgtggctacagggaaagagttaatgtagagccctggtgtttgtttcagtatgtttcatattttagattagttcattcttccttttttaatttccctttaacacaaactctcatactatgactgaaatttttcatcattttttttctccttttccacaactttcttaaacatacttcaaaactcactttttattatcccatgttacatctgtccctttagagacttggacaaatcaactactacagtatcctgctctgtgttcctcataaacaaattctttttctgagttaggcttagacttctgaaatagtcatttgaaaagaaaatctaattctcctttgctttaattatcacatctggcaaaatgggaactttttcaaaatgcccttttaaatatgttgtcctttctctttcaactttttcagtgttactcattctgactttttttcccccaatatatggtgcagttgacttaaagtcattgttatagcaccccacta

SEQ ID NO: 10600 - DNA, 6000 bp, Homo sapiens
tttgtctgtggtttcatgatgaagctgaaccaaaatcatttgcaaatggttcatgcacacaagttttgttgtcaaatctattgaaaactggtctatcattaatattgttcaccatctgctttgtttgtttttaatgtttataatatgataatgtatatgttctgaaattagttgtttttataataaaaggaaggatattacccctttgatatctcatcaaaagcagccattcctctcattaattctgttacagttttaatctagctctcttcttccttcttttcttttctccttctcttcccctctcccttccaggattgcttatgccaaaatgtttggggagccaaaactgtttaacaagtattgctccattaggagcctacctctcaagtaaattacagagatgtatgtctttagtgacttcagagttaccagttagttaaatttgcatgaagtaatttacagttgtaaaagatctaggcttttaaagtatcctctgatttcagataaatttattgctatcgtcaaccttataaacaaaaccaatttatccgtcataaattggcatacttaactaactaatgggtgttgcttgaccactgtagtttttctacgtagtgccaccttatttattataaaacatttgttaacgtttttagggttccagaatcctttgggaatctgatgaaagttgtaagcttttcccccacatagctaatatgtactcatctataataatggactttaggttaagaactcgagccctaaagaggttttcattccttccctaaattttaattgttactttattaacaaagaaaatactatattttacttttcgaactacattaaactcttggacaccaaagcctccaaggaaaagagaaataaaattaattccagtcttttttttttttcaaactaaattttcaactgcatttaaaaagtgaatcaaatgggccgggtgcggtggctcacgcctgtaatcccagcactttgggaggccgaggcggacagatcacgaagtcaggagatcgagaccatcctggctaacatggtgaaaccccgtctctactaaaaaaatacaaaaaaaatagccagacatggtagcgggggcctgtagtcccagctactcgggaggctgaggaaggagaatggcgtgaacccaggaggtggagcttacagtgagccgagatcgtgccactgcactccagcctgggcgacagagcgagactccttctcaaaaaaaaaaaaaaagttaaatgaattaacttgtatcaggtaggatgcttttgactgtgagtaacaaaaacctagctcaaaatggcttagaaaaaaatttttaattgtttttttaaacggggaaattttatttcccctgaaaacaagtccctgacaaggttagttaagtcagtggttctttgacatcatcaaggacagctgacatatcagcatattggcacaggtcccccctcccctcagggttaaaagatggcagtttcacgtatcagtattacattgaaacacgacagtgctcaagagaagaaaaagaactatttaaaaaaaaattttctaccacctttagaaagaactgtttttttctttgagaagcaaggaaagcttctcagaagccctcaatttccactggtcagaatggcatcctgtgcccattcctaaaccagcaagggaaggggattaccctggtatacatgataaagcttccaaagtcaagacaaggctggaggagtaggaagaaaatcaggcctcattagaaagaaggcaatggtatcatctactcaggaggctgaggtgagaggattgcttgagcccaggagttcaaatgcagcctggacaacatagtgagatcctgtctcttaaaattaataataataataattgcttttggcactgaataggcaaagtaaaacgatcattattgaaacacatttctagaagagcaaatattatgtggggaaaatgttttctaaaaaaaccaatttttgtatactttcaaaataaggagttaataaagctaaaagctgtcatatttaacaattgcttttccttgaaaggaaatagatttgcatttattgtaaccatttcaagctagtaatatgtaaaatactttcacttatattttaaaattattctaaaggctaagtgatggcattggtagaacaaataagtcttgctggtcacggtagctcacgcctgtaatcccagcactttgggaggctgatgtgggtggatcacctgaggtagggagtttgagaccggcttgaccaacatggagaaaccccatctctactaaaaatataaagttagccaggcatggtggtatatgcctgtaatcccagctactcgggaggctgaggcaggagaatcgcttgaacctgagaggcagaggttgcagtgagccgagatcacgccattgcacttcagcctgggcaacaagagcgaaactccgtctcaaaaaaaaaaaaaaaaagaataagtcttgcattttgtgattttgtgtacccttaagttaaaatgagaaattgtgtctgttaagctgctataaagtgttttgccttattttttagttttccacctatttccctggatattttgatggtcagtactggctctggtgggtgttccttgttttaggtaagtgtttttaatgtaagaaaaggcaagaaaacattacattaaattttataagtaaaattacttgtagtaaatgttcatcttgattactgtatagtaatatattaacaattaataataaacatttttaaaatgttgctttcttaaaaatagtctttcgttaccatcagagtaacatgcacgttaataaaaagtttctttgtggttgtaggttcttcctaacctatacatatattcttctcccccatgtgataaatggggtatgctgatgactctgtagtctgtcagtttttttccccttgtgagctattgccacacagcattcacagactcaaaccagaattgcttatacgcttactgcagccagttgaactaactcataagtgcaggtggcccatctttggtgggtctgtcagtagaaaacagaaaatatgtaacctcgctagacataacttctgaaagaaccaccattggatttccagaatgctttagtttaccgttggtgagaataagaactattttacaataggcaagaggacttttttttttttttttttttttttttttacagagtcttgctctgtcgcacaggctggagtgcagtggcgtgatctcggctcactgcaagctccacctcccgggttcacaccattctcctgcctcagcctcccgagtagctgggactacaggcacctgccaccacgcccggctaatttttttgtatttttagtagagacggggttttaccgtgttggccaggatggtctcgatctcctgactttgtgatccgcccgcctcggcctcccaaagtgctgggattacaggcctgagccaccatgcctggcctggattatattttttactctaaatatttatttttaaatacttttttcctagacattaaaacaaagagatgaacattggagtaaattatttcaatgttggcttcttgattatatgtaaagaaaatatatatgatacagttagagagaccaccatcacttctgtcatttctacaaaagaataacagggccatcttgtggctattaaagatggtgtgattgcctcactgtgcttctgtgacatcagtttctcctatgtcctgttttgcttcttgttgcccccttaattaagatccttggtggtggttctgctaatggttctggctaggacatcctggcacccatgcctggcaggtgtttaataaattgaggacctgggccaggcatggtggctcacgcctgtaatcccagcattttgggagactgagtcaggaggatttcaccttgaggccaggattttaagaccagcctgggcaacatagcaagacctcgtctctacaaaaaaatttttttaaattaaccaagcatggtggtttgtgcctgtagtcctagctacttgggagactgagccaggaggaccccttgagcccaggagttggagcctgcagtgaactatgatggcgtcactgcacttcagcttgggtgacagcaagacagtgtctctaaaaacaaaacaaaacagttcaggacctgttttgccaaaactgacagagccttgcattgctgaccctacattttacttagaaaacataaatcattcatcgcaccatctaccacctcctcaacagcatcatgtactctatgattggtcattagaattctaaggaaagagaaatagtaattttttttcctctattgattattgagaacttcagtaataaaaatgaccaacaggagaataatttagaagaaatagttccttggcttgcttattttctaaactgtacctttaagagaaaggctgaccacccgtgtttccccaagtcaaatcctgaatggaccaaagaggagcccttaagcgtatgttcagattgattgcttatggcataaataatttaaagaaatttaatggattgattcccttttaaagtttcatgggaggaggttttataatccttcatcattgatcattcttgctatgtaccatttgcttgtaagcaaaaaataagagtttggcccggcgtggtggctcatgcctgtaatcccagcactttgggaggccgaggcaggcagataacttgaggtcaggagttcgagaccagcatggccaccgtggtgaaaccccgtctctactaaaaatacaaaaattagctggctgtggttgctcatgcctatgatcccagctacttgggaggagaatggcttgaacccgagagacggaggttgcggtgagctgagatcgtgccactgcactccagcctgggtaacagagcaagattccatctcaaaaaaaaaaaaaaaaaaaaaaaatatatatatatatatatatatatatattaataagagtttggatacacttatgagcatttgtgcccaatattcgggtcattttgggaacttcccttttgaagagaaccagtttaatggtgttttgtcttgcagagctctgtgcagagctcccaagctggctgctcttgagctatagttagcctatagtttatttgttccacagttatttttcaagtttttttaaattagttgccaacattttaaaaatcaaaattatttcacataaaacgcctgaatgtttttacttttcttgaaagttggaatatcaagaaaagctagcctacatttcacatggcaccctttggctggagctgagttgttgctgtctcctccatacaggtcatgtgccttccagttcagtaagatcccaccaccataccccaacttagtatttgaaggggtaacccctgctcaatagtcacttgttgctttgggtcccaaacagaatgatgttccccaagctcagagctgacagctcttggttactgctaaaaatcagttcaactgtccaagtaccattttctaccactgagtatcccagtaaaagtatttaaaaaaaaaaatgtgctaaaggctcagagaccatctctgaaagaggaaggccaggaggagtatctgagtttccactggaggggcatatcacctctctgctgacagttttaggaggtacaaacttttgtgaatgtatagattctggtgtagtcacacaaaaagagtcttactaagaatagagaaataggctgggtacagtggttgacacctataatcccaactctttgggaggctgagacaggagaatcacttgagcctaggagttgaaggccagcctgagcaacatagcgagacccctatctctacagaaaattaaaaaattagctgggcatgaacctgttatcttagctacttgggaagcagaggcaggaggatcatctgggcccaggaattcaagcttgcagaggctgtgatcataccgctgcactccagcctgggcaacaga

SEQ ID NO: 10601 - DNA, 6000 bp, Homo sapiens
aacatagtggaatagacaaaaaccttctacagcatgtatgagacacttggcccatcgaccctcttcatgccctttacattcagcaccctcatattgacttctctctcctctttcctaccaagcaagggagtactgttcaaagacgcaaatgcattctgccctagtttctttttattgctaaaaacatttatctttaccctacaacctacttttctatttattttcaacatttagcaggttgtttaaaaagggaccaaaaaataaaacaggaccatcttccttgtttcagggactggtaggcaggcattaaggttaaggtaggggttaagaccagatcctattttgcagtctgcctgggaggtgaaaaacctgggaagaagaccgctggtagcatatgtatggaaaggagacaggctgcccttacatcttttcaggaggaaaaactgccagggggagccaggcatatatggagaagaatccttaatggtttatactcttgggaagtcctgtacccagccagttatttgctttgacttggctgtttaaggtctggttctggtctttttttttccccctaaccaagacaaatgaggctcaattaaggaaaagggacataagatacctattccaaaactgaattccttttaactctcatgaaatgacaaatagaattgttagtatatgtgagcactgagaattactttattgatgaacactggtattttctctggtgtaggaagctgaaccatctatctccagaaatgtcttcagaaagtaaagagcaacataacgtttcacccagagactcagctgaaggaaatgacagttatccatctgggatccatctggaacttcaaagggaatcaagtactgacttcaagcaatttgagaccaatgatcaatgcagaccttatcataggatccttattgagcgtcaagagaaatcagatacaaacttcaaggagtttgttattaaaaagctgcagaagaattgccagtgcagtccagccaaagccaaaaatatgattttaggtttccttcctgttttgcagtggctcccaaaatacgacctaaagaaaaacattttaggggatgtgatgtcaggcttgattgtgggcatattattggtgccccagtccattgcttattccctgctggctggccaagaacctgtctatggtctgtacacatctttttttgccagcatcatttattttctcttgggtacctcccgtcacatctctgtgggcatttttggagtactgtgccttatgattggtgagacagttgaccgagaactacagaaagctggctatgacaatgcccatagtgctccttccttaggaatggtttcaaatgggagcacattattaaatcatacatcagacaggatatgtgacaaaagttgctatgcaattatggttggcagcactgtaacctttatagctggagtttatcaggtaagcagcaatgaaacaattggttatttctagaaaagtaatctagtacatgaaatctcatatctctaagggatctgaggaatcacaataattaaaggtatcatttattgagagttcaggatatatgaagggtagaggcaaaattcaaaccctaacctgactccacaggtaatataaggctggttcactggacctccaccacccagtacaactccttaattttacatgtcagaaaatcttggctttgcttgagattatttgtggctggttattggcagagtcagcattagcagttaggcaagtgggtaacagaatggagttgagagtgcaggagtttctcactttttttttttttctggagacagggtctcactctgtcacgctggagtgcagtggcactatcttagttcactgcaacgtccgcctccctggctcaagcagtcctcctacctcaacctcctgagtagctaggactacaggcacatgctaccacacctggctaattttattttattttattttattttattttttatttttattttttgtagagacagggttttgccacgttgcccaggctggtttcaaactcctgagctcaagcaatcctcccgtcttggcctcccaaagtgctgggattatagccatgagccaccacacccagcctcaaattctaaatgtctcttaccttccattaaaattgctgatctattgagcaactcttactaaaggtagtggttgtcttggattgttggggagggagggaaaaagttggggaccacagtttcatattatcagccaggagaaaggataagaaatcaaattcttgagtctcccatagaatccactaatctgtcattatcatcatgcccctggcttttggcatccaggagtcagtgccaggattaaaccttctctaatgcaggcatttcaaaccaacaagggaaggggaagagtagctcactttagttggtgctcagatgagtggggagggagagtgaagatggtgtgaagatgagctgtctactcatatataatggtaaataataagtctacttacttatttattatttattcatttatttataaagagacagggtctctctatgaccaaactcctgggctcaagtgatcctcccaatattgcctccccaaatgctgggattacaggcatgagccatcacgcccaaccaacttttgcctttttgttagtatgtcccaccaagaaggaagaaggcataacaattctgaaaacttattagacagaggaaaatataaagaagtaaaaatgcagaatttttattaatatgggagacagtgtggcataagtacatatatactgcatgagaatggtttcttagtatgaggttaaagataatctacaataatttttaaagtgtgattctactttgatgtaaatctaattttttgttttaccaattaaaacttcacttgtacacttgctcttagccaagaggctgagaagccgtaagacttcacttttacagtagtgatttgtaatttaaggaaaatacttggtttcttaactagaataattttttccaatttgaagttttcttgtggatccttgagaatgtttttcttttaaaagaggtctgttctttgtgatgggaagaatgaaaaaaaaaagaggtatgaaccttattcaagtttaagaaacgtatgaaaagaaagaaatccaaagttcctgtctcacctgggttaataagtaacagtgtgaccttgggcaagttgcttagccctttaaacataattttcatctttgtaaaatgagaagattgatatatgattgtgtttattctagctctgacattctgtgatgctctgatgatatgtctccatgcaagaaatgtcaggataatataaaatttagaagttcttttccatttatatttaacacttctatatccttccttccaggtagcgatgggcttctttcaagtgggttttgtttctgtctacctctcagatgccttgctgagtggatttgtcactggtgcctccttcactattcttacatctcaggccaagtatcttcttgggctcaaccttcctcggactaatggtgtgggctcactcatcactacctggatacatgtcttcagaaacatccataagaccaatctctgtgatcttatcaccagccttttgtgccttttggttcttttgccaaccaaagaactcaatgaacacttcaaatccaagcttaaggcaccgattcctattgaacttgttgttgttgtagcagccacattagcctctcattttggaaaactacatgaaaattataattctagtattgctggacatattcccactgggtttatgccacccaaagtaccagaatggaacctaattcctagtgtggctgtagatgcaatagctatttccatcattggttttgctatcactgtatcactttctgagatgtttgccaagaaacatggttacacagtcaaagcaaaccaggaaatgtatgccattggcttttgtaatatcatcccttccttcttccactgttttactactagtgcagctcttgcaaagacattggttaaagaatcaacaggctgccatactcagctttctggtgtggtaacagccctggttcttttgttggtcctcctagtaatagctcctttgttctattcccttcaaaaaagtgtccttggtgtgatcacaattgtaaatctacggggagcccttcgtaaatttagggatcttcccaaaatgtggagtattagtagaatggatacagttatctggtttgttactatgctgtcctctgcactgctaagtactgaaataggcctacttgttggggtttgtttttctatattttgtgtcatcctccgcactcagaagccaaagagttcactgcttggcttggtggaagagtctgaggtctttgaatctgtgtctgcttacaagaaccttcagattaagccaggcatcaagattttccgctttgtagcccctctctactacataaacaaagaatgctttaaatctgctttatacaaacaaactgtcaacccaatcttaataaaggtggcttggaagaaggcagcaaagagaaagatcaaagaaaaagtagtgactcttggtggaatccaggatgaaatgtcagtgcaactttcccatgatcccttggagctgcatactatagtgattgactgcagtgcaattcaatttttagatacagcagggatccacacactgaaagaagttcgcagagattatgaagccattggaatccaggttctgctggctcagtgcaatcccactgtgagggattccctaaccaacggagaatattgcaaaaaggaagaagaaaaccttctcttctatagtgtgtatgaagcgatggcttttgcagaagtatctaaaaatcagaaaggagtatgtgttcccaatggtctgagtcttagtagtgattaattgagaaggtagatagaagaatgtctagccaataggttaaaatttcaagtgtccaacatttcccagttccacagtgggaaattttgcacacttgaaattttaaccaagtggctagatattattcctcctttgaagctaatggcatttgtatatacacactgcagcagagcttgtagctggacagagtcaaaaagaagaaaatacggtttcaggctttcttgcagatatgaagtattcttggaatgcaataagtatgtattgaactgtactgtaaagtagctccaaaacttaattactctcctgttttaggggttatacatttggactgtgcattctccaagagatgaagcggtgaagttgggatttacattggaagtgctgtagacttctttatgtggctcagtggagagagggaaagaatgttgcacctgctctagtaccataggtcaagaggcttctggatcacaaagtcataactagacaggtttgttcttgtagttttctatccccagtctttgctccccagatggcagtagtttttagtaggaaagtgccattcctgtccttaaggcacagtctcatcagaagtctaatacctgggcaggtttataacatcctgagagccagcctgacattagacagaataccctttgtaatacattggaaatttttactcatgcctttttgtttaggataaataggtaagcacaaagagctcttcaaaatcagaaaaaacaataggagtccttccttgtcttttctgtgatctctgtccttgtttctgagactttctctaccattaagctctattttagctttcagttattctagtttgtttcccatggaatctgtcctaaactggtgtttttgtcagtgacagtcttgccagtcagcaatttctaacagcattttaaatgagtttgatgtacagtaaatattgatgacaatgacagcttttaactcttcaagtcacctaaagctattatgcaggaggatttagaagtcacattcataaaacccaagtgctatgggtgtattattcatgatagctggcccacaggtcatgaattgaggagga

SEQ ID NO: 10602 - DNA, 6000 bp, Homo sapiens
tgatagtgagttatcttgagatctggtcgtttaaaagtgtgtgacaccttccccctctctttcttgctcttgctttcgccatgttacgtgcctactcctgcttcaccttctgccatgactgttagcgatgcttcctatacaccccacagaaccgtgagccagttaagcctcttttataaattacccaggcttagatatttctttatgacaatgcaagagaagcctaatacacattactagcacaatgctggaaccctgtaagccaaataataggtaccagatcagttttctgggaaggctttgtagccttgcttctgcaaaggaagtactacacttattctttaatggttatgtgattatagctgattaaatgaaatttattctcaaatataactctttggatggctttgattatatgattgattttttcaatacatcttggtaaaaaggatggcagattcgttgaatctgttcaaataattacatagccaaggattcagtaaaaatatttactctcaaattctgatgggccagtgggaacaaggtatcattaaaaatatttcatttcagtttgcaataagcatagtttgttaaaatgagggttagcaatagatgaagaagaaaggacttcctcttacactcatcagaaaatgggacattaaaaacaatctaacactattccaaaacaaataatcatgattatatttcccttgttggcttattaggctaatgtgattcattcttgactcacaaatcttggatcagcagtatacttccatggtttgttgcttcaggacaaaagagtcctagcaatcctgattcagtgctgtggttcagtctatagatgtctacttgtggtcagaagtcagcgaatactgataaggctggggctgtaagtctattctagctaagagcatctgataaaatcttttccaccaaggctctggggctgtcctttgttgacctctttagcttatagcagaggtctttaggcaagcatggaagaaaaataaaaaccaccttttgttgattaaatttaaggctctattaatttattacagtaaacaactatatcagaataggggagaataaaatcttctactgtgttatggattttgtcagtgtattctcaagggtaatggggacaaggacaaatctactttaaaaagtaacataaggaagacaacttatttattaaacatcatgtgggcttaatatataatgaaattctaacaacattattgagccaattaagaaatatgaagcaggctgggcacagtggctcatgcctgtaataccagcactttgggaggccgaggaaggcagatcacctgaggtgaagagttcaagaccagcctggccaacatggtgaaaccctgtctctactaaaaatataaaaattatatataaatatatatatatatatatatatatatttgtttgttttgttttgttttttgagacagagtcttgctgtgtcatccaggctagagtgcagtggcacgatctcagctcactgcagcctctgcctcccaggttcaaggaagtctcctgcctcagcctcccgagtagctggggttacagatgtgcaccaccactcccggctaattttttgtatttttaaatagagacagggtttcactatgttggcctggctggtctcgaactcctggcctcaagagatccaccagcctcagcctcccaaagtgctaggattacaggcgtgagtcactgtgctgactccttttgcatttctttaagtggtaaaataaaacatatacgttaatataatccaaaggtttatcaactctcaaacatataaaaataagaggcaaaggtgtgcaaatggtgttcaataccatgcttggtgaccaatgtttttgtattctatctttcttagaaattatccaagcagctaagattattcaccagtttacttgatttagtatcaatctaaattctcagttaattaaagaccttggaaattaagttgatatattacagagtaacataatcattgatgatataaactatttaggaaattcagtttaactacaatctccatgataaaacactctccatcactctctcatcatcttgctttatgttcttcatggtttcgcaaaccggtatcatcttgcttatttatttgcttacttattttttgtgaatattttcccagtagatgtaagcacaataaataaagataatttgtcttccttagtgcctagaacatgtaggagatattcaataaatagctttgaatgaaggaatacagtaagtcctcactcagcctcctcaacaggttttggacactttgattttgagtgaaactatgtataaggaaaccaattttaccatagacaaatggacagaaagaagagttaagttcctacagcatatttctgataacaaaagtaccaccaaacttctaaataaagactaaaacacttccaatattgaacactgaaataattgtgaaccatacatacatttaagaaagattagtaaaaacaaggaagagaattatttacctgcttattccagtttagagttcagtggccagagcctgtcccggcagctcagggctcgaggcagtaaccagccctggacaggacgccatcacatcgcagagcagactcacccacacccacaatcgttcacactgggactacatagacacagcagtttgcctaacatgcatatcttcgggatgtgggaggaaactgaccggggtacctggagaaaacccaggaagacatggggaggacatgcaaatgccacacagacggtgatcccagcagggaaacaattttttttcctcatcaacgttataacagaaggatgttattcaggggtctgctgtatatgaataaaatatttactcatcataattgtaccagatgtgaggaataggtctcattttactattttatggagcttgggtgggctactgggtgacagactcgaaatactggttttctgatttctaatacaatatgtcatattattccccaaaagtaaataaatatatttgtacaagtgaaaaatgaaaagaaaatgtctcgtgtagatatgattcttaaagagggtatttgctatggattgcatcctaatgggggcctctttaggcagtggtttgtttgtttgtttgtttgtttgttttttggagacagagtcccactctattgcccaggctggagtgcagtggggcaattcggctcactgcagcctccgcttctgggattcaagtgattctcctgcctcagcctctccagtagctgggattacaggcgcccgccaccacgcctggctaatttttgtgtttttagtagatacagggtttcaccatgttggccaggctggtttcgaactcctgacctcaggtgatctgcccgcctcggcctcccaaagtactgggattacaggcatgagccactgcccctggccaaggccgtcttttgatggcagccaatgtcattagactacaacttcttctgtacaagttccccaaagtatcaggggctctctaagagagtattacttatttctttcaggtcctgatggttttctctttggagtggttgtaatagaggaccaaggaagttgtgagctgttttctggcttttgctgtaacaaaagcttgttgctgaaattgactatttcccccactcctgcatcccaacacagcatccattattcttcccttcagtgctctctttgcaaaatcagtctagcctaggcagcagacttaacatggtatgctcctgtggggattcatactttatttctggcttgcttttagggtcccagggcaagtcgatattaaagagatactaataaattgctaaatggaaagggagactaggactcagctggctccaggcctgagcttctgccttgtcccagagggaagccaatgttcacagcagggcacatggagttaccagttgtccacccaaaggaactctcatccccttcactaaccagggaaaatgtcatattaagattgtcctcctgttgcagtgagccgagatcatgccactgcactccagcctgggcgacagagcgagactccgtctcaaaaaaaaaaaaaaaaaaaaaaaagattgtcctccttcaatctttttttactattaaatgagagctttgtattaaactattcagaattgggttgtccttgtttttaggttcccacactatctcttttgaataaaacatgttgttgggtgacagcccttagggtttttctcaaatcatttctcatgtgaatccccttcatcctcactgtccttcccttaagaaactggcgtgtgataatgatgatttagaggtcatttctgctgacctcatccctgaatcagaggaaacagcatggagtaagttctaagttcggggcccacaccatatcaaatttaggcctggggaaggcagtatggctctttccaaaccctccaaaacactactgggctccaagactgctcaaggtctcactgatagtcaaggcttgtgctcctttttttcagaagagtaagattaaagaaaaccactgtgaattaaaaagtgtgggtgccaacatgggacgggagtcccccctcactccatggatgacatagagggggcagaagattacagaattggcattgtcctgcgtggaagctgggccacccacagtggcgtgggaagcctctcagatgctggattctaatgggctcttgatcaccttggattgggctatttcattgttatcacaaaataaacaggatgctccaagtcatgttatggcagagaaccaaccagcttcacactggtcctctaaaccaatcctcacaacaggactgggagacaggtgttacctttcccactttacagagaatgaaacagagtggcaaagcctccgaaggaccctacacttcggacatcgcaaagcaggatctgagtcccggctcctctgtccaaacctacttgctaggctttctttcccatgtctactctatagctggaaaggtcgtggaggacacattttaggccaaccctctcggtttacaatccagagaggggagaccctcagaagccaagcgacatgtccacggctacgcggcgagtgtgtggcaacgtggaaggggagcccgagacgccctggtctctcccttctctcgcaggttcctttctccccgaacgcagcccgcaggggacgctggaggaggagctgagctggagttgccggggccccgggaccgggcgttccgggggcggtccccagcagccgcgcattccagagccagcagcgcgtcctggccgctcctgcgctctcccgcctcccggggctcggaggagccggggcacgttccaggagctgcctagggctgaggttccaggcctgggggtcgcttccagctgccagatcccgtgcagtcctggggaccctgagaagcaccgagccatccctgacccaggaactttccgcagactcgccgccatctggggtgagtggggccaccgggggattgtttgtggggctctggcagagcggagctcttcggattcgcgacctacctctagtgcggcccctttccccgggctcccaacgttcttctttatgtccggtctctcctccccatttctcccttttcatcacttttgtatttcttgccctcaccccctcctttttctcctgctgtcagctcttaagttcgagcctcctagtgcacagaattttgggcctgggggaggcggagcttgggtgggcgaaccccagccccactcggagactggcttctctccgggtccgctgcccttgccttctcgggaagcctcctcctcgggcagactgccacctcctggctctccaggcccagcgtcagggttcagcgcccgggcctgagcacctgcttgggcgctgcgctgggtttgggtctttgcacttacctgtcccgcttttctcgaggccccgtgtagaaggcgccaggagtttggagtcaggagtggcgggttccagcc

SEQ ID NO: 10603 - DNA, 6000 bp, Homo sapiens
ttctttttttctgccaaatgactgaatatcacaggccaggcactttgatgggtgccgggaatgaaacagttccaggtactgcagtccctggaggcgatgaacttggaaattataaatattaatcatagtttctcataaataagtttttaaaaattcaacagtgataaagcactttgaaggaaaatgaaaagaggcatgagtgtataacaaaagcagttgctcttgcaaaggcggtcagcaaagctttccccgagaacaaggaaaatcccttgcattgcactgtcttccccaccttcttgctcccactcaaaggtggctccccgtgaggtcactgctgtttttgcaggcctctgagagaagtgtcttttttcctcacccccctcatattcacatcacagggtcaggagagggtaggcatcctttctaccccttgctttcagatccccaaaactcttatcccctggttattcaattaaacactaatctaggtaatgctgtgaaggggatttgcagatgtcattaaagtctcaagtcagttgaccttaagatgtggaagctaggaagctatccaggtgggcttgacccaaccagatgaactctttaaatgcaattttctctggttgggcagaaagggaggccagagagaccagcagcatgagaagggtttgatggcttgaagatggaggtggccacatttcaaggaattcaggaagtagaagcaaaaagcagtcacacagcaagaagcctgagcccttagttctattactgccaagaacttgaatgagcttggaagaaaatgcttccccagtcacttctacatatagaatacagcctggaaacactgtaattgcagccttatgaaatcctaagcagaggacccagtgaaagccatacctggacttctgacctaaagaaatggtgagataataaatatgtgttatgtgaagctactgagtttgtggcagtttgttacatggaggtagaaaatgaacatactcaataaagcattgtgattctgggattccagtttataattttcaaaataaaatactcattataattattaccatggtaatatgacaggctaggtaaccaggttggctttcctgctgaaaataactaaaacttctgaataacatatatatatatatatatatatatatatatatatatatatatatattttttttttttttttttttttttttttttttttgagacggagtttcactcttgttgcccaggctggaatgcaatggcaggccattggctcaccgcaacctctgcttccctggttcaagagattctcctgcctcagcctcccaagtagctaggattacaggcacccaccaccacatccagctgtttttttttgtgtgtgtttttagtagagacagggtttcaccatgttgtccaggctggtctcaaactcctgacctcaggtgatccgcccgccttggccttccaaagtgctgggattacaggcctgagccaccacgcccggcctgaataacatattttaaaaaaattcttaataatattgaggggagatcaagagagcaaggaatttctaggtgagtactcactcagccaggtgaagacaggaactctgagacctgagtggaatgcagctacagcttcactcccacgggtatttgctcaacccagtgaagttgagctttaatatcatggccttatggggcatgagacaaattccggagctgaggacctcttcctcagagtaagagtgaactggaaataaatcaatatcccacccccaccctattccttccctacctcccaatcaagggacttggaaaaaaagtgactgtcctgaacctagtgcccagaggatggagtaaaattgtggctaaaatgtggaatgagaattcaagtttcactctgttccacagtctacttcatctaccatggtggtccagaatacctccagcccagaatgtagttcacaagaacctagactgatagttgccagctgctggcagaagcaaatacaaagtctttcaggagggactcaccttcatttcagatcttaaagaatttatgtaagtaaaattccaagaaacagcaaaacaagagaaaatttaaatatagcacaagaactttgcaaaagagaaatgtatgatacaaacgaaaagtagctctttttaacatatttagtaacagaaaaaaatgtactggaagatatgtacaaggagaaagatactctgaagagtaatcaggtgaaatggaaagttaattaaataaaacttctagaaaatagaattataatagttgaaatttaaaactgaatattaattgaattttaaaaatttagttgagttaattttagttgaaatggatgggcttgataggagattatgcacagtgaagacagaattagtgaatcagaactagatctgggaaaggtattattcataatatagtccacagagaccaagggatgaaaaatctaaaagaaaagtgagggaaaatagagaatagaatgaaagacctaaatatatcctacatctgtcatggactgtgtattgaaatcctaaccctcagtgtgatggtattaagaagggggatctctgggaggtaattaggtcatgaggtagagcccagaattagtgctctgaaataagagacatgagagagtttgtgtcctctctgctctttgccatgtgaggatacaatgagaagacagccacatggaagccaggaagtgagctctcaccagacacaggatcggctggcaacttgatcttggacttttcggtctccggaactgtgagaaataaatgtttgttgtttaagtcacccagcctatggtaatatgttatagcagcccaaactgactaaggcaacatcaaatcagactcgcagaagaaaagttaagagggaatatggtagaataaatatttgaaaagataatggctgagaattgtccagaaatgatgaaagacaccaacccacagattcaagagacccagtgaattccaagcaggataaataaaggacacacgtatctggacactttatagtgaaacttcagaactttaaagggatctaaagtcagccagattggtgaaaagtgttacattcaaaagggttgcagtgtaaaagaaatttcaaaaggaaaagaaaagatttgcagtcagtctgtcagctgttttcttaacagcagtggaagccacaaggtactggaatgatcacctcaatatgctgagaggatataaactatctgttaagtgcaaaatgaagacattttcaaacaaaagaaattggagagaacttcactaaaggaaaatttaaagtccatattcagaagaagatctgagatgcaaaaggaaataaagaacccaagagaggtaaatgtatgggtaaatcttgattctaataataaagtattatggagcataaggaaaagaaacttaaaatatgtgacattattattataaaaaatggaatgcagtgaatagagatttttttaagtgcctatattttctgcagtgactaaagatattgcttaactttttgttaatactttattaatttatacatgttaaaattactagggtatggctagagaatagaaataaagtctttaagttccaaattactagagaataaaacaaaataaaataagggaaaattaatctaaaagaaactcagtaaaggagaaaaaacataataggtggaagatatagaataaaataacaaggtaaatatgactataaatatatctgtaattattaatacaataaatagaataattttgaaaatatcaaaataatatttatgaaagacatatctaaaacataagaatgcagaaagtttaaagtaaaagggataggaaagatttagcaggcaaattttaccaaaagaaagccaatatattaatattaatatcaataattattactagtgcccctgctactactgtttattgagcacctactatgtaataggcaatatatgaattgcctattcatatatgaacatccctctaaggtagttacttgaaatttttaaagtgtagtttatatacaataaaatgcacagatcttaagtgtacagttgaatgagttttgacaaatgaatacactggtgcaacttacccagaaagtttctttttgcttgtttgcagtcaaacatcacctccctcacatacccaataaccactgtctagatttttgtcaccataaattagttttgcctgctcttgaactttatattaatgagataatacagcatgtattctactctttctagcctctacagtactgaaaggcagattgaagggtggttggagtggatgttgagggccaccccaccatatccaccattctgcaccttcctatggcaaattatgatcaaggactccaagggtctaagtgaggggtcacaggttctcacacaaccatatggcaaattgtgaccaaggaatcttagggtctatgtgagtggtcacaggagaacccacagattctcaagctggttgtaaagtgtaaccttgaacaaatgcctctgtctctctgaggctcagtttccaatgagtaaaatgaatgaattgccatagaccatctcaaataaattctaaaccctaaagccacagtatcatatataatgatacattatatatgtcctaggactatccagtcacgtttggtaggagaaaggtagctgaagctgggaaaaggactctcagagttgcaagatctgagagctgaacttctcctattcatttcattggtgagaaacagaagcccaaactgacgggacctgctagtaagtggcagggctggtctcagactttttttttggctcctacatcctcactttttcagtggcaatgggtggttctcctctcatctgagcactcccaggccctttgttcccattgtgaggtaacactgaggtctgcccaccctacagatggggctttgggggtttgctccagagctcttcatccgcctgggcccaaccctggaactattcctttcaatggtgtcttttcttgccttgtttcagaaggatctactagttggccctatcttgtgccaagactgacagcaaggaagctgctggctgagtaagagtttaggggaggctctgagttgggtggaagccatgaacacaatttaggtagaaaggggctacagctttggagaacctgagcccaataagctcttgaagttgtcccctaacacaatcttactttaacaattaatattcacatctttaaaaatgctcatgtttaaactatgatttattttaaccaaagaatttataatgaaaagctatagtctccttatctgacttactctatctaaagctgctctttttaggactatctttctgttttttaatcagtggtttgattgcttcttagtcttttggctaagatcaagtgtagtaaaaccagtggtttgttttagttctttagttcttcatttctctatacaatatagctataatgatatttctcaattgatcaacattatattaggtgaaaatttgtacctcttaaattctcgtactttacttctcaatataattattttactgttttagttctttattgcttaccttcataactttaataatgatataaacataaagctacatttattttagattataaataatattcatttcctgttgctgctataacaaattaccacaatttagtagattagaacaatgcaaatgtattctcttatagttctagaagtcagaggtcctaaaatcaaggtgtgacaaggctgtgttcttctggaggctgtagggtagaatctgtttccttgctttttccagcttctagaggcctcctgcgtttccttggctcatggcgtcttcctccatctttaaagccagtagaatagaaacttctctcctctctgaccctcctgcctccctcctattaaaaaaccttgtgatttatactaggaccacccagataatccagcatagtcatttcacctcgagatccttaac

SEQ ID NO: 10604 - DNA, 6000 bp, Homo sapiens
cttcctctctttgcacttcagtctctccatttgggaaatcaggccatagggtgaaaaaacttgatgttgtttggcagagggcaggcgctctgtaatttcagggtggtggtgtttctcgtccttctgcaagtagaaatgactaacattcatctggttctctaagagccaggtaccaagctaagagcttttcacacactgtcttgtgccatctcaacagccatcatcatccccacatcacagttgaggagagtgaggctcccaggttcaatgacctgcaggaggtcacatagcaggcattggtggtatgaggactggtatgaggggagtcaggctgcagtgtctgcagtgtctgtctgggtcttggatggtcactacctctgctgtgaagaaagggaggagcctaaagatacaaaggacaagtgacctgggccatgagcagaaccacagggcctgggatctgtggccagcaccacccccctagcccgtccttggaaggagagtcccctcctgtcttgggatcctgtctctccgtggcagagttgagagctgtttgtcacaagagggaggtgagcaagccaggagcatgacggcgatgctctctctggcctcctacatctgttccacttcaccccagacaaacccagccaggatccagcccgaaagagatggcaatggtgccttctgcccgagaaacaaggaaacctcgggctccctgctcatggcttatattgttgctaggattactggaagcaaaaaagacagttcatccctggagccagtgactgaagaatggatgacaaaatgaggtcatctttctctctagtcaagtccctatgctcaagactttgaatcagtcttgattcacctcctctttcatgaccgagtgcctcttacgggcagagcactgtgctaggcactgggggtccaatggcaaatacaacagatgagactcctgccaacactggccctgagtctggcagggcacagaggggttggtaaggactcttaatgttaaaagtgacagaaaggctgggtgcaatggctcatgcctgtattcctagcactttgggaggtcaaggtgggaggactgcttgagcccaggagttcaagaccagtgtgggcaacacagggagacccccatgtctacaaaaaaaaatagccaggtatggtggcacacacctgtggccccagctacttgggaggctgaggcaggagggtcacttaagcccatgaggtcaaggcttcagtaagcagtgattgtgatactgttctctagcctgtgtgacagagggagaccctgtctcgaaaagaaataaatataaaagtgacaaaatcatcttaaactagccgtagccgagaaaagccatggcgggggcgggggtgaggggctgtcttcaacaggcctgcttccaggtgctcaaacaggtgtctctttccctctcttgggactgccctgctgggtgctcgctgcattcacggacaggccctcccttactgtgtggtgcagaggtgatcactggcagctgcagtgtgttgtccactttgttcttccccccagagaaagtgtgtggccatcacatcaagcaccagcatgtgtggcgaccattaaatatataccccattaccctgccctacaccagctccagagcccaggaggttgggtgctccagctggccatcctgggtcacaggccccaggtggagcagttggaaggacagtccccaatagggagaaggtgcactggacaggcaaaaacaacagatgcccattgcagggagattagaccagggacataatcctgtgaataattaatatttcacttctggtaaaaggcaatgaagcaagatgctgtgtgtaggtataaaagggtgagaagcccctgaggaggtggctcttaaggggacctgaaggatgagtatgaggtagccaggcagagggaggagtctatgaggggagtcaatgggtgtggtgagcaagaagtgagtggaatgaggtgagggtggagggctgcacggggctcttggtcaggccagaggacattctgaagtgatgggcgtggcctgcactgggatgctctcaaaggacccaggagtgaagcagcttcatctgagcagatgtctgtcttcctgagggtagttcacattcagagtcggccaccagggcatcctgtgctgggcagggaagccatggagtaaacccactgaccaaaccctccagacatcccaggaatctgagggcatcctggatgcctcaagcctcccgacatatcagggtcaccctggtccctcaggaaccttcaggctgatggccagcatgattggggccaaagaaaccagaggtcacagcaaagagaaggatttggaaatttatcatccacctgcataaagttaggtgcctctgccaagcagagctggacacagagcctcattagctaatgcaagtttaatatgaagacaaggaagctggatgccgacctgatcaactgcccgggagacgttcagaaatagagcagggtaaggtgtcccacctgctcagggccactgcaccacctgaaaggcagagggcagcccagcagcgacctgggcaatacccgccaggcaaaagcatcacttccacatcaatcactttgtataaaggaagagttattgttatgggatgctggcgcctgatcaatatctcctgctttgaaaataaacttcttggtttggccttgacattaatctaccatcaggagcccattatctcgagaccaatgttctgttctattgactggctggatttttttttctcccccaagatcagaatataattgcatttctccaggcagcacttccaataattgcagccctgtgcacatcccctctcgggagggccagagtacatcagggctggggatggagacagcaggaagtagtgggggacaaaggaccttttaggagccaggtggaagagcaagcccttctagagcccctgaattaatcaagatgtgaagcccaatccccacgacctcatcgagcagttccaactgaaaagagcacttttgcacagaatctggtttgcagatgtccccattcctgccccccattccacaaatgagagactatggtagcgagattcataataatgtcctgaatccagctgtgtccccccatcgcctcagcacccctcacccagggtcaggacggtctcatatcaggacgactgcaagagcctcccgggcctactctccctgaggcctgccccatcaggctgttctccaccccactggcagagtcatctttgtaagatgtaagtggattgtgtgtctccctcactgaagaccttctgtgaagactccttgttctgccccgtgagggccctgcgggagccctgcccgcgtctctggcctcccctcccatccctcttcccctttctccctctgctcctgccctggctttctttttgattatgccaagcttggccctgccctggtgcctttgcacttgctcttctcccacccgttcccttgcctttactttcaccttcttggttccacctcaaacatcccttccgaagtgaggctttccctgactggggagcataaagtagcatctctcacatcccatacacccctacaacgaatctatgcaatggccctgctctgccatcgccacctgaaaccatctcccatgttagttacctatgccaggaaaaattacccccagaatccatcttaacacaatacacagttatgatggcagcgcttccctaggccagggatttgggagtggcttggtttgatagctccaccttgggtctcgcataggagaatagtcaggccatgagccagggccgcagtcatctgcaggcttgactgtgaccacgacctctgcttcttggtggctcactgacctggctggcaaattagtgctgtgggcaggaggcctcagctctcaccgcatggacctctccacagcatggctggggtgtcctcaaacatggcagctggctcctccaaagccagcggtcccacagagaaaggtggaagccacggcatctttatgaccgtcatttctgcagtatcctgtgggttacacaggtcagtcctcatgtgactcactgggaggcatctacacaggggcacaaatacgaggaggcagggattgtgaggccacttcggaggctggggcctcggctgactgattcactgctgtgtcctgagtatgcaccagatcttgtgctaaacccttttacacacaatatctcatcttccagtcctgcctcctctatttctttacaggaaactgagtctcagagaagttaagtaccttaatcaaagtcataaagtgggtaagtggctgagccaggattcaaacccaggcctgccaaggagggtctgtgtaggccaaagtcatcaagtgggtaagtggctgagccaggattcaaacccaggcctcccaaggagggtctatgtaggctgggcccctcagtgggtatgagtcagtattggctgtacatgttcacattcccaagttgctatcagaccagtgggcaaactcaggagctctctgtgatgtcaaatactcctccctgggagagggaggcaaagagaaccatcagatcccacactgcggcaagacccagctgcacagcctagcaagccagactcagagaaggcagggcagggaggctgacggaactgctcagggagacccagcgagaggctcatagatccaggaggaaaataaatatgtgacagtaaatctacggaacctgtgtgccaccttgactacttatgctgtggctgatgtcactttgtgatcaccatggtctttcccactgatcccccgatgccaccctagaattctcaacacagcactccatagtggattagagctcagattctgaagtcagctaaaacagggtttaaattttggctccaccacttactctgtgacctgagtcacatttcttagcttctctgagcctccatttcagcatctgtaaaatgttactacctactttataggttttctgatgaggcttaagtgtggttgtgcatgtgaccatcttagcatagtgtgtggcaatggtaagcactcagtgctgtcagctgtttttaccgctgttattatattactgtgttttcccatgtcattaggtctgtgatccaggcttcagcagacaatccaggctgatgcttttgctgagtgcactaagggatgctggcctggcgggatggtgaactggaagcagaaacgtcatcctctctcttccttcttgccatgcaggtgtggatgtgtgggggccgcatggaggacatcccctgctccagggtgggccatatctacaggaagtatgtgccctacaaggtcccggccggagtcagcctggcccgggtaaggtggtggctttccttggcgggtagaaggggttggcctaggaccatcagctgcactgaggcaccctggggccctagactgtgttatgtgatctctgggtttgaggatgtgcctcccattctccaggtgaaatctgatttaaaagaactcccttaaatccctacttaaccattcattgctatgtgacctggggagggttgcttaagtcctctgaacctgtgtttcctcctttgtttaaagagagctaattctttccaactcccagcattgccaggagaattaaggaggtgatactgtttcccagagtgtgacagaggagacgatcttaggcagcaaacacaggaatgttttcttgttcatgtgtttaagttaatgtggattctaaattaatgtgtattcgtgtagctaacctgtaatttcacagatattattacttagcatacagctaaagtaggtgcaaagttagaccagaggtgatgtaaaaaaacatgttagataaatattaatacaggtggtgtggtgtggtgtgtttgggaaagcttgcgtactaaatttctggaggggaagtgggcttcataaatgtcagtgtctttctcttctcctcaccccctgtctactc

SEQ ID NO: 10605 - DNA, 6000 bp, Homo sapiens
ccatgtccagcagggaggtgcacacctcccagccccagctttgtcctggactcccctggagaggcccagctctcctcgctcctctgtgtgaacagcaacaggctgtgggaactaagtgtcacgactgcaatttgctttcttttcagtttcattcattagtgttcctcccaggccccatccccacagcccagggaaatgccaatcagcgtcttccctcctgccagcggcacccctgccctcccctccgtgagttcctgagatcccgccagcatctcctccagcttcagaatatctgctgttggatcccattgttcccacatcatcccaggaatcctaaatggcaaagcctgtcatcttgctgccgcccatgtagggcctgaattccaaggcagacacaccacctggcacagccttgtggctgcatctccccatgttccagaaggtatggtgaccttctaagacgagggacagccatgaccagccacttccctgagcgagttcaggtgtgagaacgccctggcactgggcatttctgaatctttccatatgtcagaatccaggaagtgccagtcctgggagcaccagaaccctctcctgtgactctacgtcacctcatgccagtcacctcctactgactgccagtgtgtcagggaggcctgaaggatgagagataaaataatgaaagcagggccgtggcaatgtgggcctggccactagagttctctcagcattttttttttttttaagtcacggggccaggcatggtggctcacacctgtaatcccaccactttggggaggccgaggcaggcagatcacttgaggtcaggggttcgagactatcctggccaacatggtaaaacccagtctttactaaaaatacaaaaattagctgggcatggtggtgggcacctgtaatcccagctacttgggaggctgaggcaggagaatcacttgaactcaggagtggaggttgcagtgagccgaggtcaccccattgcactccaatctgggcgacaagagtgagactcaatctcaaaaaaaaaaaaaaaaagaaagacatgatcttgctctgtcacctaggctggagtgcagtggtgcaatcatagctcactgcaggcttgacctcctgggctcaaatgatcctcagcctcagcctccagagtagctgggactacagccaccacacctgtccaatttttttattttttgtagagatggggatctcactgttttgcccaggatgggctcaagctcctggactcaagcaacccttccatctcccgaagtgctgagatgacaggcatgagccactgtgcccagctgagttatctcagctttgaggaaacccccctggaatgtgtgaggatttcccctcccctcacctcctcaagtgaacagtgaccagccccttcaacagatgcggggtgatgggggcacgttgagcaaaatcagtagatactcataggtagtctgcctcagggttcccccttagccttcaggcttgcagtcactcaccctgtgactgagccagttgcatagcagtttccatgccccagggcctcagtttcccctcaggcgatgtgctttcctgtgtacctcaatacacacattgtctccctctggtctgggccagccccatgaaaggagagttgagactgggtgccaggtgtctgtgagtcataagcatttgggttccaaattgtgtgtagatgaatacagatgtgttttgtgtgtgtgtgtgtgtgtgtgtgtgtgtgtgtgtggttattttttattttttgcttcattgcacgtaagtcacattttcctatcttctgatccaagctctaaaagcgttttgtggtataaaatctcccatcatctgatccactctaccgaaataaaccagctcccctgccgtcatcttccctgaaaagtccccctgcgtcatgttctgaggccggcagggaggggccttgcccacttaaaacacttcaccataatccccccagcgcccccagtcctctccactccctggggggccgctccggtttcctgggctgttattactggaggaccagctgctaccctgccacccatccatacagacctggtctgtccatcctgggcctcacaggcccccgcttagctcatctcatggaaatatcatttaaaaaaataaacactggtttgattcgcacttccctctcgcctttgctatgtctcccagcctcccaccactgggcaccagttcatctattaaggtgttcttggctcccagagttccccacaggttgcaggtcagtagctggccgtccacctgtggtgcctctggggctgctaatgtcctctggggccacacaactgtttatttcttctgagtcctgtggtcatttaaatgccccttaaatgtggcatgggggaaagagtgagtgccacatgcactgtgtgacctcggacaagttacttccctctctgtaccccatgggtacctcagtgaagaggcatctccttcatgggctgtagggctcctgctgctccgaggcctatggctgctcctaggatgggaggtgttggttcttataaatgacataaagtagatgctcaagaggaaaatatgcttaaagttttcttgcaaggtctggaacagtggttcatgcctgtaatcctagcactttggggggctgagacagatggatcacttgagtccaggagttcgagaccagcctgggcaacatagcgagacctcacctctacaaattaaaaattaaaaaaaattagccaggcatggtggcatcacctgtaatcctggctaccccggaggctgaggcaggagaatcacttgaacctgggagttggggtctgtggtgagctatgatcacccactacactgcagcctgggtgacagagtgagaccctgtccctacaaataagtttccttgcaaaccttctgtgaacttcatttgtcttccatcatccatgctttgattctctgaagtcatcagaaggcaatttgtaggccataacattttgagtaaaacataacattagtttgattagtcccaaatggtgttctgacaactgcaaagctttgtgattcaatcaggtgggtgttttgtgcctgagaagcaacagggtgtcacattaagagcacagactccaaagttttgaacccctattcagccacttgctgtggcattggacgagggattcagggtctctgtgcctcagtttccttggctgtgaaatagtctaagaatagtacctactgcctagggttgagctggggattcactggggtggtaggcatggagcactgtaacccacctggcccagggaaggtgctgtgtaagtactgtgtattttgttgtggttagtatattatgatgtggcagacagttatgaagtacagacataacaggtgacattcattatcctcctgctaccgccattctcaaccaggggcaattttgacatctggggacatttggcaatgtttggagacattgtggttgtcacagcgtggcgggggggggtatgattggcatctcctgggtagaggccagggatgctaaatccttctgcaaaggacagcccctgtggcaaaaaattctctggccccaaatgtcaatggtgccattagaaaccttgccctggccaggcacagtggctcatgcttgtaatcccagcactttgggaggccgaggcgggtggagcacgaggtcaggagatcaagaccatcctggctaacacggtgaaacacccccaccctgtctctactaaaaatacaaaaaattagccaggcgcggtggcaggcagctgtagtcccagctactcgggaggctgaggcaggagaatgccgtgaacccgggaggcggagcttgcagtgagctgagatcacgccactgcactccagcctggaagacagaaaaaaaagaaaaagaaaaagaaaccttgctctaatagaagctttctggtagcaccaaaggcctctctgtcctttgtagcacttgccttggctataattttgcatttattggtatgattatttgcttactacccatcaagtcccaggatgccatttcttggctgtgtgaccttgggcccctgggactgcctttcagaacctccatttccttcatctgcaaatgggattgtaaatatgtgataaattcagagttgaggttaagaccacaggctccagagttaagacgtacctgtgttcaagttgcatctctgctagtggtgaacttaggcaagtcacctgatgaacctcagtttcctccgctgtgaaatgggtctaataattcccttcctcattcagagggtgaatatgggaattaaaggagctcataatggtgaaaattattttattattattaaatccaccatccaacaactggttttctttgagccctaagtatgttccggacttggtgactatgtagtgggtattatgggcttaacgggcaatgtctgccttgcagagcccatcatctcatgatgtgggaggggtctggcctggttcatcctccagcactgacttctgacactcccaccccacccctgccctcttgcagatctgtgccatcattggcgggaccttcaccgtcgccggcatcctggactcatgcatcttcacagcctctgaggcctggaagaagatccagctgggcaagatgcattgacgccacacccagcctaatggccgaggaccctgggcatcgccagccttgcctccagtgccctgtctcctttggccctcaatctggtcccaaatctggctgtgtcccaaagggtgtgtgggaagtggggggaaagtagaggatggctcgatgttttgcagctacctcttttccccgtgtttctttttagacaaattacactgcctgaagttgcagttcccctttccctggggagccccaagaacagagtcaggcaaggggtggggagtccagggatcttggggacccctcctaggagagctgcagtctcttccctcaggggaacatcccagaatgcatatcgatcagctctcagccaggcttcgacaatctcgcagcccccactaggtggacacattaatgatttggtttctcccctgggcagccaacctgccccagaggcaccagacctgggctttcagctttgggaccaggctgcccaaaggtactcctttatacacccggcaccttccacgaaagatggtacttcccaagcaagcccctatgatttgtcactatagatggaaccctgacttctgccccatcccttcctgcccaacctagaacccaggcctcaagtctttaccccacccctttcttgttcttccaagaagcagatgcccagttgctcagcagcagcggtagagacttgaatctgcccaccagtcacaaggcgggtcacagattcctcttcctctcttctcctcgttcctctgaaccctccaccaatgtgcctcagcctgtgtgctgtgtggcaacagcattctggttcccactgccaagatctcccaccactctgctgggatctgcagtggcagggagtgggggttgtgtaaaggggaagtcatcttttgagatccagatagacatggtttgtgcacttacgtccagatgggaagcatccttcctgcaaccctaaaataatcatgcagcctctcagacggacgccatcggtcccaaggccttaggtggaggaagcaaagcaggccaggcctgtcctgtccgtggacctctaccttctggactccctacgggtgcagagcacttgggtttctctacagccatcgtggcccacttgacactgtgctcctccatcagctggtcacatgccaacacgttcccagcccctgaggcagctccagggtgccccacctgctcctgaggtgggtccctaccctgctgctcctcttcatcctttcccttttgtcctgaaagggaggagcaatggtccaggcattaattccacccagggaattttagctatgccctcatgtcccagggagagagccacacgc

SEQ ID NO: 10606 - DNA, 6000 bp, Homo sapiens
gtgaaagattgcgtgtcagcaagagagtgagacagtgtgaaaggcttaggtgctctccctgactggctcagcttatctcccaggctgtaactgattacttatctgtctgtccccactacaatgtcagcagccccttgaagggtagaagtagggtccaggccaggtgaggtggctcacatctgtaatcccagcatttgaggaggctgacatgggcagataacttgaggtcaggagtttgagactagcctggtcaatatggtgaaaccttgtctctactaaaaatataaaaattagccaggtgtagtagtgcacatttgtaatcccagctactcaggagcctgaggcaggagaatcacttgaacccaggaggcagagcttgcagtgaactaagatcacaccactgcactccagcctggacaacagagcaagacactgtctcccaaagaaaagaaaagaaaaagagtccaattcggggctttatccccaggatttaaaacagtggatgccacataatgaaccttcaataaataatcattcagatgaatgagtgaatgagtgaatgactttgtgagggagcatcagcctctgtggagggtcagtgtgaaaggttatgagtgcggggagaggaggcagacaagggatatggggaacatatcctagggacatcagagggttgcaaatctgagggatttgcgcatctcaggagacaaggaggttgcaagacctgagctatgaaaacttttagtttgtctttggctctggtaaactcaggaaatgcccgggaaggtgaatgaaagccatgtggggtccagctccagctggcggctcaccctgtctccccccacaaccacattcacaaggggagccagcagagggccagaggcagggagctgaacccctccagcagtccgggaggtctggcaaggtaccctctgggcaggcagctcccagggccaggagcctcatctgtcctgggagctccagcaaggcaggactctagagaagggaaccaggacaaattgtttttaaaagataaccaattaaaaaaaaatttataatatacatatatatgtgtgggtgtgtctgtgtgtatgtatatacacacagacacacagacacacacagacacacacacacacacacacacacacatatatatatatatatatatttttttttttttttggagacaaagtctcactctgtcacccagtctggagtgcaatggcacgatctcggctcactgcaacctccacctcccgggttcaagcaattctctgcctcagcctccctagtagctgagattacaggcacatgccaccatgcctggctaatttttttgtatttttagtagagctggggtttcaccatcttgccaggttggtcttgaactcctgacctcgtgatccacccacctaagcctcccaaagtgctgagattacaggcgtgagccaccgtgcccagcctaatatatatttttaatagagacgagatctcactatgttgcccaggctggcctcgaactcctgagttcaagcgatcctcccgattcagcctcccacagtgctgggattataggcatgagccaccatgcctggcctcaattattttctgatttatctttgggaggagaccattctttcgcttaagaagaaaaagaaaaaaacaattttaagtctctttaatgggccttacagttatgcaaagatatgccactatccctttgggagtgagggtggaaagaactagacttgcctgcgtaacaatgagaaaggaagttgcttcttaagacagggtctacactagctagaggggacaaccaggacctgagcctcagacagggtctcgctccatagcctgttgcccaggctacagtgcagtggagcgatcacggctcactgctgcctcgacttcctgggctcaagcaatcctctggcctcagcctcccaagtagctgggaccacaggtgcacccagcccatttcccttcctctcaaggtgccttaagagaaggagaaggcttgagattcaggtgagggatgggcagagatcagaggctgcctggcctcctggtttggccacagtctagatgctcaggagagaagtgcttacaggtgaggcaaacatgagccaggtgggcacggagctatctgggagcacctactgtatgccagacacttgaactctaatggtgaggtctgaggacacagttcctctactgaaaaatagagacagggcaactatgttgccagggctggcctcacactcctgaattcaagctgtcctcctacctcagtctcctagtaactagaactacaggcacccgtcattgtgcccggccattccacagctatttacataattaactgttcagttacaattctggcaagcgtgctgaagaaataacaggtcctaaataattacagctagtattacaaagcaagcgctgcatgccaggcttacacatactgctaacatgtctactttttgcaacaacctcttgtgggtgagactatcatttgcctgttttactgaaaggacagtgaagactgaggccttgtgtgatggtgctgagagctgggcctatgacgtccagccctgtagtctgtgctctgaaccacttcaccctgtttctttctccatcctcacagtagagacgtcatctaagaggagcttgcaagtccagagggcttcctgaaggaagtgagctgagaataatatgaaattaaccagaccaagggccattccaggaagagagaatggtacgtgaaactgcccaggagtagcagggtgggagccaggaggcgtgggtcatggcaatctatgtataaagagctatgggaatctataggaaaatttaagggagtggctgacacagtcagatttgtgttgtaagtatcactccgcaggttgcgcagggaacaaatgagggagcagaaggaaggggttctcctatccgctgcacggcactgcgcagaagacaggggagccaggcattccctgaagggtgaaaagcaaggagtagagctgggtagtagactagaatttaggagcctggcctggggcctgggtggggcgaaagaggcggagcctgaatggggtgtgtataggggggttgcgtgtaggggtgtgtgtataggctggggcggggtcccgggagtgggctgactgggtcgggggcggggctctccaggtgggcggggatcttggccacccctggccacacctctctccggctcgagctggtctaggcggggcgggcccgagggggtgtggcaggaggtgggcgggcccgggtggggggggggggggcgtggaaggaggggcgggcccgagcaggagggggcgggcccgaggggcggggtgggacaggaggtgggccgctcgcggccacgccgccgtcgcgggtacattcctcgctcccggccgaggagcgctcgggctgtctgcggaccctgccgcgtgcaggggtcgcggccggctggagctgggagtgaggcggcggaggagccaggtgaggaggagccaggtgagcaggaccctgtgctgggcgcggagtcacgcaggctcgaggtgagccggaacccttgtgggcccgggctgcgctcccagccgccagggggcgagaggcggcggggctacggggactgcccctcccggcgcaggggacctgggcgtccgccgggcggcagggggtggagggggcggtaaatcagtaacccgcagtgcacacagggccttttgtcccgctccgtccaaagagcaccccggccgcggagctggttactcattgcccaccgaggcgggggcaggctggccctgtgcagctaccctcgggacccattgattcgcacctccccccaggctggcccggcaagggtgggggaggacaagcgcgcttgtccctgcggctgtcttcgcgccggcggcagagatgagggacctgaggccccgaaaagttcagtcacttagtgcccgggggcctccagcgcgagtgcgggaggctgaaggagaacccaggactgtctgatgcctaaggcaggccctccattcccacgtggggggtggtcggtcagcggtcagcagccatgggtgactcgactaaggactctgatatcagggcagcctggggtaggaataaactccccgggcctccccacccactcccagcccaagctgtgtacccaaagagctgccctccctgccaagccgagcttggtagggagttttaccaaggaggatccgactggattcgagagttgaggtgggccagagacagcagtatctgagtcaggtagagaagagcaatgaggggcacagagggatgggcaagagagcacatgtgcccagttttgaaagccaatggcttcagcgctcctgaaggggcagacggtgtgaccaaagagataggcagcggcagagagggagccctaggatgttgagctggatcctgctgggcacaggtagccattaagggcttgcaagctggggggcatgacatggcagacttgcaggtttttttgtttgtttttttattttattttatttttttattttgttttttttgagacggagtctcactctgtcgcccaggctggagtgcagtggcgcgatctcggctcactgcaagctccgcctcccgggttcgcgccattctcctgcctcagcctcccgagtagctgggactacaggcgcccgccaccgcgcccggctaattttttgtatttttagtagagacggggtttcaccgtgttagccaggatgttctcgatctcctgacctcgtgatccgcccacctcggcctcccaaagtgctgggattacaggtgtgaaccatcgcgcccagccgacttgtagttttttaaaactctgctggaagatgaaggttgaagagccgagggagaggatgtttccagaggcccatgcaagagatggccatgacctgccttgagaaggggcaggggaagccagatggactggaagtggagtggcagtgaccaaggaggaggaggtgtgataggcttcccacgcagggtagatccagagacaccagtgccacccataggcccctaggactgcagtggtcaccgattcctttgtcccagctgagactcagttctgagtgttctattttggggaacagaggcgtccttggtagcatttggaagaggatagccagctggggtgtgtgtacatcacagcctgacagtaacagcatccgaaccagaggtgactggctaagggcagacccagggcaacaggttaaccgttctagggccgggcacagggaggagaacattccaacactctgcgtgccgacgcacgttctctcttttatcctcaaaacagtcctatgaggatagtaagccagagagagacagagacaaggaattacaagttggtgagagtcaggatttgaacttggctctggcagatggaaaattagggtctgtattctttacaaaaccgtgtgtgcctcagatggagttggtgcataacaagcagaggtatccagggtcgcggtcctgcttgccacggaaggggccgccttgtcagttgtgaccacccagccctggaaatgtcagtaatgctgtaaggagtggggatcggatcagatgccatccagatgctgaagtttgaccttgtgtcatttttcactttcttttttggctcttctgcaatcaattcatttatttagcaaaaaagaaattatgtgtgccgagagcatgcagaagatatgtctccgttctctgcttccctccaaaaaagaatcccaaaactgctttctgtgaacgtgtgccagggtcccagcaggactcagggagagcaggaagcccagcccagaccccttgcacaacctaccgtggggaggccttaggctctggctactacagagctggttccagtctgcactgccacagcctggccagggacttggacacatctgctggccacttcctgtctcagtttccttatctgcaaaataagggaaaagcccccac

SEQ ID NO: 10607 - DNA, 6000 bp, Homo sapiens
ccagcactttgggaagccgagtgggcggatcacctgaggtcgagtttgcactaaaaatacaaaaaattagccaggtgtggtggcaggcacctgtaatcccagctacttgggaggctgaggcaggagaatcgcttgaacccacgaggcagaggttgcagtgagccaagattgtgccactgcactccagcctgggcggtaagagtgaaactccatctcaaaaaaaaaaaaaaaaaggactcctgctccttcaggacttgaattcaactcttcacacccctacaacagccaaggacgctgggacaatgcggggagtgctgaggcagatcagggcactccaccccaatagccaagactcctggggcagtgcggggacaagggggggctgaggcaagcctgtcagtgtttgttcattgccccttgagggggtggatggggaaaggaattcattgtgaggggaacccaggaactcgggatccggcccaggggatctccgtgtgtgcccagctgaccccatgagaaggcaggtgtctgcagctcctccttgctctccaggtgggcaaaactgaagcccggcccagccccagcccacacctgcagccactgccaacaccacgtattccctggccccctccagccccaaacaggctgggcgtcctcagttctcagtgtcttttatcaatgctatatccaagcctctggttcggagcctgggctagagctcaataatactcattgaatgagtgaatggtgaatgaatgatcacctcaccaccaccacacacacccctccgagactcacatgcaggtgcccagcacagatgtgcacatgtgagtctgcatgtgagtctcggagggctgtggtggtgatgatggagggtgtggtttgctgggtgtgtgtttgtgcgtgtgagtctcggaggggtgtgtgtgtgtggtgaggatggagggtgtgctttgctaggtgtgtatttggaatcatgcgccatgggggtttgtgcaggtgagggtgtgtgggcatgagtgtcccggacacagctattgtcattcagcgttgctgagacccactgacctgcagacctcatagtgggtgcccaggatgttgtcctacggagagaggctggggtcccctgctgtctccccactcccagtccgtggggggcatgtgatgcgagggacggcctttgcctacgtgcccagccctcagggtaagtgctgctcccacaccctggaccctggttgcccacggttgcccacatcccggatgaggccacttcccccgcctgttcctccccgcctccccactttggggccctggggctcctgaccaggctccctccctagtcctacacaggatcccggggacctctgcctatgccttccccagcctgggccctgtggcccttgctgagcacacctgcccctgtggggaggtcctggagcgccatgaaccactgcctgccaagctggccctggaggaggagcagaagccaggtgggcctgggctgggggtggcagaggcggcagcagtccctgccctggcctctgcccactatgctcatggcttcccccatccagagtccaggctggtccccaagctgcgccaggctggcgccatgctgctcaaggtgccactgatgctcaccttcctctacctcttcgtctgctccctggacatgctcagctcggccttccagctggctggaggtagggcccgggtggaggagacctgggaggggttcctgaagggccttggacaacgctggctcatgctccccagggaaggtggctggtgacatcttcaaggataacgccatcctgtccaacccggtggccgggctggtggtggggatcctggtgaccgtgctggtgcagagctccagcacctccacatccatcatcgtcagcatggtctcctctggctgtgagttggcccaccagggtggggaagagcttggaggggcaccccaggagctgggaagggtggcaaatggggagcgtgaccccagtaaggctggcctccattcagcttgactcctgtatcagccagggacatgagaggagcccaactgtagctgtatgtgacccagatgatttatggcaaggaactggcttccccgatggtagtttgtctgggcaagtcaggaatccgtaggccagggcattggaagggcaggcgggaactctcaggtgggcgccgacactgcagtccagacagggcagcgtttctcctttctcagggaagcctcagttctgcttgaggcctttcattctattggattaggctgacccaggttaccaaggataatctccttttcttaaagtcagctgactgtagacgtgaattgcatctacaaaacaccttacagaacacccaggctagtgttgggttgaataactgggtaccacagcctagctaagttgacacataaaactaaccatcactggccgggcgcagtggctcatgcctgtaatcccagcactttgggaggctgaggggggcagatcacgaggtcagtagatcgagaccaccctggctaacacggtgaaaccctgtctctactaaaaatacaaaaaaaaaaaacaacaaaaaccaaaaagcattagccaggcgtggtggcaggtgtctgcagtcccagctactcaggaggctgaggcaggagaatggcatgaacccaggaggcagagcttgcagtgagccgagatcatgccactgcactccagcctgggcgacagagcgagactctgtctcaaaacaaacaaacaaaaaaactaaccatcacactctggggcatgtgtgcacacacaagcacaaatctctatttgcacataggacatgagcccacgagccctcataacgaaggcctcacacgcacacacgttcacatccatacaccatgtgcagcacgtgtacatctactcgcatggatgaatgcacacacctgtaaacgcacagcccgtgcccacatgcacctgtgacgccaacgttaggcagactcagcagcatggcaggagcggccactggggactgggacgtgggtggggggcctgacaggagttgtggtggtgcaggagctgggtgaccgtcaaattcattaggacgtcttctcttctaccagtgctggaggtgagctctgccatccccatcatcatgggctccaacatcggcacctctgtcaccaacaccatcgtggccctgatgcaggcgggggacaggactgacttccggcggtgaggggggctgggggttgggggctcgtgcctgggggaggacagccccagatgccaggaaccccaggcgtgactgtgcactggctcgagcctgccttgcaatgtggcctccctgcccagggccttcgcgggggccacggtgcatgactgctttaactggctgtcagtgctggtcctgctgcccctggaggctgccactggctacctgcaccacatcactcgacttgtggtggcctccttcaacatccatggtggccgtgatgctcctgacctgctcaagatcatcacagagcccttcacgaagctcatcatccaggtgacagcagggcctggcatggggtgagggtgggggtaacaagggacccagcctccttcactccccctgcccacatcttgcccacagctggacgagtctgtgataaccagcattgccactggtgatgagtccctgaggaaccacagtctcatccagatctggtgccacccagactccttacaggtgagtcccaggcctaaccccaggtaagaggactccctcttcagactcttggtttcattgtctgttcaaaatgctccagatagaccttgaagatcatttagccaggagagggcaaatatgtggcccttctactgtgcttacagttaacattgctaattcctcccaacttcccacatcgccttaggcagacatcaccaatcaattaaagttgttatgtaattgatctagcccagtggttcttgaagtgtggtcccaggccagcatcttgtgtgccgtgtgggaacctattagagatgcaaatcaccctgcccttccctagacctactgaatctggaaacccctgggagcggggccaatggcctatgcttcagcagttcctctaggtgtgctcagtgctcaagtttgagaaccgctgatccagcgcaacccttgggtttcacaggtagagacacaggttcagagaggctaagaaacgtgccagagcttatcctaccatgtcagggcctgagcaccctagaggggttagtgactcagctgggccatgttttgggacccaggtaacgtggggaagaggcagagtgctataaggataccaaggaaagtaacaggaaggtgagctgcgtggagaactccttggagatgttaacagccgcttgtgctggcatcgggggttccttctcctggagactgccacaggcgggagtcccttgtccttctgcactgtttctgctgcttctaatactgggaagatctgtttgaatcaagtggatgctcatggaccacccattatgccaggctgatgaggaagcaggcaattagcacacttccttactcagctgtgaaaaggcaaatgcttcatccaaaccacaatgcaccatatttgcttctccctgatgcttgcatgtgagacataactccatttacaatgagatacgaggaaatccaagccacagcacagcacagcacagcacaagcccttccccttccccttccccttccccttccccttgctgcttcttgtgactggacctttaccctggtgcgaacagaaaacactcatctgactcgccctgcgatgctcctttgcatctgaagttgctccagctcagcctctgagtgttcaaagcagccttacataaaaaaaaacccctgcgggcagcttttacgctgacttcatgacctctttaatacatcaaccactttctcacgagctctctgagcactcttagtgctctctgactcaccacaagcctctctacttcatagcaaaatctggaagggagagaaatcacacactttgatcttcgcaaaaagcaagccatggaagacagctctgttcctcactgcccctgagctccctgccggccacctactgcagcttccggcagatctcaaccagcagcctccacgtcctcacttgaagtcatcctcacccaggttcactctggggaggccgcccttgggcctttctctacggctgcagctgacacttgtccagctggtttctcttcctcactctaccaggaaatgctttccttaaacgctttctgcagggcagggtctcatttcctcggcttggagagtagctggtgggtgggacccaagctctcactttcatcccctttctgggacagcgccccgaaggagtgtgactcacacagcagtggatgtgcttggtcttgcaaagtgtgaagtgcgtcctggctcttcctgcccaaagacgggccacagagtctccccgtgctcccttccaacctgttcccattgacgccaactttcaccatgctggacctgaaccagcccgaaacagtctccagggaagctatgcaccagggagaggaggcaagtccaaggcctaccagatggggaaagcagcagcagcggcagttgagtgatcagacacttgagtctcccgggaccctgacaccgtcctgggaatcaccttcttatgtggccacactgtggactgtcaactatacctgcctggattaaacaagcatcttttgaggacttgcaacctgggaggcagggattatcacgtccccattttacagacgaggagcactgagccccagagaagtgcagtggcttgcccaagtccatgtaattgaggtaggatacaaatcctggtagaatcctgactatctcgttgcctctctcactcaccggtctgacattctactatgtatgtctgcttcccatgctgcccatcaggcctgaaggccaccaggtgaccatagccacgtggagacgactccagagatagcgggtgtt

SEQ ID NO: 10608 - DNA, 6000 bp, Homo sapiens
gtggatatccagttttcccagcaccatttgttagaaagactgtccctcctccccgcattgaatgggcttggtctccttgttaaaaattatttgaccatatatgggagggcatatcttggggctctctattgtattccattggtctatatgtctgtctatatgccagtaccacactgtcttgatgactgaagcttggaagtaagttttgaaatcaggaagtgtgagttcttcagctttattcttatttttcaggattgttttggctaatcgaaatcccttgagagtatatgaattgtagaatgagtttctctgtttctacaaaaaatgtcattgggattttgacaggaattgcattaaatctgtagattgctttggatagtattgacatcttaactatattaagtaaggatgattttttttaaattactgattcaatctcctcactagttataggtttattcagattatattatctattctgagtcagttttgcatttctatgaatttgtccatttcatctacgttatccaatttgttggcttatatttgctcatagtactctcttatgatcctttctatttctgtagaattgctagtaacgagccattgcagttgggatctggcagcagaggctgtgtgtgtgtttgtgtgtgtgtgtgatcggagaaatgcttgagagggtaacacccgatttaggagtggacagggtatgaggacaaagaagtggtaatgggagaccttgccttttatttcttttaatcttttttgataatacatttgtgcattatttggtcgttctctttaaattcatttttaaaggtagaagcaaatcaagactggtagatgctgtgccaaggaaagtcagggatcctaggttcgaatcctgtctctgttcgcaattcgctccgcaacctcaaacaaacgacctcagtttcatctatgaaaagctggtaaccatcgtcagttgccaggccatgaagagagtcaacggaaataagtttttattctagggcacccgctctctctcaggtaaaagccgcgccccaatcaggtactgccgcgccagggccgcgggacatctcgggatttgtggtccacccggcggaactcgcggtcccggcaggcaccgcggcggcggcagggcgacgtggcgcggccggctgcggctgcgcaggcaggtggagcaagatggctgtggagctgggcgtgctgctcgtccggccccggcccggaaccgggctgggtagagtgatgcggaccctcctgctggtgctgtggctggcgacgcgcggaagcgcgctctactttcacatcggagagacggagaagaagtgctttattgaggagatcccggacgagaccatggtcataggtgcgggggcggggaggaaggggcgagtttggaacgtgaccgtggtcttggggcgggggatgcgagacagtcagctctctagagccgggaggagacggcctcgccgtgcccaggcggtcgcggaacccatgccacctcgcgctcctctgacctgggctcgccctgcttccctcaaggaaactaccggacgcagctgtatgacaagcagcgggaggagtaccagccggccaccccggggcttggcatgtttgtggaggtgaaggacccagaggacaaggtgagccaaccgcccccctcctctccgccagcctctcagctaggcgggctccggtacttcctcttctagttcctgcatctgctaaagtgggagagacagttgatgttgtgggaatatcctgctgacttgcagaccccgcccggtctgtgaaatgggcggattaattgtggtgataaaaatcaaagagttttgtcaactcttaaagtcatctagactttaagatttcacagaacatgatactttccccacaaaatgagcagcttttaatcttcccaagtaaggatattaaaacgaacggcaaaacccttcagctctcaccttctgtcacttttcgttaaaaaactcatggcggggtgtggtggctcttgcctgtaatcccagcactttgggatgccgaggcgggtggatcacttgaggccgggagttcaggaccggcctgggcaacctccgtctggcaaaccccgtctctagtaaaaatacaaaaaaaaaaaaaaaaaaaaatgagccgggtgtggtggcgcacacctctaataccagatacttgggaggctaaggcacgataattgcttgaacctgggaagctgaggctgcagtgagctgagatagcatcactgcactccagccaggacgacagagtgagactctgtctcaaaaacaaaaacaaaaaagaaccccccaaaaaacaactcacaccaaaaaagttgaaagggcataagctataaaggaaagcccttcccaagagcagtcagtcacttgccaccctaatgtcagactctcagagtctaaacacctgccccagagagttctcacacaagcatatggcaacagctgctgagcagctttgaatctttcagtgttgtgaggtgcgaaaggctgtgcctgtcaacttttgcagtacttagagccttaagcactgttttcctccattcccatccctaccataatactgactgaagcttgttaccttcctccaggtcatcctggcccggcagtatggctccgagggcaggttcactttcacttcccatacccctggtgagcaccagatctgtcttcactccaattccaccaagttctccctctttgctggaggcatgctggtaagtgggcccatgtgagacttgcaggtttcagccttcatcctttggtgaggactgggggactggtggtgctgtgggtgtgagaggattatgtcagattttgtgtctcctaagaacactgggtttccactggatgtccaggacacagtgactgagctctttgtacatgcctcactcagagcaccagcccaggcttaatacttgcttgtgtgcccagagcctcatggggctaagacactgaagagggcccagtctgttggctaaatgaacagatgaaggaaagtcggggatgagctgtcagtctctggcaggaagatggagcagggctaccagatttcccttatctcctttgtctgtcctcagagagttcacctggacatccaggtaggtgaacatgccaatgactatgcagaaattgctgctaaagacaagttgagtgagttgcagctacgagtgcgacagctggtggaacaagtggagcagatccagaaagagcagaactaccagcgggtgagtgactgggccgggagcagtgggcttctccctagaagctgcccactggctcagccaggaatttcacattaaattcattctgagacccccaagggacttacctgcactgcattgtaggtcgtggggcgggtattactaactcgaccttgtaattgaggatacagactcgtaagaggctgtcattgccctaaatcacagttacacacagaatggcacagtagcatttgataccaacaccttgggtgctgtttcagtgggtccacatgctcccaggaccagggtctcaaacttaccggtgaccaggaaccagagattaccataagtgaatctgtgaccttaaggactagtagggcagtgacccatctaaacaagcacagccactgttcagtgtcacctgggggcttccttgcagaaataccagccctggctttacagatgttccattttttcaagaggaaataggatttttatgcgaacattttaatttattttttatttttttctattgctgctgcacaaattacctgtgttttaaatgttgacaaaagactgtgcactgtgtgaggccaacaaaacatacctaaaggccagatccagcccccagcctgccagtttacagcctgtgcccaccatcttcaaggagcagtgtgggagacctaggcagagggcttagagcaagtccactcctgtgtgctccaggacagctctgcctcgtggggtgataccacaactaccttacctctctcccaggcaccagggcaggactaggtgagggctatgcctgacagatgaagaaacagacttgggagaatgagtaggttgcctgagggtaaagatagtccccaggtagagtgacactttgcaggcacttggctggaacctgggcaaagctggctgaccttgggcatcctcttggtctgggaatcagcagttctagcagccccagccaactcaggctcaccttatattcccctgcagtggcgagaggagcgcttccggcagaccagtgagagcaccaaccagcgggtgctgtggtggtccattctgcagaccctcatcctcgtggccatcggtgtctggcagatgcggcacctcaagagcttctttgaagccaagaagcttgtgtagctgtcccaggcgtcacaacccatcctcccaggctgggggagaaaggacctcctggaactgacttcttctgtcaggaggactggtttccagccatacctgttctggaagggagaggggctggaggcacccacaggcacaagctgaaggcagcagcttggctaatactgagcaggtagtggggcaaattcctgccctctctctctggcctctgggccgtttggtagtaatcacccaagggctggtaaagcccctcctcttggcacctcagaatcacagtgttactgatcagggatgtgaggctgctgttgggggtggggggaggggaatgggcaggcaagccagtcttctgtcttcctttgctaacttagggttttgagcaggttggggtatggtgcctgtcatacccacctgccaccctgggaacctcactgttctctctttcagcctagacctgctgatccagggtgtgtgtgagttgagggtgggtggaggggtttgcagtgtgggaatgtggccctgcagttgacctgagctgcttcacatggttgtccattctggggcttaaagaactgggaccagaccaagtagaggccttggtgctggttggggtggggcctgcagagtcttagttactgatttcattttcaataaatgtaggtttgttacatgagtttcccaataaaaaaaaaaatgacttcttgtccagtgcaagtgactcagtcatcagtgggcacacactgcagggtgcctcagggaatgccagttcttccaaagagcaaagcacttcacattccaaagtgaattcccaccagtcagcttcattctttccttcttctccaggccttcctgtggcagggaatagtgggtttgtccaagattatacaacaagtaaattgggctggggctcaaatttacaccctttcctctgtgccagctccctggtgaagttccctctttctagagtcagtaagcaggattgtcatggatgctgccaggaagtgcctggtaaggaggtgcattgagcaggggagtgctacaggacagccaccctgggctggcagggacaaggatgttgatgggctaaaccaacagcaagtgatttcaaccaggaccatgaaggagaggaaggattctgctggaaggagatggcaggacaggggtggttggagaagtggaggcaaacagctggaatggaggtgggtgggtgtttaatttcagctgcagagggtgttgtgaggaagctggaaaggaaggttggattagagaagcctcgagctccaggtaagcgatttggacatgcccacctttcaagaggggctgcaggcacccacaggcacaagctgaaggcagcagcttggctggcttaatactgagcaggtggtggggtaaatgcctgcccccctccctctggcctctgggccctttgcagtaatcacccagggtctggtaaagccactgagagccctactggcacctcagaatcacagtgttattgatcagggatgtgaggctgctgttgggggttgggggaggcaaatgggcaggcagttttgagaagaaccttctaataagaaatgtgagggaggttacagcagtgtgtgagaaagacc

SEQ ID NO: 10609 - DNA, 6000 bp, Homo sapiens
agagaccacaggctgggcatggtggctcacgcctgtaatcgcagcactttgggaggcagaggcaggcggatcacctgaggtcaggagttcgagaccagccgccaacatggtaaaaccccgtctctactaaaaatacaaaaattagccaggcgtggtggcaggcgcctgtaatcccagctactcggaaggctgagacaggagaattgcttgaccccgggaggcagaggttgcagtgagccgagatcgtgccactgcactccagcctgactgacagagtgagactctgtctcaaaaaataaataaataaataaaataaaataaaataaaaaagtagaaaagagatcagagttgaagtgtcattatcaacatggctcttagctggatatcacatttaaaaattagataatttgggttttcatttgagatctgatttcttgagagtgtgaatctgacaatctgaagtagagcttcatcctgatatagtaacagctaaccggatggagtggtcccctttagatgggctgtgcattgaccacggttctggggtaggatgcagtgccctgggggagtcaacaggaaggggaatgggtggattatatacttccaggtttacggggtaaaggggttactgggaatgattcatttcccacccacggtgaagttctctctggagcagagtgattaagatcatagattgtggggaagaacaaaacaaaaaccccaaacccatagatttgcaaccaaactacctgatttgcctctctgtgcctcagttctctcaattttaacttggggataagcacctaccgataaggactacgtgagataaccctcatgtagtaagaactattaacaatgactggcacataataagaacttaatagatgtttgctatctattaggaaacttaaaagtttgcctggaagagcagaggaggtcaagtctaacaattgccgctttctttccccaggtaggaggctagtaggaggggtgggggggctgggggtgagggggatggttaagttcccacggtgacggggcagatatgggaactcagtctcctattcccttcttcagttctcagctccaccaaagtacccttttcctggatgacagctgtcatttatatggcgttgaactgtgtgcctagcgctgcacaagtgtttgcactttctccttgaatccccacagctaccatatagaataggagccattgatatacccaggtgaggaaacagatgcagagatgtggcttggtcaaaacacagctgaattggcagagtctagtttctttttctttttcttttcttttttttttgacggagtctcgccctgtcacccaggctggagtgcagtggtgcgatctcgactcactgcaagctccgcctcctgggttcacaccatgctcctgcctcagcctcccgagtagctgggactaacaggcgcccgccaccacgcccggctaattttttgtatttttagtagagacggggtttcaccgtgttagccaggatggtctcgctctcctgacctcgtgatccgcccgcctcggcctcccaaagtgctgggattacaggcgtgagccaccgcgcccggcaagcagagtcgggtttcaaattcagtcaacttgtcttcagggctcggctcctaacgcctgcgcgggctgtcagctgaactcagcgccgagccgtgagcttggctttgcccctccaagcttgcgcggagaacgcgccgcctgggccgagacggggaccccgggacgctcccgcctcccctcggaaagaggacggagatgcagattctccccgagcgttggtttgggagtctggactcttaggtccagtcccagcccagtgatttgttgggaggccctgggcctctgggcttcagtttctcgggcttccaggcgggtcccggggcggctaggaaggagccgcccagagagggaggcgcgcccgcgctgctcgcaagcagaaccttggaggcggcggctccgggagctggcggcgcggccggagcggcggacccggcggaccggggggcggggcggacaggcctgggcggagcgggaggcggaggcgccgcgtaggcccgggaggccgggccggccgggctgcgagcgcctgccccatgcgccgccgcctctccgcacgatgttcccctcgcggaggaaagcggcgcagctgccctgggaggacggcaggtgagcggcggcggtgggcccgggccccgtcctcccgggcgccgctcccttctcggccgccggcggaatctgggaacccgaggccatcacgtctccatgtctgcgggtttctgtgagggcgtgtggttctccctgtgggtccctggcgctctgttccggtttctgtctgtccctgtgggtctctgcctcccccgccccctctccctttccgcggcactcgtccttcccccagcaccttccccccggcccgtgggtccgtatttctccattgacttccctttgtgagtttctgatcccctctttgctagtctctctcgttatgtgtttcgttgtgtctgtgtttctccaccagcctccctctatctgcatgcgggtctctgactccgctgacctctcaccatggatttgtgtttctcaatttgtctctgatccctgaggacgtgtattccgtttctctggtctctgccttcctcatcacatccatatagcctcagaccctacccttcctccttaacacttccccccatccttcgcaggccaccagcagaacccaccagacagaagctccgtgctctgcctggctggtcactgcctggcacgtactagacactccttatacacgcattagtccatttcctgtgcagctgtattggccctacgtgaaagatgcgagcttggcccacaccttagctaattttgtttctcactaaagcagaatggggaaagcgatttgactgcctccattcgtggggcacttgagatgtgtccctgtaagtcttctcacagaacacatgactggatctcctcctcgtgaatgacacctcatttccttcatgtttcttaagtccgtcaggtgccataagattctggaatttagtggccacaacttgtacttttggggatttttcagacttggtgttgaaaggggaaaacaggaatataatagaaagcgtggactagcgttcgacctgggcaggagtcctccgtaattatgtgagcagagacccctgcatctgtccgaccgcagcctttccgtcactgagccagttatgacagtattggctctgcagggctgtgtgaggattaaaggaccgcacacatgtaaagagcatggcactgcctagcacaacaggaggtgccagttgtcttcccgttacctttgcagttttgaggtcctgtaaccagagcagctgaggattcaaacctcgtagtacgaaggtctgtatgagacaagaaaggaaaggtaacagaggagcatttctatttcctgatccttttccatagctgtttccagagaaatttactgatgtcaattctgtgcttttgacacagggttggtgcaaagatccacgcaactgatgcaggctagtgtagctatctagtgtaggctctggagccagcctgcctgggtttgaatccgccttttactagtcttgggcagtgattgatgagggagacaaagcctcttctggactgcccctcagagccagggtggcctgggcctgggagccactgggactgcaaatctggtttgccacctggtggcaccaggaacaattgttctcggtgtccactgtcctgaggaattgggactctgggttcaatccagttgctctgcggtttgtgctcttagagcacaggatgatgcccatggggatgtggtcctcataggagaggggagcagggccgagggaattagcgtgtggacgtgctcggagtacccagtccacgccgttcccctggataatagtcactgcttcttttcatgaaggtgggatatcaccccatatccatctctccagtctctaccctgtccccagaaaaagcccagagggcaagggagaatctgtagaggttccagccttcccagaccactctcaggactgggctgtgctcctccccagctgaatccaccaccacaggataatggggggtaagtcagaagccctggggggtttcctaccaggccacctctcagctgcgtgtggaacctgggcctggctgcaaggctactggcttccaggttggcggtctctctagaaaaagggaggagttggtctggctttagcatgtgacttaaggcatgccctgactgccttacccctttctgtaactcacttggcaagctctctgctgtctggcctgtgcttgctgtgctggggccacagataagaatctgacacggcctgagaagcaaggacacaaggcattacaaaaaagtgggaagatgccgtgggaatacaaaagtgggagcattatgggggcagggggcagtgctggccatgacattggagttcggctctgaaggatcaacaggggtcctcaggcagataaagaaggacatttcaggcagaaggagcaggctgtgtgagggctggagcaggaaggaatatagcaagtggagaagctccgaggtgcccaacatgagaacatggggcgaaggcttgggagcacctggagttggggccaggtcatggagggctttgactgtcaggccaaagggcttggcctttgtctggcaaacagaggagggtcattcagaagactgaaggggtctgagcagggcaaggaacagatgagtgaggaaggatcagagggggacttaggagatagaatttatttatttatttatttatttatgagatggagtctcgctctgttgcccaggctggagtgcagtggcgtgatctcagctcactgcaacctccgcctcccagattcaagctatgcttctgcctcagcctcccaagtagctgggactataggcgcgtaccaccacacccagctaatttttgtatttttagtagagatggggtgttaccatatttgccaggctggtcttgagctcctgacctcgtgatgcacctgcctcggcctcccaaagtgctgggattacaggcgtgagccaccacgcctggccaggagatagaatttataagacctgatagctaatcgctgactcttaagattgtgaagtggattcctttgcagattactttggggagaaggtagggggagtacagaggaagcttctcccttcatggattcctcagctcctgtctcagcatactcaggaacttccagaggagcggcaaaggaatctggtgaattctgtttctttgtatttgctaaccaaaaggctgtctcctggcatcaccccagtgtctgtgatgttcagctgtttttccagtttctgaaatcagtgcctgtgctgtacccagccctcatctttctttccctctccatctcccatcttttatcatgagctgcctcttggactaaaggtttgaggctcgttcagtgaaccgccactgacagtttgggccttgcattgcttcggggggcacgtctgatcttcccagagtaaacattggtcattttacctggactaatgccagcacacacccgtgtctgggtggcctttctggtcattcttggaagcaggatggagccacggtttctgctggggtggatctgtaggggagcgggtttggaaagcagtgggttgcatctctaaggtggggactcctgtcattggctcaggacattgagccactatcgtggggaggagcacctgcaagtgacaggagcctcctcatccttgccctgagcagctctgaccaggactcagtcacagaaagtaagagagcattgaggagccggggcagctctgtgaactgggagtggttcagagggcttcccgagagcgggtggcatgggttgggtctagagaggcaagcaggattcggatgcatggtagtggcatgagcagaaacattaaagttgcttctgtacta

SEQ ID NO: 10610 - DNA, 6000 bp, Homo sapiens
aggcattcaggaattatataacataatacatgaacatgtaaacaaaattgtactttggggaacatttcagaaacagaccagtggtatggagtataagaaaactgatgcacctcaaccggatgtgaaggaagaggaagaagagaaggaagaggaaaaggacaagggagatgaggaggaggaaggagaagagaaacttggtaagaaacagagtccagaaaatctgctttaagccaagaccctacgatgttgttaaacctttacagtcaagttaaggattgtttttagccaggcgtggtggctcaagcctgtaatcctagcactttgggaggttgaagcaggaaaatcacttgagcccaggagtttaaggctgtagtcagccaggatagtgccactgcactccagctgagcaacagagtgagaccctgtctctctctctctctcttttttattttttaagacaaggtcccactctgtcactcaggttggagtacagtggcacagtcacagttcactgcagccttgaccttataggttcaagtgatcctcctacctcagcacccctccaagtagctgggaccacaggcatgcgctaccatgctcagctgtttgtttgtttgtttgtttattgatttatttatttgatatggtctggccctgttgcccaggctggagtgcagtggtgtgatctcggttcactgcagcctttgcctcccagattcaagcgattctcccacctgggcctcccaaagtgttgggattacaggcgtgagccaccagacccagcgagatcctgtctcttaaaaaaaaattgttggccaggtgcggtggctcacgcctgtaattccagcactttggggggccgaagcaggcagatcacgaggtcaggaggtcgagaccatcctggctaacatggtgaaaccccatctctactaaaaatacaaaaattagccgggcatggtggcaggtgcctgtagtcccagctactcaggaggctgaggcaggagaatggcgtgaacctgggaaggcagagcttacagtgagccgagattgggccactgcactccagcctgggtgacagagcaagactctgtctcaaaaaaaaaaaaaaaaaaaaaattgttggccaggcatggtggctcacgcctgtaatcccagcactttgggaggccgaggtgggtggatcacgaggtcaagagatcaagaccatcctggccaacacagtgaagccccgtctctacttaaaataaaaaagttagccaggcatggtggcgggcgcctgtagtcccacctattcgggaggctgaagcaggagaatcacttgaacccggaaggcagaggttgcagtgagccgagattgcgccactgcactccagcctggcgacagagcgagactgagtctcaaaaaaaaaaaaaaattgttggccgagcaaggtggctcacgcctataatcccagcactttgggaggccaaggtgggtggatcacctgaggtcaggagttcgagatcagcctcgccaacatggtgaaaccccgtttcactaaaaatacaaaaattagccaggcgtggtggtgggcacctgtaatcccggctactccggaggctgaggtaggagatccacttgaacctggaggcagaggttgcagtgagccgagatcatgccattgcactccaacctgggtgacaagcaaagtcgatctcaaaaaaaatagtggccgggcgcgatggctcacgcctgtaatcccagcactttgggaggccaccgaggagatcatgaggtcaggagatcgagaccatcctggctaacacggtgaaaccccgtctctactaaaaataaaaaaagttagccgggcatggtggcaggcgcctgtagtcccagctattcagaacactgaggcaggagaatggcgtgaacccgggaggcggagtttgcagtgagccgagatcgcgccactgcactccagcctgggcgacagagcaagactctgtctccaaaaaaaaaaaaaaaaattgtagatctagagatgtgttctaatgctaatatataatcaccaaaaataataaggttttgctcagttgtttaacttctgtcttagaagagaaacagaaaagtgatgctgaagaagatggtggcactgtcagtcaagaggaggaagacagaaaacctaaagcagaggtaaaggaaaggggtcacacattttgttttaccaagctgaaggtacatttatgtaaagggaatattttaatagggtagtttacagtggcttatggcagtaaaaattctgttaaagccaattttgttgaagtgggattctttgtgatacaggtcagtgttttgtttgataattttaagctacatattaatctcagaagtatctttttagctgaaaatcattttctgaaataagcagaaggttatagggggaaaataaaatgcttgctaagaaggaaacttcgggtcattaacagtctatttgcctctcctcactgtgccctgaaaagtatttcttatacaaatcactgtgttctaaactttttgtccccgttgtccatagatgggttcattcattcatttaactgacatttgttgagtgcccattttgtgccaggcattgtcagtgagtaagacagacaaagatactctgcctttagggagcttaaattctacttgggggaaacaggcaatgagcagtaaacattttaaggaagtaaacaacacagcgtattaggaagtaagaaacgatgaataattaaaacaggaaaagatactaaaagtgctagaggtaggcgggtcaccatgttaaaaccttactcgaaagatgacatcgaaccaaacacttgaaagaggtagagaacttttccatggggatgtaagtgggaagagcattccaggcacagagaacagccagtattgaggcctaaagtggttgtctacaaggccagtatggtgagtggacagagagagtggagaaaagaagggtggagaaggctccaggttagacaggctgttgtgtggacttggctttccctcctagtgaagcgggcagccatcacaggctactggacacaggtgtcacaggatgatgactgtgtctgctgtgtttcctatataccagggagaatcagggcgaccagttaggaggtccctgtaatcatctaggaaagatacggtggccccacaaagggtgacaggagaggaacagagggtatgagaactagttggagatctggatcttggttttgtggtagattggatatatagagtatgagagaaagggaacagtcactgtctgtatgtaccattgcttactaaagtcctttacccagcacctctgtgtctaaatctggtctctcccggaaagctctcctcaggttttactttcagctacaactctgccttcctattaataaagatcattgctatctgtatcttttgtatattttccatggatatgttctgtcttaactagaatgcaattcttaaaagtagagaccatgtttcccccaaactccctcacacgttaaaaagttgctggtgcatttaaaaaaagggaatattttcatagggtaatttacaatcttagcaacttgtgatagagtacagagcagcagccttggagtcagtctacttggatagccttccatcttcatgaatccttggtttcttatcctcagaatggggctagtgtgccataggccagtagattgtttgggattaagcaagattaagaaatcacagtgtctgatccttttttaagaaaatgtttatgggttagattgagaaaagtgtatgtttatagaaaacaataaagactaaactgaattagagtaggcataattccaccacctctgagacaaccattcttcttggtgcattttcttctcatcattttcctcatttttttcctcaaataagttaccctcagtctggctgatcttgaaaatatggtgaacttttattattttttaaatgtgctaattataatgaatttcttttcaatcaataggaggatgaaattttgaacagatcaccaagaaacagaaagccacgaagagagtgaaacaatcttaagagcttgatctgtgatttcttctccctcctcccctgcaagagtggtcctaggagaggacctggcacaccttaggttgacattcagaaaacttcaagacatcaccatcagcaggctccagttgaacactagtctgtgtaactttaaacatctagcagtaaatacttgcagttgtgatataaaggaccctgtttctgtagaaaagaaaacatttaacataatggttgtgaaatgtaacatgaagcaaactaacttttttttttttaacatctttgtttttaaaatagaatgatagaactttgccagtctttaagatcttggcttaatttaatgtattaatctgtttgtgcaaacataataccaccatttaaaaatgttagggagatgagttgcagtttttataatagattttttttaaagtttggtattgtaaaacattcacacctctgtccctcaaaattgataattacgtttaaagtgcagtcatttgtggttagaatcttgttttgtttgcttccattattgagttcctcctaaggaaattgaggagagggactgaatagaagcccaaattcatataaaagttgcgtttaagttgtattaaaaatagatatataagaaaaaattctttcacttgatgtttgttagaccagaaagtgtgtgtgttctgtagctcagttcccagacagctttttaggtagtggaggaggtggcttcatgtggcacttgggcatttatattccacttgggagggtcaggctgtggccttctggagcaggtggcttgttaaggaatgctagcagggcatggcacgtgagctccggaatagatgtcttcatcacttcttccactgtgtgttgacactgttttccttacctatttcctcagatccccagctttctcctctgctatgcattttcttcacagtgcagcttgcagtccgttgctgaaaatgattataagccctgcataatgttaagctttattgtgattacgtgtatgtttcttctttcttttaagcagacccatacctttccagggtcaaagtacagaatagaatacattgatacaaagtacagaaaaatactttgatttttatccatttcttttactctgtgtaaagacttgagaagtctaattcacaggcaaaccaatacagaattgactgcagttgaacagactagaagtatttgtgggaggagtgacatgaagcatgagttatctgattttttttgtagctgctatatattttaagccttcatttgcaattcatgtaacagttgtgtcataaattacacaataaagcagtcctgttcaaatttttttttaacgtggcttgtagaatttttaaaaaagtgatcttaggtttgttttttcatgcgggatgcagatgggtgctatcagagcctctcccacaccactatagtgtaataatgttattattactctacactgaaacgtattcagagttagatattattttagcttcagttgttctttagaggctttcaaatgtaccgatgatactgtttcttgcactgaatatataaacactccacagtgtttatattgggaagatattgggaaggaaatatatttgtaaaagatgaaggctgtatctatttttttttctttttaaagtttgttcacttaaattcttttgaggatgggatgtatttttcttgctgttcagtgctttttccttttcatctgttgttctgtggtcacagtgaccttagctacatagcagactttcccaaatgtattgattacaaataaacagttgttacttagcaagacctgaaaatatgtctgcaggtttctccttgaagcaaatgtgtgggatcattgcatttccagaaatctgcctccttcaccctccgttgacagtatatgtcatgcctcactttcttctagctgagctttaaatcat

SEQ ID NO: 10611 - DNA, 6000 bp, Homo sapiens
caaggccctgtctcaaaaaagaaaaaaattatttgcaactctactgggcaaaagtctacaagttaattatgcaaattcactaaatctggggtttttaagtaatggcaaacagtaatcaaagtacacttccataagtaatctgtggctgggccagtgcccacatgacactgaaaggacatgttacctacctttttgccttatttggaaatttaacataatttttttcttcaaaagttctcctcctgttaaagcaaacagtattatttgttccctaaaggtgcctggagagagtgtggatgaaacaggagaacccaccgtctgccggggacagcaggtttgaataaccaagagcaccctctttaagaaacgacctggttatttgtttttaatttgtaatggagacaaggtttcactgtgttgcccaggctggtctagaacttctgggctctcgaactcctggacacaaacaagacccttgtttcagcttctcaaagtgctgtgattacaggcgtgagccaccacgctcagctccccctagtttattattattattattaccacctgtttatgcaactcaaaccctgtcaaactgcgttttggctggctctctgaaaaggtgtaatataagggcaccaacccacttccctcctacaaatggtcgggactcagatgagcactgttttcacagggtctcctccataaccaatggtcgggactcagatgagcgctgttctcacggggtctcctccataaccaatgctcactctacctggcgtaagcccgcagctggagctccttattctacccacttctgtgtgtcaggagaaggtgctggctacttcttgcagtgaaggaattcctccgagctagggatgctccgtgctgatccctttgggcagcaccactcaagtcaccctcgaaaatggcttgccttggcgaggtcaggctgtttgggagtagagggtgtgtgtggctcctgcagcccccacaatctcaggagccaaagatgagcacctgtggctgtgagggcagcagtgggcctctcctatctcccagtgcctgtgcacgtctctatctgtgtgacaaagcacaatggggggcactgtgccagctgacaggcacaagaatgtcagtgtgagctccctggagaacggaacaggagaaaatgaaaatgcagtaaggaagctcaagggccatgttgtgggctgccggggaaggtggatgggggatcgtcagaaaaggaggaattcactacttgcgaggctggcatgactttgcttctatctccactggtagcccacgctgggcgtgagaatagcctttgccctggggatgaggattctcccattagcccctccagaattccctcagacgacctcatggtgagggctgctgtgcaccacggaagctatataatggggcatgttctccgctgtccaagtgatggctccatgctggcctggctagcccctagcctttcctaccccacacgtgccaatcacctccctccacgtgatggccgctgccatcacaggggctgcagcagggaggcctggctggggctgcatacttcacggagccagtaagagctctgccccttctgagatggggcgggagctccccgggtaccgctgcagtcacccaaactgtgactgcagacccaggcctcctgctgtacagatcaggcaggatcccaaccctcctgtgtgggtctacagccacccaaactgcagctgtggatccaagcctccctgagctcctgggtgggagccaggggcaggcaggatctgcccttctgcgtgcagctgcagccacccaacccacagctgcagacctcagcctcctgctccacggaggaggcaggagccaggacaagcaggagccctgccccttccgaattgatggggcaggagctccccgggtgcagcttcggccaccctcccaggagcaggaccccggcatctgtgcattctgcacctccagggcctgggaagaaccaccctgtacccagccccccaacccccatccctgcaggctcagggctgtctgcttcccactgcctggcctctctctgctcccactctcagagcggggttggggcctagccagggaccataaatggcagtgggaggcagacagagtccctggagggagaaggcgggtccccagtaaggccccgccttcaggccagggagggcctgaaggcctggctgccagtccctctgactggagtggggacttgtggtgtctccctctggctgcccatggaccaatcagcatgcacttcctcccctctgaggtgcataaaagcctgaggctcagccagagcagggcagaggatggagaaacgatgggatggccagctgcagagaggagctaccctctctgctgagagcttcagagacctgcagaggtgttcagaacaacttgcctgtggagaggagccactctctccagggacttctgtctgctgagagcagcaggtggcaggaggaccagtgggcagagaggagctaccctctcaagggccttctctgctgagagctgaacactcagtgggaggggaggacttacctacagagaggagctcactgcagatcacctctgagctgttctagcattcaataaagcttctctgcatcttcttcacccttcacttgtctgtgtacctcatgacctcattcttcctggaggcaggacaagaactcaggtgccacagaggtttctgggaagaaaattgacacccaaaaatcccacacaaggacagatgagggtccattctctccagtggcacctatagtccgccaggggttcagcacctaccttcattttggatctgagcctttatgcatttactgggtcttggaatgggaggttcggctggcagggacagccgctgtctacatctttcctactgcatgatgcgcctgatatgcaggcggtggtggcaggtggggtccccctcccacatcccaccagggctgtgtctaggagccacagaagtggactctgcccatttctctctctctttgcatttctgctgtgacaatctcacctctccccaggcagcatggaggaatccaacctaagggcaatgaaaagtttaggccatgttctcgttttcgagcagcccctctctacaagtgcaattttccttctctttcacttccctatgtggcatgcaagggcctctgcaatgtggtcccatccacttctgttcaaccttcccttccactagtgagccacacactggtctggctaacccctagccttttcctacctcccacatgctaatcacctccctccacgaagaatgtctgtcctcgcaggctctgtcctcccgggctgcccatggcttccctgatcctactgtttatgcagcatccatcttaagtataccctgtccttgagccctcctctgtctccccaggcccggggaactgcacccactgtttgagctcactgttcagccccttttgctgtcctagggacatctgttcacattaataagcctgggtgcccagtctcaccagcctgtctgagcacagacagtcacctccaggtccatgcctgaagcttgctggctcccgtctcccacccatgtagcgccctgtcacctgcagaggcccctctacaaacacaggcacttctgggagtccctggggtgtgctactgaggcagaaaatttaaaaatacatatgccttcattcactccaagaaaagtaacaggcaaggcaagggttaaaaagtaaaggacaagttttcctctgcctatagcaagcccactgcaaggacagttataacagtgtccagaaagccaaggccaaaggaatgggctccagatacccgccgccccacttccagagcaaggttgaaggaaaaagagagaaagacaaattcttttactgttactgttttcccaggcttcttaagcatgattgtgttttacaaatgtctgtacttagccagttcttgtttttctttcaatgcagctacaaagtcacccgctgtgcaaggccacaagttatgctatgctatagattatgtgacctatcatgattagctgcttttgttttatttattgtaagtccacttacaaaaaccccgctctgtctttgtttaatgctcagctttttggatgtgagtccactgagccggtgtgtacctaaaataaacaatcctcctgttcttcacatcggtctctccggtcctcagtttcccacaacactgcatgtgcttgagctgctcgtgcctcagctctggcctgttccctggaggggacgtcagtgtgggctgcagctgggtggctggtgcctcagtccgctaatgcccaagttgcaccatggcctacagtaagatggggtgggctgggctggggtagtgcttgctgcttcttttctgacctcttctccactagagaaatcccaatccagcaccctcctgcatttctaagttgcacgtgaacaggttttgcaggttgcctcacgacaatgcccccaggatttgttccttactgaccttgtcctgaggagaaggttatggtgggttaaaaattggtcatcagccccttcctcgtggttagttagtggagactgcagtctactctctttcactgttcggggactgctaccctgcctccttggagtccgagcttcactggcacaaagaccctgaacccagctggagcgttttctcctcactttgagcctctgcagctgtcgctctctacaaagctctcagatacctttcccctccttctgtgaccctggagagatattttacatgggaattcaagatttttctcagagacaggatgtgacgacttccttgttttgttctatccatcttggtttccatagccaagggcagagcaaacggcatatatcttagggtggaagatggataaataattctgtcacacgtgccctggcctctggagctcagctgccagtccacgtctagggaatcttagcatctgggaccaagacactttacagcaatcatcaccctttgcagaggaggtgagctcaccaggactcatctgccatttcagaccttttgctgctacctgccaggtaagtggctcattctcaacagctgcctacacctccatctttcagaaacggcaatcagaaaatgaaggtgggaggctttgggaaggcgtacaattagtggcaccattttattatccgagcttggccgcagcatgggatgtttcgagtgtggccaagaggagatgtccacgcccgtttaggtgggccgcatctcaggaggcaggatcctgatacatcccattgcccccaccagacgaaaaagatttcaagcctcattgcggttcccttcttggggcagtccatcttccttagagactaagagggtggaaatcctcttgtggacctatcgaaatcaaaccagcgcaggcagtgagcactagctggggtctgccggggggaagggcattgcagggggtgtcggggaggcccgtgggagagggccaaggccccactgacacctgcggacttgcagcttggggagtggaggacaggagacaggcaaaattcaccagttacacagcttacagaagtagcaaagcaaagactatacttcagggataatttctgtactttgttactagagaagttttccactctgggaccccacagtctccgcagacatatgcagagcaaaaaatacttcctgtgtttgggagagcaagagacatggcatttattaataacatggattttcctgccaggtttcataacgtggtcatttaagtgtgaaatgtagtcttaaaattatgttagagaatccccaaggttttgctctgcccccatggaaacactgggatcgctcaggacgccaacagctgcatagcaggcgagggactcctgtgggaggacgtggcctgtggacactgccaggttcggagatgtccttgggagatttactatttgtcaggaagatagtgttaagttcaggcaaataattatatgtgtg

SEQ ID NO: 10612 - DNA, 6000 bp, Homo sapiens
gcggtggttcacacctgtaatcccagcactttgggaggccaaggcggacggattacctgagatcaggagttcgagaccatcctggccagcatggcgaaaccccatctctattaaaagtacaaaaattagttgagcatcgtggtgtgtacatgtaatcctaactactagggagcctaaggcaggagaattgtttgaacccttgagacggaggttgcagtgagccatgatcgtgccactgcactccagcctgggtgacaaagcaagactctgtctcaaaaaaaaaaaaaaaaaaaattaagaattttaataaaacgttagaactaaattttgtgaaatgatcattttgctaatattttatcaaaaacaatgatttgtacccttcttagtaaagcagctggtattttaaaatatgtctcgagaaaaaagccaatacagtctcttttgaggaccttgaaaactaacctgctagggatatcatactaggcctctgggtgccgctgtccgccaatccgtggctggagggaaacaaagcaatccactgacgcagcagtccccgcaggcttttgagacacacattaggagaggactctgcccgctgtctgtctcacaatctgctcgaaatatcttggtcaggaatctcaggatgtctagtgaccccgagtgaggtgctgccttttattcctgagcatctttggaagcaggaagcagggagcaacggtagcgagaggtattcggatctgagtatcagcaggaagaagaaacagaggaagaagtcccccataaggaaggcgtgaggagcgcaggaagcgctgtttccctgcctgagatctttattctactaggtctttattctacgtagccgatacgctgtaaaattctggaagagaaggctaggggtttaaggttggtaatctctcagaagatctgcgtctcggtgacggaaagaactaagggtaagtgctgagaagcctctctttacagccagagaacgagccagagccgagcttgagaatgacgggatagatctagcagttatgcccaaggaagaccctcggccctttgaatttgaaggcactgaaaatcgtataaatgttttcatataaacgtatgcatctttgatataaataacaaaatggcttttagcacaaattttgttttggaaattttgaaaaacgtcttaataagaggaatgtttactcttaagtctgcagtagattttgaacaccggcagtaactgtacaaatatatcagattagttttaatagccatctccccttcccctacaagtaaaggagagtactacagcagtatgtactctgaattgctgctattgaagaacccctgagcctgtgcagcgtggcactcctgtggtccccattactcaggaggctgaggcaggaggattgcttgatgccagctagaggctgcagtgcactatgagaacacctgtgaatagccactgcattccagcctgagtaacatggccagaccccatctcttaagaaaagaaaagaaaccctgaaccagaggagcagagctgccaccacttagtggtggggatggggcagaacagctcagggcaagacacaggccttggatgccaatgccagccgtcagatattgagcaatgtgtaagtggggttagcctgcaggagaacctgctcgccacctcctcctcttcattctttaggtgatccccattgacctagacaatatctttaatatagagttctcctgatttttctacacaattttacagggcatacagaatatatttcctgtccaataatgacagaaatacttgattttgaagagtaacagttatagcttggaatagaagactggaggcagtttgagggccgacttcagagtcctggttgaaatgaaggttgagaagtataatgcagtcagtgcaggtgactttcagctgggtatctagtcctatcagaggtaaaaactgtggttgccctaaccaaaacaataggactaagagaccttaaatgaaagatgaaagttattatagagagaaatgatcatactggcaaacaattcacctccaagaattatgatgtgactctttgtcagatactcacagatggaattctaaactggtagcagaccctgaaggacaatgtcaccatcagaaccaccaacaaggacaaactgtccctctcctgcatcaccctgcataccatctgcatccacaaaaatgctcattcttcaacaagcctcctatttcttttgggtgactgggaacactgcccagcacctccatcacatgctttagcgcttcccaccctaacttagggtcccatatgcctcctgtttcttcttgaccagtgacctgccactgtgggcactgtcattctacatgtcagtgagtgcagagtgctatggttaccatgcagactatctttgagctgactctgcaggccagtgaccagggttcaacttgctcagtgtcatcctgaacctgcatgtgatggtggatgaccattgcaaaaatgcaaggacactatgccaggagttgcagccaagtggggccctctttgatgctgcaccactcacaatgcaacccagctatcccatcaccaaagtggacaccagctggggcataaaggctgactgtcctatcatgtgcttcaggccagctaatgtggctcttcaaactagggatgtgcacgagctagatgcgtgccgtgtcactgtgggtaacagagatgcaacctgccaaggtttgttggtcaccgtggtcaatggtgaatcatcacgctgaaacatcacctggttgctgctcatagtttgcaggagttgctaccagacctcagcaatcgcccagcacccaacagcaggcagcagacagcacccaacagctggcgatggccgttgccttgatctccatgctgtttctcctcagtgtgactctggccatctctctgaacctgcaatgccccctatagctccattgcctggggctgttttcagctggatctctggtccaagcccggatatggagttgtctccaacttaaagaaaggaaatttgccctgttcctacaacgtatgtgtggttttagatatttttaaaatcttaatttctttaactcaagaaacagctttgaaccaggtattctctgcagtgccagcaatgaagctttgttttatttttgtttttgtagaaacggggttcactatattgaccaagctggtctcaaactcctggcctcaagtaatctgcccaccttggcctcccaaagtgctgggattgcaggcgtgagccactgtgtgtgggcagcaatgaagctttaaatgttgcatttgattcaaatgtatttgtgtgatattttaacatttttattttatacttaccatccttttataaatcactcctgcgtgtttttggttgctgaaagtagggagctctacaggtttacttactagttcttatgtatattttaatttacctcattagctcacaatttctttggggaaaagtttatgcctattaatgtgtattctgaaaagttacattctctgttaaagagttacttccttgcaatattgaagatgatttattgcacctttaaatttctactctttggctccatgtacttgtctttgagaagctgagaaactgtagatttggttaagaactaaagttctctttccaaaaactattattgagacctttcattgttttctttctttcctcatttttaacttttctcagtcatggtgtccatgggttggctggccgaatttgttcctgaaattatcagactctggagtacagatagcatgcttctctaactttggggtaaagataagtaagtcactctaagcctgagacattttaattagtaaccctttgctaatagtgcagtgattaaaaaaaaaagaaggccacatcctcaactggttaaaaaatactgttaagagaaaaccaacttctcttggagaaaatattaagtgcgattatagaggaatacatattataagagcctatctaaaaataaagatgagaccatttttcttttcagctgtgaagaataatatcatagactttgtctctgaaatttgaaatctaaattatatattcatgtgacttttcaatgaaattccaagagcccagttttatttttttcaaaatatattgcctttggtgaatcttaagaattttttaaaaacccacataatgcaaagacacttcaaaaaaaaaaaagaggaaaaataaggatagggttaaaccatgctcttcaaaatcccaaggtttctgataaatattcaaatcataatgggaaggaaatgggatggtatgatttttttaaagtctagcttatattctaaaagattatttttccctctaatacttttcaccctccagtcaaaggggagctgctctatgtggcctgggaaattaccaagtggtcaaactttactacagaaaaagtggagagatgattttgtcctcattgtaatgttaggtttttactataattccctgaatagcaaacttggaaagcagataacatgggaatacttggattctcctgtatatttcaatttggtgacatttaggcacatttaaagaagtgaacatatagtttctctttttcatacatatattgtagaattatttccttgacaatagactaaaacttaagaaaataacaagttaatgagaaggttttcagtatttgctaggaatgcagtaactggttaggactgtgggcgccgctgttcactaatctggtagatacaggcagtacacacaggtcaggaggaggaaaaaaaaaaaaaagaaaaagaaaaaagctctcgtgcctcttagaacctccataaccgccagattgaaaactgactgtccaagactgcctaaatcctacttctggatgactctccagtcagaattctcctgaaaattgggttaatttcagctcagaaaagcagaaacgatacccttggtactggactggaagaaaactacgaagtgagagagccatgaagattcagaaaaagctgactggctgcagcaggctgatgcttctgtgtctttctctggagctgctgttggaagctggggctgggaatattcactactcagtgccggaagagacagacaaaggttccttcgtaggcaacatcgccaaggacctagggctgcaaccccaggagctggcagatggcggagtccgcatcgtctccagaggtaggatgccgcttttcgctctgaatcctagaagtggcagcttgatcaccgcgcgcaggatagaccgggaggagctctgcgctcagagcatgccgtgtctcgtgagttttaatatccttgttgaggataaaatgaagctttttcctgttgaagtagaaataattgatattaatgacaacactccccaattccagttagaggaactggagtttaaaatgaatgaaataacgactccaggtaccagagtctcattgccttttgggcaagaccttgatgtgggtatgaactcactccagagctaccaactcagctctaaccctcatttctccctggatgtgcaacagggagccgatgggcctcaacatccagagatggtgctgcagagtcccttagacagagaagaagaagctgtccaccacctcatcctcacagcttctgatgggggtgaaccagtccgttcagggaccctcagaatttacattcaggtggtggatgcaaatgacaatcctccagcatttactcaggcacaataccatataaatgtccccgaaaacgtgccgctgggtactcagctgctcatggtaaatgccactgaccctgatgagggagccaatggggaagtaacgtactcctttcacaatgtagaccacagagtggcccaaatatttcgtttagattcttacacaggagaaatatcaaataaagaaccactagatttcgaagaatacaaaatgtattcaatggaagttcaagcccaggatggtgcggggctcatggctaaagttaaggtac

SEQ ID NO: 10613 - DNA, 6000 bp, Homo sapiens
gtaaaataagtgcagaggtaggaagcagtgcttcagtgcagcagatctcagtgactttgtgttttgaggctatgtattatccccctgataactttgaagatgaatgttgtatttcataaccagtaaaataattgtgtaatgaggagaggagtaggctactgcctgtgatcatcgaaatgagaatcacataatattcctgtaatgaaatcactgaaactattgggaagggggtgtatttgaagataagtataaattgcaccttctaaaaggcaattttggtattactgatactctccggaaaaagttgaaataaatcaacttggaggtacttagaaaagtggagaaaatgttaggaacaatgaaagaaagataaaatgtatccagtatatttctaatgagtaagtatggaaaattactgtactctgagacggtttaggccaagtctgtgttatggctatctttatatagatagtgcatgtttgaagattggggaaagcttatgtcaataaatgtttatgtacttaatctacatgatttgcctaaaaatcctcaaagttgggatgaaggcattcctaagagtacatttttagacgtcattaaatatacagacgtatccacgtagtttttgttctttcagttaggcacacaattataattattgcactggttaacttgaagcagcagaggctgtagtttcctagtgctgactctgggcgccgctgttggccaaagtggagagcttggcgctccagatctcctcgcgcagccgcagcgcgctttccagggcagccccagctcagactccccagcgccagcctttacaccgcttcctcctcggaaaaagaagaattttttcttgaactggaactgcaactaaagtccgttcggagatccaaaaatctgcaatacagaggttatttgtaacccggcgtctccaggctggtgagcaagctgaggagagcaagagggatggggagcggcgccggggagctgggccgggctgagaggctgccagtgctctttctcttcctgctgtctttgttctgcccggcgctctgtgagcagatccgctacaggattcccgaggaaatgcccaagggctccgtagtggggaacctcgccacggacctggggttcagcgtccaggagttaccgactcgaaaactgcgcgtcagttcggagaagccttacttcaccgtgagcgcagagagcggggagttgcttgtgagcagcaggctagacagggaggagatatgcgggaagaagccagcttgtgctctggaatttgaggctgttgctgaaaatccactgaacttttatcacgtgaatgtggagatcgaggacattaatgaccacacgccaaaattcacgcaaaattcctttgagctgcaaataagtgagtctgcacagcctggcacacgatttatattaggatctgcccatgatgcggatattggtagcaacacactgcagaattaccaactcagtcccagtgatcatttctcactgataaataaagagaaatcagatggcagtaaataccctgagatggtattgaagacacctttggacagagaaaagcagaaatcctaccacttgactttgactgccttggactttggagctccacccctaagcagcactgcacagatacacgttctagtgactgatgccaatgataatgctccagtgttcagtcaagacgtatacagggtgagcctttcagaaaacgtgtacccggggaccacggtgctacaggtgactgccacggaccaggatgagggtgtcaatgccgagattactttctctttcagtgaagctagccagatcacccaatttgacctgaactctaacaccggggaaattactgttttaaatacattagattttgaagaagtcaaagaatattccatagttttggaagcaagggacggtggaggaatgattgcgcaatgcacagtggaggtagaagtcatagatgaaaatgacaacgccccagaagtgatattccagtctctacccaacctaattatggaggacgccgagctgggaacacatattgctttgctcaaagtccgtgacaaggattccagacacaatggagaagtgacttgtaaattggaaggtgatgttccatttaaaatattaacttcttcaagaaacacgtataaattagtgacagatgctgttctagaccgcgagcagaatccagagtacaatataaccgttacggcaacagatcggggcaagcctcccctctcctccagttccagcatcaccctgcacattggtgatgtaaatgacaacgctccggttttctcacagtcttcctatatagtccacgtggccgagaacaacccgcctggagcctctatttcacaagtcagggcttctgatccggacttggggcccaacggccaagtctcttactgcatcatggccagtgacctggagcagcgggagctgtcatcctacgtgtccataagcgcggagagcggggtggtgttcgcgcagcgcgccttcgaccacgagcagctgcgcgccttcgaactcacactgcaggcccgcgaccagggctcgccagcgctcagcgcgaacgtgagcctgcgcgtgttagtggacgaccgcaacgacaatgcgccacgggtgctgtaccccgcgctgggtcccgacggctctgcgctcttcgatatggtgccgcacgctgcagagcctggctacttggtgaccaaggtagtggcggtggacgcagactcaggacacaacgcctggctgtcctaccacgtgctgcaggctagcgagcccgggctcttcagcctggggctgcgcacgggcgaagtgcgcacagcgcgtgccttaggcgacagggacgccgtccgccagcgccttctggtcgccgtgcgtgacggtggacagccaccactctcggccactgccacgttgcacctggtcttcgccgacagcttgcaggaggtgctgccggatatcactgaccgccccgacccctctgacctccaggctgagctgcagttttacctagtggtggccttggccttgatctcagtgctcttcctcgtggccatgattctggccattgccttgcgcctgcgacgctcctccagccccgcctcctggagctgcttccagcctggtctctgtgttaaatccgaatccgtggttccccccaactacagcgaggggactttgccttattcctacaatctatgtgttgcacatacaggaaagacggagtttaatttcctaaaatgtagtgagcagttgagttcaggacaagacatactttgcggtgattcatctggggccttatttccactttgtaattccagtgaattgacttcccatcaggtgagtttcctttaagtataatttaatgctcattgcctacccatttctccatattcacaagaaaatatacatatttgcaggaaaatatataatttttagatgtcatggatcattttaggaaagttgtagtcagttaaaaagctgtcatatcattctacaaaggaggagtaaagtaggagcaattgtgtggcccaacatttgtttgttttttagccaagcttagatttataaagcaatgagggtgtggttttaaccacaaagtgaaagtgttagacagttgttggctctctcctaaaaagtgaatgagatttttcctatacattttccttcttgttgactaatatatgatgaatacttttttcagcttggatataccataaatataaaaataataaagccaaagaatttaagctaaaattcaacacttttcttaactaatttaactggtatggtctccatagtagtccactgttttgtttcctgtgttaacttcccttttgtttcaaaagctcttagaataaggagtcaactggatttttatgtccatggaccccttgtgattatatgcagtgtacgctgtgtgtgcgtgtgtgtgtgtgtgtgtgtgagagagatccttttacttagaaaaaggtctactatgctcattagaagatcaaaagcagattctccttacttgtaacataggagtttcaggattaatctgtattcaagctcattctatatccttcatcaaagaaaagacaatgttttgtgtctgttgtccctctcacacacagccctaatatataatgtgtaactgccttatctgcagccctaaactaatatagctagaggtcttctaatcattctcctacctctaggaaagaaatatagtcttgaaaactgccaatctggtgtgcatacaaaatatatacaaaataccaaggaacattatatgagccttttgctaggtatatctaagcaactgcttcagttaatggccactttacaaattgctgaaagaaggaaacgtctttcgattcttttttttttctttttttttttttgagacagagtctctgtctgttactcaggctgtagtgcagtggcacaatgatagctccctccagcctcaaactcctgggctcaagcattccttctgcatcagcctcctgactagctggaactcaggctcatgccaccagacctggctaatttttctgttttcagtagagaaaatattttctttcactaatttaactggtatggtttccattgtctacccagttttccatatgcataagaaaatatattcacaggaaaatataaagttttcagatttcatgagtggttttaagaaagttttagtcagtgaaaaaactatcataccagtcttcaaaggaagggtgaaataagttcatctgctacgttgcccaggctggtcttgaagggaaacagacttttttgtagtcatacttatcctttggcttcttagtaagtattatatagtcattactttttgcagttttttagatcaaagtgttaatgtaggtaaagttaattttagaatatatgtaaaagtcaagtctgctttaaatttaatcatctctttggtgaaagggatgggatggagctttgctttttatcatatattcatctgtacctttcaagtattcaaatagaaaaatataaacaatgtaaataaaatagcaaaacaatgtaatatctcataaaactgcaatggtaaaagcatttatcctattgaaattccacaatttttatttgaaaatattatcgacatgtaattcaagtggcatttagaagaataatttaaaagcaacaactctatagaaagcttgtaaaatgattaagtagtttaaaccaaataaaacaatttctgagtcagtcatctccagtaggtctattttagtctcaagataaattcatttctggtgacaactgaagttcttagttatttgttagtatatattggagacatttacaataaagcttagagcacaatgggaaatgaaagtatcatgttttttttaagaccaaatgtattgcagaaatgtgagtaatttaatccgatgctacaatctgatcattctgatctaatctgatcatttaataacactaaataaaaccttcatctcacattctttggctgtttcttttaaaatatgggtttacggataaatcaaataaattcaaaacaaagtaataagcaaatgatttttttttctcagtaatctagtagagtattacatttagaagtaatctgtatctcagtgcagtaactatttaggactgtaagcgccgctgttcacctactggaagacaaatgcaaccgaaaacactcagatctcacacctcacgaagacccgcagatgccacaaactaactgctggactgcagcgaaacccgacccctgtttggaggcactccaggtttccggaggattgtcatctccatagctgcggcaagaaactaaataagacccatttatgcacagtgaagattctgagaggattctgcagcaaaacaacaatggccgctccacagagtcgccccagacgcggcgagctgatcctgctgtgcgcgctgctgggaacgctgtgggaaatcgggaggggacagattcgctactct

SEQ ID NO: 10614 - DNA, 6000 bp, Homo sapiens
tactattaatgggcacagtattaacggatctcattgtggtgttaccagggccaaatgcaagtccctcagcacaggattggcagagagtaagggcacaatatattattatctttgctgacccaaacccgttttttactgggtagaaagcagaattagaataatgcctattaataaagactagcttctggagcagcaaatcctgggcttataaggaggctggcagaggatcaaggcattgccctatatcatgaactgatagccctgccctccagcatgtctggaggactggtgggtagagaaccaggtgaaatcacaagaagcactgtcatcacacctgggcacatactaaacaaactttaggggcctcctgtcaatgaatcctctcaatagctctgcaaggcaggtctgatttctcacactcgacagatgagagaaccgagaaggcacttgccccagggtcctcagttttgagctgccaagctgaggttctaacctggctcaactcctaagtttatgctctttctactatagggaccatggctgcctttggatccagcctcggcttctctattacctgagcaggatgagaggctgtcctcttcctcgagctctgctttattcttccagatcagggttgccagataaaatacaggatgcccagttacagttgaatgtcagataaacagcaagtactatttcagcataagtcagtctcaaatgttgcatgagacataatgtactaaaaaaaaaaatgctcattgtttacctgaaattcaaatttaactgggagccctgtacttttatttactaaatctggcaactctaccccagatgtctgtgaggttaagtggggccaggcctacagctgacggaaggacagagagagaggtggcagggactgctggcctcctgaggcagagctgtcccaggtctggtggggctatgattccagagaggccagagactgagtatgaaagtggcaggcggctgggtctgaggagatgccaagttggcctcttgagggaaataaacaggtatatttagctgttgtggccttgcgccctgaggccaggaagcagctttttagcctaaatccagatgttaaaaacagaaatgaaatcagtatttatggccccaaaccctccaagcaagtcatgcagctcgttcccctgtcaaggcctcccacctttggcccacacagggcctgaccctcgtctaagcctgcgccctggggaacggaccctgggggtggaggtggtgggtcaggccctgctctcactttcacacccgcttcctagccctgaaaccagagaggttcctgaagtccagcccagccaggcctgtggggctgctgagaggggttaagtaagagggagagtaaaaaccgacacttgggaggaggcttttaaaataaacatctgcggggagggatgctctcaaggaggctgcggtttgcagctcagccagctgtgttccagctaatcagcctccttgggctactctggagttgctgccttggccctgggatggggtaggttaagaggacagagggaggtcagggagctgggggctgagtttccctgagtagaggctggcacaggagagaaggcatcacccccacctcgtccaggccagaagatgtccagcttcttgaggctctcctaagtctgcctctcctgggaccaagagaaaatcccggtccttgaccaaggtgggccttggggggagtggggtgtagagggaggggcactggagaactgactctacagaaagtcaaagctggcaatccaacttcttcccctcagatttatagatgggaaaacaggcttgagccacgcagagacttgaccaagctcacacagttccttagtggcagagcagagcaaatattctctttcttttacattctggatttccatatcttctctccctcctggtccagcccaacctcagggcaccccccacgaggtgggcgggggatggctttgtcacttgcacccactcggggtgctactcagagatcttgggtgcacataggacgtgggtgggccgagcttctagctactccgtcaggcccttcctgtcattctgtctctgcctcccttctccctgcttctccgtgttcctcctcattcttttctgtgtgcagggagactacaccccccaccccgctctttctctggcgcctctgaggtcccccctctagcccctaaatcactctggaatcctggctctttgaagccagatctgggcccccctcccctaccccttccattcccaggctgggaaaggctgaagaggctgacggctggaggggagggggcggggcggtggcggatctggcttccttttggagttaattagggaaaacagagaaatgtcagcggaatgaaagggctgggggtgggggccagctggggtaggagaggaggaagtgggcagctgctccctcccactcaacccctctcccccgcccccagaaagctctcagctccggggatttgcgacatgaaatgggggctgtagaaacctgagcgctggtgcgtgaagagaaaaaccgaggcgcatcccggctctcccctcccgtgtgccctcctcctcttatgccggcttgaaaatatttcctgtctctctatttctcaatccctggttgatgtcccaggattactcagcctctccggctttagtcactctcgctacccgctcccagggtccagggtggaggcagagggaggctgggagagaagctctactgccagctgggcctgggctggcctgggcatccctgaggttttaactgtctcctaaccacagaggatctcagggcctccagcagcgagccccaatgagtcaaactcttgtttcctcctctcccacccccgacccagtcagggcaggtgaggggtagaggtgatggcatgctggatgtgacggtgttgatgatgtattgcacaggatgaagcaccatctcatttagtcctcacagcagccttcacagtgcgtacaaatcagctggcaattccgagaggctgcattctaaacaagttcctgggtgatgctgagccagggccagagtgtggacttctctgggccccagtttcttcttctgtacagtgggacgttggactggaggtgctgtctgatgtcacctagctgtggcactctgagcctgtgcctaaagtgtccctgagatgtctagtccccgagatcatcatctcctcagcttcatagagccgagctcttctccatcttctctctacctcccattcactcagaacagggataaggtccaagctgctggtggtgatggtgactgactgtcccttccagcatgcgcttaggtacacttgggcctgaatgcccctctaacaaatgctaccgggtatggccttggtccttctaacacttggttccctcatctgtaaaatgagggtcataccacatagctggctgggctgttatgtagaggttaaaagtgattgtgcatgtgaagcatccagcagagtgcctggcacacagtaggtgctcaaatgctgttttgaaatacaaaaattagctgggctagtggtgtgcacctgtaatctcagctactcaggaggttgaggcaggagaatcacttgagcccaggaggcagaggttgcagtgagccgggatcgcgccactgcactccaggctgggcgacagagcaggactccatcttaaaaaaaaaaaaaaaaaaatgctgttttgaaatggaggcttggaagagcactcttcacccccaccccacacacttactaacggaactaccgaatctctactcgtgccaggccttgcttggcaaaggctaggggcatgtaaagccatggtttcatggctgctgccctccaggagcccatggtctagtgtgggagtcagaggctcccttgagaaagccagggcaaggaactgagagcccgtgtcacagccctgagagaaataccagcgaatgtgttttgagcacttacatctaccaggcactattttacgtacctgacatacattttcttatttagcattcactaaaaccagaagaggtggttaccattatcatccccattttgcagatgagaaaactgaagtggcataaggaggttaggtagacttgcccaggatcacagtgagtaaggaaaggagctaggaatcaaacctagactttctcactccagagcctcttaacctctaccctcaactcttgtgaagagagactaccttggtgacccctatattcccagtgctcagcgtggtcaaggcccagggtgctgtataggcattcattaactgctggggatataagacagtgactgttgaggaccctaagtttagctcccacctgatcttcctctgtctctgcagaagctgctgatgggagctccaccctgggagggggtgccggcaccatgggattgagcgcccgctacggaccccagttcaccctgcagcacgtgcccgactaccgccagaatgtctacatcccaggcagcaatgccacactgaccaacgcagctggcaagcgggatggcaaggccccagcaggtggcaatggcaacaagaagaagtcgggcaagaaggagaagaagtaacatggaggccaggccaagagccacagggcggcctctccccaaccagcccagcttctccttacctgcacccaggcctcagagtttcagggctaacccccagaatactggtaggggccaaggccatgctccccttgggaaacagaaacaagtgcccagtcagcacctaccccttcccccccagggggttgaatatgcaaaagcagttccgctgggaacccccatccaatcaactgctgtacccatgggggtagtggggttactgtagacaccaagaaccatttgccacaccccgtttagttacagctgaactcctccatcttccaaatcaatcaggcccatccatcccatgcctccctcctccccaccccactccaacagttcctctttcccgagtaaggtggttggggtgttgaagtaccaagtaacctacaagcctcctagttctgaaaagttggaagggcatcatgacctcttggcctctcctttgattctcaatcttcccccaaagcatggtttggtgccagccccttcacctccttccagagcccaagatcaatgctcaagttttggaggacatgatcaccatccccatggtactgatgcttgctggatttagggagggcattttgctaccaagcctcttcccaacgccctggggaccagtcttctgttttgtttttcattgtttgacgtttccactgcatgccttgacttcccccacctcctcctcaaacaagagactccactgcatgttccaagacagtatggggtggtaagataaggaagggaagtgtgtggatgtggatggtgggggcatggacaaagcttgacacatcaagttatcaaggccttggaggaggctctgtatgtcctcaggggactgacaacatcctccagattccagccataaaccaataactaggctggacccttcccactacataatagggctcagcccaggcagccagctttgggctgagctaacaggaccaatggattaaactggcatttcagtccaaggaagctcgaagcaggtttaggaccaggtccccttgagaggtcagaggggcctctgtgggtgctgggtactccagaggtgccactggtggaagggtcagcggagccccagcaggaagggtgggccagccaggccattcttagtccctgggttggggaggcagggagctagggcagggaccaaatgaacagaaagtctcagcccaggatggggcttcttcaacagggcccctgccctcctgaagcctcagtccttcaccttgccaggtgccgtttctcttccgtgaaggccactgcccaggtccccagtgcgccccctagtggccatagcctggttaaagttccccagtgcctccttgtgcatagaccttcttctcccacc

SEQ ID NO: 10615 - DNA, 6000 bp, Homo sapiens
tttgggggtgatgagagttttctaaaactggattgtggggttggttgcattactgtataaatttattaaaaatccctgcatcgtataggggcactatattgtatgtagaaagctgtgaaaagattttaaaaatgattgacatgtctgtggttatatcaatgagtactattattattcccattttatacataaagaaaataaaagagaagttaaaaataaaagtttcatggttacatagctactaggtgtaatatccagtattggaatttgaatctttttgacactaagaccttactctcgatcatataatacattcactttctattttaaagttatattatagccgggcacagtggctcacacctgtaatcccagcactttgggaagccgaggcaggcagatcacgaggttgggagatcgagaccatcctggctaacacggtgaaaccccgtctccactaaaaatagaaaaaattagccaggcgtggtggcacgcacctgtatcccagctactagggaggctgaggcaggagaatcgcttgaacccagaaggcagagcttgcagtgagacgagatcgtgccactgcactccagcctgggtgacagagtgagacaccatctcaagaaaaaaaaaattatattataaatgctgcatctcattggtcagaagctctcttgaaattataaaacaaagaagaaaaaagataaagactgggaaattgtgttgaatcagtatataaatcctgtatactggtccttccatttcccctagaaataagtgatacaggccaggcgctgtggctcacacctgtaatcccagcactttgggaggcggaggctggcagatcacctgaggttgggagttcaagatcagcctgaccaacatggagaaacccccgtctctactaaaaatagaaaattagctgggcatggtggcacatgcctgtattcccagctactcgggaggctgaggcaggagaattgcttgaacccaagaggaggaggttgtggtgagccaagattatgccattgcactccagcctggggaacaagagtgaaactcaaaaaaaaaaaaaaaaagaaagaaaaagaaaaagaaagaaggaaggaaggaaggaaagaaagaaagaagtgatacaacaagttacagcatctttgtttattatccactgtgagttgtattaccacactttacttggctctttggcaaactatattatctcttcagatcactagggctaggaaggcccactggtaacttgaaggagtaaatgtatcttctaaaaaatgcttacttccagggagattggatccacacaagtgaatacatatatagtccttagtgtatgctatgattattttactatgtcagtagcataaagattgctatattaataagcattaagtgcctgctgtgctagacagtgaggatgcaagtggccaccaaaatagcatggtccctgccctcctggagcttctttttttcttcttcagtgggggaagcagatactttgcttatgcaaaaataattataaaatttaaagttgtgccaagttcaatggaaaaaatataaggtgttctgagagagcataacaaaggatcctggttttaactggggcctaatggaagacctctattaggaaataacatttaaactaagaccagacagacctgtagaaattagcaaagcaaagggagggaggaaaaagcagctttcctggcaaaggaacaatttgtgtgaaggccctgagacagggaagggctggggttctgaccaccctccaagtggtgcaatggaatatagtgagagagggagaagacatgagaacttggatactatgcaaaggatttggtattttaattcaagagcagtatgatgctactgaggagcagctggacaattgtgtgatccaattaaaattttaggaagatgaacctcgctattgtggagaatgcatacacaagggttctgttggttcatgaagaggtcttaagaaaactatgagctgggtgcagtagctcaggcctgtagtcccatctacttagaagtctgaggcgggaggatcccttgagcccaaggagctggaagttacagtgagctatgattattccactgtactccagcctggatgacagagcgagatcctgcctcagaaacaaaaaccaaaaaacaaacaacaacaaaaacaacaacaacgaaaatctcagaaaactacaggccttattatcaagaaaatgacaggccttattattgagaaaactacttacatttttaaaagctgattttcaaaaaccagattgtgaattaagtgatgctgaataggggaaaaaaagactgataaaccagtgtatctctgaataacccactagatcagtgcttgtcaaactttaatgtgttttcaaatcaccctgatgttttgttaaaatgtaagtcatgtctcagtaggtctagaggagggcatttctgcatttctaacaagctccccggtgatgcctagaccattggtcctcacactttgagtagcaagtgattgggctatactctttattctaaattctaaatgtattctatcttctaatgcctatcagccctcttgctggtctggctaattatcaaacttgagcatttaaaactgggggttttcagagattaattgaagtgttaaagacatggaaatataggtcacatatggcttttcatctcttccggaaatatcctatatatccttacttcttttctacctacctaacctatgtgcctaccccttcacttatgttcaaggttctattatacttcaaaaggactctatgcaatcaaagtgatgtccaagacaaatatacagaaatagtatgaggctctaacactttacatctaatggagtggtttgcatcattaattgaggcttactctgtgccaggcactttacctgccttcttcatttaataggataggagcaggaactcttagaggttcatttcttgttcaaggatatacatctcatctctggcttatatcacagtggactcttttattcactatcctaatcattataattttgtttggtgacaacaattctaaatgcagaaaagttaaggctctttattctgtgactaaaggctttgtattttctaaagatttgtggagctttgctgccattatttcaataattttataaagatcctaggtggtaaataggcctggctttttttctttttgaaatcttctccgtcttcttcttcattagcagtgcaacttcttgtggcatatggtacccaagatcttgggaaaaggattgatcaagtaaagggaaacgatagagagagtgtgctctacaactgagatcatgctccttgtgaaagacagggtagggaaatttcttattgctccctggttcttaagaaatgagagctaacaatgacatccagttttaaaagaaataaaatctgaattgtacttttaaattttataagccagagttaaaccaatagattgtaactcctgctaatttgatagtagctccagataatgaggaagtgacagggaatgctaatttcatttggtaagagataaaactgaaattattaatgtctccacggaaatgctaaatgcctccttacaagtagggtccggctaattgtctgtcttccaacaagccagatttgttggtgtttttccagacaatgttgtgtagttttcggtttggttcgatcccctttcttgtgatcaaagaaagtgattcaaatgtttaatgagtcttgatttggattggagacttgcagaacggctagcctcacagccccaaggctggctttccctaaggtaggtttcctatgcaccgatactggcaaggcgctttggctggaaactctggaaggaagccaaaggaaagtgaagttcctggcgctagcgcgtgtcctgctcagagagcccggcgctagctcattcttcgtgcagttattggctgggactctgtgtgccgctgtcggccaatgaagacgctggagatcgggcccctgcccgtcccctttctgcgccccgggatgaggcagagactgaacagccggcgagcaaatcaacggcatccagaaagccatgtcggactcggcgcccagcgcccaagcgctaacccgctgaaagtttctcagcgaaatctcagggacgatctggaccccgctgagaggaactgcttttgagtgagatggtcccagaggcctggaggagcggactggtaagcaccgggagggtagtgggagttttgcttctgcttggtgccttgaacaaggcttccacggtcattcactatgagatcccggaggaaagagagaagggtttcgctgtgggcaacgtggtcgcgaaccttggtttggatctcggtagcctctcagcccgcaggttccgggtggtgtctggagctagccgaagattctttgaggtgaaccgggagaccggagagatgtttgtgaacgaccgtctggatcgagaggagctgtgtgggacactgccctcttgcactgtaactctggagttggtagtggagaacccgctggagctgttcagcgtggaagtggtgatccaggacatcaacgacaacaatcctgctttccctacccaggaaatgaaattggagattagcgaggccgtggctccggggacgcgctttccgctcgagagcgcgcacgatcccgatgtgggaagcaactctttacaaacctatgagctgagccgaaatgaatactttgcgcttcgcgtgcagacgcgggaggacagcaccaagtacgcggagctggtgttggagcgcgccctggaccgagaacgggagcctagtctccagttagtgctgacggcgttggacggagggaccccagctctctccgccagcctgcctattcacatcaaggtgctggacgcgaatgacaatgcgcctgtcttcaaccagtccttgtaccgggcgcgcgtcctggaggatgcaccctccggcacgcgcgtggtacaagtccttgcaacggatctggatgaaggccccaacggtgaaattatttactccttcggcagccacaaccgcgccggcgtgcggcaactattcgccttagaccttgtaaccgggatgctgacaatcaagggtcggctggacttcgaggacaccaaactccatgagatttacatccaggccaaagacaagggcgccaatcccgaaggagcacattgcaaagtgttggtggaggttgtggatgtgaatgacaacgccccggagatcacagtcacctccgtgtacagcccagtacccgaggatgcccctctggggactgtcatcgctttgctcagtgtgactgacctggatgctggcgagaacgggctggtgacctgcgaagttccaccgggtctccctttcagccttacttcttccctcaagaattacttcactttgaaaaccagtgcagacctggatcgggagactgtgccagaatacaacctcagcatcaccgcccgagacgccggaaccccttccctctcagcccttacaatagtgcgtgttcaagtgtccgacatcaatgacaaccctccacaatcttctcaatcttcctacgacgtttacattgaagaaaacaacctccccggggctccaatactaaacctaagtgtctgggaccccgacgccccgcagaatgctcggctttctttctttctcttggagcaaggagctgaaaccgggctagtgggtcgctatttcacaataaatcgtgacaatggcatagtgtcatccttagtgcccctagactatgaggatcggcgggaatttgaattaacagctcatatcagcgatgggggcaccccggtcctagccaccaacatcagcgtgaacatatttgtcactgatcgcaatgacaatgccccccaggtcctatatcctcggccaggtgggagctcggtggagatgctgcctcgaggtacctcagctggccacctagtgtcacgggtggtaggctgggacgcggatgcagg

SEQ ID NO: 10616 - DNA, 6000 bp, Homo sapiens
tatccagagaaagatcctttagttattactaaaggataatgttagatttcttttcgtgttgccaagggttaccccttttacagatgaaagataaataaactctgccttggttttaaatgctggtcaaaaaaacctggagtcctagaatgcaactaaattcaaaaaaggggtaatgttctttaaatgatctgaataaaattataaataaatatagctgtataaagaaagattttctttctttcaaactgcatatttattgtgggtatttgtgtacatgtatgtgtttgtgtttctacactttttaagtacacattatactttacaagttgattcataatagatatacatagtgtttggatactcgtgataacttaatacatttgtatatttgtaatcaaatcagtgtcctgggaatattcataacctgagatatttatgctttcttttttttttttttttttttttctttgagacggtgtctccctctgttgcccaggctggagtgcagcggcacaatctgggcttactgcaaactccgcctcccgggttcaagcaattctcctgtctcagcctcctgagtaactgggactacaggctcatgccaccatgcctggctaatttttgtatttttagtagagacaaggtgtcactatactcatgagactggtctcgaactgctgacctcaggtgatccacccgccttggcttcccaaagtgctgggattacaggcatgaaccgctctgcccagccaatatttatcttttctttatgctagtaccattctatactttaattgtttaaaatctatttctctcactcatctctttggactagcacctaactcagcacctcttgcaggcgttaaatactgtaaatggtttcttcagcgaataattaattaaaataaaaaactcaaataccttttctgtgatgtaaagggttgtaaagaactttattccttggttataattaatgacagaaaaaaaatctcactggcagctgtttatgtaaggagccatttcagttggtacacttttcttacaaatttgtttctttataactctactgggcttcaaaaccagaagtagagaagaatgacatgattcattcttaatgttgcacttgcttgtttctatatatcagtagataagaaaatatatttcacccactgaaaacaatcagtagcagggttacttcactcatgtcattttgcagtagacatcaaaattgcaagaatacttgaagttcttattttcaaaaagttgaatgtgctaccaaactgattttggggtactacactaaaaattctaaggctttgttaaatattactggtgacaataaatgtaagctgcactatttagcaagaaaaagatgcacaaatatttctataggtgtgtctgcttacaaagagatatgtctgcaattcccgcttcttttctaatgggccaatttctgaactcattatgcctttctggacttcattttgttctctcctgccactcccttgaattttccttttattgtggccctgtttttgctgaggttctattagtataatttctgaatcccctctttttccctcaaccacaacttagactaaatagttgctgcaaacacgcattcaaatgatccacccatgcttgaaattttacaattaacttgaaaggcaatgatcaaaactcttctaagtcgtttacagtgcggtacaaatgagataactgctagcagatgttgatgttcaaaagataagaacaagagcaagatgcgggagaactttgttactatagaagataaagggtatgaaaaggtgataaaggggatcaaaggcaaacgtgatgtactaaatccttctatcaagagcaagaccagttagttgtacgtgaagctttgctggttgtttggttactctttccaaccattataccatattattaaattacaagatatgattacttcctcaattaagttattatttcaacaaattattgagtcaatacttagatcaagcgggttttttaatggagaaaacagagatggatatcatgcttttgcttttcctgaaaccaaatcaggcagcatcacagatttttttaaggaggagaatggccataggtcatatccttgtgaaccattttttaaattattttccaaaagatttagtattgtaggtaaactgatgcaaacatttttataaacgtaaaactttatatatttattaaaataaaaataaacacttttaatacatactgtgagtttctgccacaagaagaatttgtggcttttaaaaccctagtgaataaaattagactagaagaaaaaagcttatttcttttacaatccaaattaatctctggcctaagtaactaactgcatgtgatggcagaacctgcgaaaagtgacaacaatgaaatactttactttttcccgccaccaccctaaacccaccacctaccctagagttccaggattctttaaaggaagttgtattccattctaggaaagttcatatcaaacaacaagacagctcatcaccatgattgataaccacatcactctgagccttgccgaacatctacatgactaaaccagaagctgtttatcaagaattgcatatcaattaataaacaaaaccaaagggaattactagcattatcacagaaagcatttaaaaaatgttatgcatcttttactccccaaatacagttcagatctgtaattattcttatttttactgaaaatgatcagaatttaaatactattttattaactggaagtccaagatatcataatggatttaaaactgaacgtgttatatgagcttggcatagcagtcatgatcagctaaaattctcagcacagtattggaacaggttcaggagaactcaaattggtagccatcaattaagcatagatttggagcctttcctagttttcttttcttatctttctctgttttgttcttcctcttttccttccttccttccttcttttgaagttttgatttgatctagccacaaacttggcccttgtttcaaaataattaataaggtacatttagcaaggagaattaagtacaatcagaaactgtaaccttgggatattgatttgcttgtagaaaacattgattgtctcctatagagataaattcaactattttggctacatccaaacacttaatccaaagattaactctgatccttgtttagtctgctaaaaagacttgtaagaaacattgccagaaagagtgtgtgtgtgtgtgtgtgtgtgtgtgtgtatgtgtgtgtgtattcacaggaaagagaattggactgaagaatgaagggactttatttcttctcccaactgtgatagtataggccacatgatgtgtgtaattcatttcatgatctctagctgtttttgtcatctctgtaatggaaagcaaaatgagattttatcttaaatagcttttggatcaaaaattctaagcctatgaaagatgcaatgttaatacttctttgttgaattttccaaaaatagggctatgtctgaatttccacagctgtaaattgatactgttagatgtaaaaaggtgactagaatgtagtatcaaaactccaggagtgtattttcctgaactcttaatctttttctagttctactttatctcaattgttaggctgatcttagataattgattgcaaataaagtttaatacagaactataaattgcaattaggatttatataaacaactcaggatagatctggtgggtcattcctttggaaaggtatgtggtagatatattgacatatcataaattttaggcttatcatcatttattggaattttcacaatgtagttggcattctatgaagacgtaatggggtttatatactttggataacgttgacaacctgtatgccagttgtagaaaatccaatttttctccctttcagcttgcttccttgttttgacaagtttctttaaattttctatttttgctctttctttgtaattctaaatagtactacttactatcccaacctaaatttgacagtatcctcacttttttagtgtccttttataaaatgagctttattgcgttatttcgtttttcaaatatatagagaatcctaacatgtttgtcctttatatacatctctgctgcaaagcctatgtatgtagaatcactctgtctctaaaattgtgctttaatggctgtaggacaggtccttgtttgttaacatacaaatgcaaataaacaaatgtaaaacacataattatttttatccccctccattgaatttgaaactgagcagaaggtggaatagtgaaatcacatgagaaatacaccaattgaaatcctttcttaaccaaataattagctgaaagtaaggctgtatagttcttttcactcttcttattttccattagctgttataacaaataattgactttctggggttctttttactcttcttattttccattaattattataccaaataattgactctagacatttttaccatagaagaaagatttaagagtttcattcgttcaatatgctgttttttaagcaaccattgattaaatatttgtagtacattctgtgctgggtgctgaggatagggaaacgaatgagggaaataaatcttaacaattaaagtacagtagatgtttaagatcctgacaaaagaaagaaatacaagtaagacatacacatacacccacgcacaactgtatttactacactttgcaaagagaaaaacagaatttttctgaagttgattcatttaagtgtcagtcatttaaatgtgttttacatatttcccgaaacatagaatgaacctttgagatttatattttgttggtcaaatatagttgtaagaaggaagtgtcttagactacagctgatgtttttttacctgattctgtaagcaataaaagtcaaacattgccagtgtggggtaacttatatgctaagaaaagcagctctgccctctgatgctaacacaaagagggttttaggcaaaggcagctgttcttcatcatctatattgagaaatagtagtattgcttttatggacatggttacttcctacagcagaaagaaagaaagcaaacaaaaccccatatattgttttgagatgtctagaatgcagaagaactggagaatactttctgattttgttcagcattcaggatactgatggcatggaaagctgtgttatcaaagccacacacatgcgaacacagactggaaagaggcttctttaggtaaaatattttgtttcactttgcttctgtaaaaacagcttcaggagtctagcttcagaacattggattggtaatatatttttctttcaaaagataagccccacaaaggcaatgtctgtttctctctttacaggtgcaggcaactacagctttgctaaaactggcagtgacaggtcagggaatgtgttcacagactagggggcctcctgatctgaattgtaataatccccctgcagtgagccagataccacatctcccttctccctactttgttttgctaaataatgataatatatacaggaaaaatagctcttacacttttttattggcttggaaattaagatagtaaacatttttaatgttcaaattatatttctttaaaagaggctggcatcacttttctcattcccttattgaaactcagtttaagtataaaatataaaaacattacttatcatgcagcatgttgatcttacgttttctggattaaaaatatgaatagcacctaaaatatattatttttcctatcagaaatatataatcatatgtgcttttctattttaagtatttagtctttctttagaaataaattactatatcagcaacatgacagcttatttctaattttctaatatgcacctatttgtatatacaagcatgcccttatctataatgatagaagcttaaaatcaactggagtagcattaataatggactggctataaaaactagtataa

SEQ ID NO: 10617 - DNA, 6000 bp, Homo sapiens
ctggccgggcggggggctgaccccccccacctccctcctggacggggcagctggccggacagaggggctcctcacttcccagtaggggcggccgggcagaggcgcccctcacctcccggacggggcggctggccaggcggggggctgatccccccacctccctcccggacggggcggctggccgggcttgggggctgacccccccacctccctcccggacggggcggctggccgggcagggggctgacccccccacctccctcccggacagggcggctggccgggcagagtggctcctcacttcccagtaggggcggccgggcagaggcgcccctcacctcccggacggggcggctggctgggtggggggctgacccccccacctccctcccggacgaggtggctgccgggcggagacgctcctcacttcccggacggggtggctgctgggcggaggggctcctcacttctcagacggggcggctgccgggcggaggggctcctcacttctcagacggggcggttgccaggcagagggtctcctcatttctcagacggggcgtccgggcagagatgctcctcacatcccggacggggcggcagggcagaggtgctccccgcatctcagacgatgggcggccgggcagagacgctcctcacttcccagatgtgatggcggccgggaagaggcgctcctcacttcctagatgggatggcggccgggcagagacgctcctcactttccagactgggcagccaggcagaggggctcctcacatcccagacgatgggcagccaggcggagacgctcctcacttcccagacggggtggcggccgggcagaggctgcagtctcggcactttgggaggccaaggcaggctgctgggaggtggaggttgtagcgagccgagatcacgccactgcgctccagcctgggcaccattttgagcactgagtgaacgagactccgtctgcaatcccggcacctcgggaggccgaggctggcggatcactcgcggttaggagctggagaccagcccggccaacacagcgaatccccgtctccaccaaaaaaatacgaaaaccagtcaggcgtggcggcgcgcgcctgcaatcgcaggcactcggctagctgaggcaggagaatcaggcagggaggttgcagtgagccgagatggcagcagtaccgtccagctttggctcggcatcagagggagaccgtggaaagagagggagaggagggagaccgtggggagagggagagggagagggagagtcatttgcagcttttaaaagccataattttgaaagacttgacattaaaaactcagaagtgttattgtgcaatttacgcataggctattgatcttttcatcagattatgaatacttttcagatacctgtctgttgaaggtctgtgtaggtgcttctcttaatagaggtaatattggctagtttttagaaatttaacttcaacctcaatctcaaatatttaatactgtttttcttccagtttgttgttgtgtttcttgagcatggtgtttcaaaactagtttttttcctaaatcagtgtcctaatgaatctaaaagttttagatcagagcggaatgcatcttgattaataagctatagagaataatagttctgtaggaaagaacaccattcatgtatcttttttttttttttttttgagactgagtcttgctctgtcacccaggctggagtgcagtggcgtgatctcggctcactgcaacctctgcttccctggttcaagtgatttacgtgcctcagcctcccaagtagctggtactacaggcgtgtgctgccacacccagctaatttttgtatgttttgtagagatggggttttgctatgttgcctgggctgctctcgaactcctgggctcaagtgatccgctcgccttgggcctcccaaagtgcaaggattacaggcgtgagctatcatgcccagcccactgttttctagtatacagagttgcggtaaagtctggtgcccttctgattttcttttcctttttttttttttttttggagacagagtctcactccattgcctgggcaggagggtggttggtatgatcttggttcactgcaacctctgctttccaagtagctgggactacataggtatatgccaccatgtctggctaattttttttttttttttctgagactgagtgtcactctatcacccaggctggagtgcagttggtgccatctcagctcactgtaacctccgcctccctatcagcctcaagcgattctcctgcctcagcctccctagtagctgggactacaggcatgcaccaccacacccggctaattttttttttttttatatgtttagtagagatggggtttcaccatattggtcaggctggtattgaactcctgaccccaaatgatccacctgcctcccaaagtgctgggattataggcgtaagccactgtgcccagcctcctggctaattttttttgttgttttatttttgttagagataaggtcttactttattgcccaggctggtcttgaacgcttgggttcaagtgatcctcgtgccttgtcctcccaaagagctgggattacagacgtgagccactgtgccgggcctccttctgttttttcaatcttattttttttttttcctctagaagcatttgggatcttctgttatccttgttggttttctgaaattgtacgatatgccttaatgtgggtcattttaaattcattatgcattaattttttcagtctagaaatgtgtatattttggttttgaaaacttgtatttctgatatcttttgccctctttttctagaactctgtaaattggatacggacttcttggctactcttaaagagttgtcttctaacctttctgttgagattttattgtgactctcctgtttttgatttccatgagcttcctttttaaaaatcgtagtttgttttatggatgtaataccttcttttagatttctgagggtatcacacctcttttgaaaatttcctttatctgtattatatctgtttcttcagagttcttattttctctttttgatctcttctgtgttggaagctttctttcacgttatccgtgattgtctgtttatatttaggaatggttcccgtccccccaaaaaaagaagctaaataaaaatgatatgtttggatagaacatatttatttgtgaaccacacttactactgaatttttgaaaggaatttagaactaactcgagtcattgaaaagttgtaagcagaagcagtggaatgccatggtaagatttgtctgttagaaagatcagtgaggagaatggattgaaaaggctaaaacttgtttagggaaattagttaagaggcttaaattaatccaagtgaaaaacagccagattaggcagactagaatatagttgttcctcagtatctgtgggcgattggttctaggactcccctcaaatatcaaaatctggatgctcaagtttcttatataaaatgttgtagtgtttgcatataacctatgcacatcctcttctatactttatgtcacccccagattacttacaatacctaatacaatgtaaatgctgtataaacaattgttatactgcattttaaaatttgtattatttttcctggatatttttgatcctcaattggttgaatctatagatatggaaggccgactatattggcaagatgatggagaaaagtgaaacatttcagaaagatttagaggacagaacttcataagaaaaagtgattcactatacccaggctctggtgtccctgacataagatccgttgcaaacggatgtgcgtgggcgagctttgaggccaaattgcaataaatataaagaatgagtgggacgtaagaagtggtggcaatggccaccatatttagatgtaactttttctcctgaggctctgctttctttattttcttgtgctctctcacccttcactgaaagcatggtctagaatagcactgtttgatggaactttgatgatgaaaatgatctgtatgttcaatatggtagctactagctacatacatctatgagccagacacttaagcacttgaagtttggctactgcacattgacacatggtgttagtaaaaacatacactggatacactggatttttggtcttagtatggaaaaatatattaagtacctcaatttaaaaatacttattacatgttaatattttggttgtatttggttaaatcaaaatattaaaattaattttgcctttttttcttttaaaatataactactagaaaatttaagagcggggagggatagcattaggagatatacctaatgctaaatgacgagttaatgggtgcagcacaccaacatggctcatgtatatatacgtaacaaacctgcacgttgtacacatgtaccctaaaacttaaagtataataataataaaataaaataaaattgaagaatagatttgtgacttgtactgtggtttttatatttctgctggtcatgatgtcacagagatagatactgtatgtatatatttttaattttttataagattgacaaagtaaaggacactttgaggacaagtttaagagaggactctcagcattttaaaagtgatgttaaattggtggggcacgatggctcatgcttgcaatcccagcactttgggaggccgaggtggacagatcacaaggtcaggagttcaagaccagcctgcccaacttgatgaaaccctgtctctactaaaaatacaaaaattacccggatgcggtggtgtgcacctgtaatcccagctatttgggagtctgaggcaggagaattgcttgaaccctggaggcggaggttgcagtgagctgagatcacgccattgcactctaggctgggcaacagagtgagactccatctcaaaaaaaaaaaacaaaaaaaaccgtaatgttaaattttatgacatttaaatagctaacattataaaataatacaatacaatggatttaattttgatattatggaattttaactagaaacttatagcttagccaacaacgtgaatgaaggctatagggttctaatacttgtctacagcggtgtaacattttccctcccatctctccctctggatttttccacttttaaaatggattctatatctcaatgtagctttctgtttggaaacagatttttgctcttgtcgcccaggctggagtgcaaaggtgcgatctcagctcactgcagcctccacctcctgggttcaagcaattctcctgcctcagcctcccaagtagctgggtttacaggcatgcgccaccacacctggctaatttttgtattattagtagagaccgggtttcaccatgttggccaggctggtctcaaactcttgacctcaggtgatccacccgccttggcctcccaaagtgctgggattataggagtgagccactgcatccagcctcagtgtagctttttttaaaaaaaagttgcagtatttaaaaaatttatgtaatcaacgctattgataatttctttaagctttctgctagtcgggacaattttaaaagaaacctttcagggccaggtgcagtggatcattcctgtcatcccagcactttgggaggccgaggtgggtggattacctgaggtcgggagtttgagaccagcctgaccaacatggagaaaccccatctttactaaaaatacaaaattagccaggcgtggtggcacacacctgttattccagctacttggaaggctgaggcaggagaattgcttgtaccggggagggcagaggtttgcagtgagccgagattgcgccactgcactccagcctgggtgatgagcaaaactccatttccaaaaaagaaaaaaaagaaaccaagaaacctttcttacctctataatttgttagcaagttttaatgacatttgtttaaaaatttgtttcttcactgatgtgaaataccacctttataatataa

SEQ ID NO: 10618 - DNA, 6000 bp, Homo sapiens; identical to SEQ ID NO: 3429

SEQ ID NO: 10619 - DNA, 6000 bp, Homo sapiens
tgcctacctctctctatatatataccctattggttctatttctctagagaaccctaactaatacagatacatttaccatttccatttaatatttagagaaattaaaatttagaacaagatttaaaaaaataaaaagcctcataaataattcatgaaatattttggctgaaactctcaagtgttgagaatcttcatttatttctgattcttttgcttgggagaaactttaacacgagttctaggtcttgcttctgcctgctttagccataaatataatatctatccattatgttctgcttcagagagtttgcaattgccatcttaaagccccatctctctttgaaatgctccagaatttctgcctcagccttgtctctctgaaaagaaggccatttccttccataagaatgattgtcctaaataccttgtgggttgtttttgttttagttggcaccataacagtcacaaaataaggtagttcatttaaaacattttcctcatggttgttctgttcccccattcaggaaaaagactattggttaccatggcaatcagcttccacagcattccattctaagtaactgcacaggtacagcacaacctttactccacattctttactgtagttctctgcagatctgcgtatttttctagcctgttttctctaactcctgcttaaaacaatcaaccaaccaacccaggttaagccagacaattttttcaaaggtaccttatccccatcttttctgaatattttaaaaatgttatatagacagttgtactaccatttcctctaattttgttctatgtgggccctcaacagcagctaactgaaaactttctagtaccctctttcactatctaggattacatttgtatccctctgaccatatttggaaaatgaatttacagtaaaaatcagagcaggaggtagttctgagatcatttcccatggctatctaccatagttttcctaaggctaattctttagcttcctttcctctaccactttcaaacctctgtaataaattgtcctcaagccttgccttgaagatgccaaacacttgtgttcccacccttcagactgtttaactactttgcttctgttcagaacattactgacaataaaagatggtcttattacaggccatacacaactcaatggtacccggtatctgctatataatggaggaagtgggatgattttggagagtcactggataaattctgtttccctgcaactctttcattcttattacgtttactctttgctggttagtttcttcatgactatgtattataaactaggaattatgatatttattttatatagagagatatcttttaacttatttttcaatctgactttatttgaattgatagtggtattttggtaattaaaagcaagttgttattatctaatgtaaggcaattaaaaataaaatctggcttttactctctttcctgcaaaggttttctatctcttagatgtcttttcattgaaaaagacatatctcatgaccagtgtatgaacaccccattgaagattgccatctcctattaagggcatggaaataaactctgtaactaaaacagatgccttcgcccacagattctaaaatcagagggtattcataaaccgccctacaaattttcagagcacagtgggaaacaggaactgttaaaatctgaaactctactaaagtactttcttcctcttccggtaaaagaaaatatattactttctaggaagtttactattttaaaaaacatacaaaaaaatcagggttgggaattcacaactaaaatttgggttacatcagctcatcttaggagaaaagatatttatttacttacagatggaaagccatggaatgcctctctgactcctcttaaaactgtattggaattgtttcaagcagggagaaaaggctatttttttctgagaagacatgccatattacataaaatgtttcaaagttttacatattcttttgactacatggacacatgtacttactgatcctgatcccatataagctggcaagaaattcatacctataagtaataaattataggtagaattttctagattgaggctgaagttaaataattgcataaactttgagtaattatatcacagtgcaccattcaatttatgtagaaaaaaagctgctctcaattttcagttgataaaagagcagctgagaagagacgatgtggttgtgaaaagtagaaactaacaaagggtcagcactctaaaggcaggaaagcagctgaaaagctgttttgacagttgggtaaagatgaggggaaaaaagactgtaaatgagaggaagttgtgatgaaagggtagaataaagtgtttgaaaatggtaaagtgagagctttaattaacatggagagaaagagcaggaaagagagaagttatttagttaggtaggaaattgtttgtagagaaattttagtagtgtaataacataatttgtattttaatttgccaagggatgacattattggaagaatgatagttttattgttttaacattttagatataagaagctccatttgtctgaaatacaaattggtacaagtttcgattaatatgataataatatacattagacaaattggcaagcagggatttgcctttcattaaccttttgttataaccttaaaacaaacaaacaaaaagcaaaacaaaaaaaaacgacgcggtcgggcgcagtgtctcaagtctgtaattccaacactttgggaggccgaggtgggcggatcacttgaggtcaggagtttgagaccagcctggccaacatggtgaaactccgtctctattaaaaatacaaaaattagccgggcgtggtggcaagtgcctgtagtcccagctactcaggagactgaaacaggagaatcacttgaacctgggaggtggagggtgcagtgagccaatatcgtgccactgcactccagcctagacagcagagcgagactccgcctcaaaaaacaaaacaaaacaaaacaacgtaaaaaactagggtgagcgctgtgggtaatgcctgtaatcccagcacactgggaggccgaggcgggtggatcacctgaggccaggagttcgagaccagcctggccaacacggcgaaaacccatctctattaaaaatacaaacattagccaggcgtggcggcgcgcgcctacaatcccaactacttaggaggccgaggcacgtgaattgcttgaacctgggaggcagaggttgcagtgagccgagatcgcgccactgcactccagcctgggcaacagagcgagactcagtctcaaaaaaaagacttaatatttcaaacttcaagcaagatcataattttataatgtgaagatgaccagagtgtttgaatcagttacaaatgggtcttttttgttgttggtggtgttctttaatcttggactcctaacttgagcaagaaaatgtaaatacagaaagctgcaaaaccaatgttccttaattaggaaccatgtgagtagtttaacattacaaacagtttctaaaagtcacacgtggtatacattctaacgagttttagcttcttttatttaaactgcgttgatattgatctataactttcctaataatcacttcataggttggtaatcctatgttttggattttccaggtcacttcagattcaaatattttttcctaacgtcaaatggtgtgtctagattttggtctggaaaacagggtcactaaatttgtagactaacttgaaacagtattggcctttggcaatacgcagcaattctatttcttggccatgcttatcaagttaagtaaaataaaatcaaagttcactatatgatttacctaattaaaaaattgttttaacctaattactttaaaataatttaaaaactctgtagtaatttacaatgtaaaaagcactcataatatggtgtttatagacacacatagctagtaaacctatagacagctactcacccttgccatacagaaaatgcaaaacacacttaagagatattgtaattacatattatgtggtcaaaactaaagaagacgaaaatatgcttgtgttaatgaaaaaggatttggtgctctttcttatttttaatttttaaattttaatttaaattccacagactgaaacccatatactttttctctttcttgttttactggctggagccaagtgtcatggaactcatattcttgatgaagagaaactgagaggacacactggcatttgctatacgtgaactaagattgactcattttcctatgtcaaaactgctattttgcaaataaaattactatcctttataacattatttcgtttgcttattgctctgctctttattctttcgtgtttcaggtaaccactaacaaaaagtttaaaagtcgactatgtccagaatggcactctataattgaaaatttaggtgatttttccgaagtcctgttggaagcacatctaccagcagtgtgatcaggctctccctcccacatttccctgctagtcaggacaagagaagcccgggggtgctgctgcaatagcggtgggagtgggagataggctattacccgcttgacactgcacttttgctacgaatgattcactcaggtttggcacatttgttgcaaggaaatctcctcctcccgccgcttccttgttcgagctcctctcgggctgtctcctgtgctttggcctttaaggagaagtgagagcaggtgggcacacaggagctcgccgagtcctcctccccctgctccttccctaatttagcagtacttccggccgcgtgacatcatcccccgcacctcggtgacgtgagctgcgggtgacgtgtgtgcggagagaagcgcgctgacgttgctatttaaaggtcctcctgcggggaggatggagacacagcgcgagcacctggtgtggggcgcggaggaggctgtggcggtcgggagcggggccaagagccagaggaggagcagagcgcacggccagccagccgccagcctctaggggaggggggaaaagaaggacgaacggactgagggcctgccgccggcccagctccccacgagggccgctcggccccccaccatcagcctctccgccgccttgcggctgctgctttctcccgcggcccgctgctcgcaaggcccgtcgggctcccgggaccagtccgcgccccagcccccggccgcggctccgcggcggccaccgcctcccgtcccttcccgcgagcagagggagggaccgccctcgctccccgttctctccgcccccttcccgccccccgcagcccactctgccgccgcgctagcttcacgccggcggcgctgaccgggaaagcagcaccctcttctctgccagccggccggccggcggaggcggaggcagcggcaggcttcaggccgccggggctggcgctgctctgcccggcggtagccggaggcgggcgctgatggaagtgtgaagaggcggcggcggggcccggggaatgtgaggcggcgcgtggcggcggcgcggagcgtgagagacgaggagtaggggtgggggcgctggagcggcggctgcgcttcggcttcgagcccagctctcctggccccaacgcgggcttagcctcccgccttggctcgggcaggcgcccgtcgacccttcggcccctttcgcccgccctggagctgggggcagggtgccagtggaagcgtggggcttggctctgtgattcattcattctccgccgacgggagcctcagacccgctgtgctctgaagagaggagggaagagggggcagccgcgaatgaagggccgggcaccagccgggctccattgtgctcggcggcggggggcgggaaggggctgagggaggtgggatcgggtcccctcctccagctctccggcgtgcgctgcgcccccagcctgctgccagcctggaaatggctccgtttattctcttcgggagaatgaatcgatcctgcctagcc

SEQ ID NO: 10620 - DNA, 6000 bp, Homo sapiens
atacctctctactctattgtcaacaaagaggccacaatgagccttttaaaatgcaatttgattattaaaaaactctactcaaagccctctaatggctttccattttagccaagtccaaagtctttactgtcgcctacagaatcctgtatcatctggccctgagcttctctgcaatattttctcctcttattcccctcttgctctctttctttcagctactttgccctccttgccattgttgaagctgagaatgttcctgctcagcctctttgcacttcatgtttcctgttcctggaaaaatgtttcttcagattcactatttggctgcttctctcacttcctttgggtttctgctcaaatattatacattgtataattatacattgtataaatattgtataagtggcttatacatcacttcaacctcctgaatatcaatgtttgaagcatatttaatattaatctaagcaataaatatcaatattcgagacagtaaattgtattaatgaaaataataaaaagaatagctaacatttattaaagtcttggtatatggcatgaattttgcttttccttgctggtggcaatccatcttcttgttataccctgccacctgcactagatcttagctcagatgcctccaacaagaagtcctccttggttagtcaagccagaagtaattcttcacttcctcagtgattaatttgtaccattcactttctgcttgtgttgtagggttcttataaatatcttctcttaaatataataagacatttgacagaagagaccttatctagtgtagctttatatgatatacaatctgtaggacagtctcattttataatccacttcagatatttaggaaaagttacatatgctttttcaagatatgtaaatgaattcatatgatggatgtgttatttgggattatagatttcagaactcaatatctcagagtattttaagacaggtagaagagaaaaataatattaaaaagtcaattaaatgcattgaagactaaatgaatttaaggttgaattgtgtagcattatctccagtctacaattataacaaactagaaacaaaatatttttcctcttgttctctctagagaataagatttctgggtagtccagtttctttttgtgctttcagagcagctttatattcaggtagttttttgtggtcttggtgctttcagcttgattggtgtagaaaagacagtttgccttgggcttttgaaaatgatctccatattgatttaataagggattgatgcaggtttggagcgaaagcctctgaagttggtgtgtagctcgctttgtaagactaacactaccttgaatggccaagtccttaatgaaggtttctacttattttgatggagattttcagttttataaagctcccatatataaagctcataaatactccagagagagttaacacttaagccaccaccagcttacacagttagacttagctatgatatttataatttagctgaagagttttaactgaaactttaaaaggtttacctgaaactttgaaaagtaaggactaacacagaaataaaatacagagaaaggaaactggagtgaagaggaaggaaaagccagtgaaaaatgccaacccttctgctttcacccggtggggaggtacctccataaaggcaaatgtggttggcttttcttattctgtgtggagagtgcttcacagcctctgtgtttacctttgcagttgtgagcttgccctaatgtggactctgcctcaccagtcctgacttttccctcatttgcttctcagaggcttcctcaggaattaggtggggttggccagaacagagctacaaagaaagggtaggccatcgtagctctaagactgtttcattctctaattattaaggttccaaaggaaaactttcagcagcacacaattttttcaaaaaaacatgctttattattgtttgcttttatttatactttaaattttaaaataattatggactcacaggaagttgcaaacatactacatagagctcctgtgtgaccttcacccaatttcccccaatgatattatcatacataactatagttcaatattaagacccaggaaattgccattggtacaacttatcttattcagatgtcacgtttttatgtgcattcatatatgtatgtagttctatgcagtcctatcctgtgtataacacacattcatgtaaccaccaccacaatctaaatttgtctcatcataacaaataaacttctttattctgatcctttacatttgccccaccgctaacccctggcaaccactatccatctctataatcttgtcatttcaataatattatttaaatgcagcccagtgtttctccattcacgttgctctttttccaaagcatagtattcatatacttgggaaatactgggtctaccaaataacaataatatcaactatatacaggcactgagctaagtcctttttccacttaatcttcaaaatagccctgtgaggctatttattaatacctggcattagtattagtaaatcacatcacattaccctcacgattaaaaaagacctctaatgtctcccaatttcatttagaggaaacatggactctcactctggctataggacccactcccttagctgaccttttgtttcactacatctcttaccaaccccacccaccttgctctactctatttggagtggtatcgttctgtccttgaatatgcccagtcaagctgcttcctgcctcaggacctctgtatctgctgttccttctacctgaaattctacagtcagatccgtcaatagctggttctctgtcctcattaagtcttaactcaaaattttatcttctcagagagactctccctgtacacataatgtaaaaaaccaaaaacctctccatatggggctgccagatttagcaaacaaaaacatgacacccagttaaatttaaatttcagataaataatagtattttagtataagtatgtcccatgcaatatttgggacatacatatactaatattattcattgtttctctgaaagtcagtttaattgggtgtcctgcattttgtctggaagctcttcctctgtagccactctgttatgtggtaccctgcttaactgtttccatgggacttttgcatattagaaattctgtttattgtctcgcatcacctcccaaccctcaccctcacaataagctccatgtgggtgggaccctgatgccctgttcacagctgcatccccagagcctatcacagtgcctggtatatagtaggtgcttaataaatatttgttataaaggtaacaaaaacaaaacaaaacaaaaaacttaggttggtaacacctccaaagcatactgctagctagacaagactgatcagtgtgctaccgcagcttagggaactctcccgttttccccatttaggaggacgaaagaggcattgtgttgctggcctttcagaagtctctcctagcagaatcagaagaccctggctgagcagctttgggagaagcaaagtctgaatgagctaaaaagccttttccgtttgccttgcaacaagcaaatgaagtaaccaaagaaaaaatgcgcttgaatgaaaagaacaagattctgtgcgtgccgaatcggatcaaaggcagtgcgcatcacccatcttcgtccaccgtaaactccctgcaacttaagggctggctttatcgtcagactccggaaatgctagaacctgatcataagagaccagtgcagaggcaaataaagaaaagggaggggtggatggggatgaagtcaagacagaagaaattaaactctcgtcttggacccagggagcgcaacggggcgggggcagacgtcttcagctttagaactccgtcgggttcatcgctcagtgtggacgatcggcgcccccacgagacccatcgagggcacatagtttccactccagctcgcttcatccgacccagacgatcgccagcgcggccagcggccagcgcacagcgagctgcctgggcaactgtggccggatcctagggagcaagctggcttcgggccctacctagctccacccggctcctaccggccctcccacctaggagctggaggatggtcccggggcgccccagggggactgctggtccccggagtctccagccagacgcgccttgttgtgtgagccgcgtgcgcgcccaatttggaggcagccgcccccgccgctgacaggtgctgcccagagggcgccgggtgcggtccctggcgcagctggacgcgcacgccccggtgcgtgcagcttcccgagctcggtcagagagaagagggagccagggcgcggcctgggggacgccagtggactggagccgcggagcttcgagggaaaaactttgcaggcgccgcggccgggattcggttacggctccagcccaccccagcaggtgcgggaggaagaggcagcgccggagtcccgaggccagagagcctcggcggcggcggccgcttctttcccccgagctggcctgaagtcgctgggcactcccggtttctgctgctgcgcccgccgccgccgccgccgccaccgccagcgccgcggggacccgggaggaggtgcagccgaagagggaggagaagcaggaggaggaggaggaggaggaggggagaggaggagcagggggtggaggatggagccccgggctgccgcggcgggcgagccagagccgccggcggcgtcctcctccttccaggcccggctctggaagaacctgcagctgggggtgggcaggagcaagggcggcgggggcgggcgcgctgggggtccagagcgccgcactgcggacaccccgtcgccctccccgccacccccggtgggcacagggaatgcaccggccagggggagtggtgcaggcagcaggtggagcggcttcaagaagcggaagcaagtgctggaccgagtcttctcctcctcgcagcccaacctgtgctgctcgtcgccggagcccctggagcccggcggcgccggcagagccgagcaggggtccacgctacgccgccggatccgcgagcatttgctccccgccgtaaaggggcccgcggcggcctcgggagcagcgggagggacgcctcctggcggacgctcccccgactcagctccttcctcttcctccgcctcatcctccctgtcctcctcgccccagcctcccccgaggggggaccgcgcccgagatgagggtgcacggcgtcagggccccggggcgcacttgtgccaccagaagagctcctctctgccgggcaccgcctgcctggagcagctgctggagccgccgcctcctcccgcagagccggcgcggagtcccgcggagtctcgggccccggagacgggcgaggagcacggcagcagccaggtgagtgccggtggcgcggccggagacaaggtgcgcgggaccacgcctccctcttcaggcgttcaccacccggggagcggggggcgggggccgggaggcgggaggagaaatgctattaattctaagtagatgaaacagtcgaaagaaaacatctcgctctggtttagcaaagatgaaagagttctgacttgcacccggactttacttttggtagaaatgatacctgtcaccagaagctttctgagtagtcaatgaaaagttagacctaaagtgggtactttttagagttctcctgaaaggagatgtccagccaaatctcatcttggcaaaagaaaaaactaacccaataacttaaaaacaattacgatcacgtgtggtggtgtggagaggtaccattggaagcaaatggctggcgggaagaaatagaaacgtggagaggtaaattatggcacatgtgaggtcctgtgccagggaaagcatcatctcaggcctgcatccggcacccctttcttaaaccttcctgctgcaattggatcaccgcccttcaagtggacagcgggagcgtctcctcccagttagtc

SEQ ID NO: 10621 - DNA, 6000 bp, Homo sapiens
ggaagatcactaaggtagaaacatcagtggtaaaagaaggttgggaaggctgagcagtgttccaatcttctgaagcattttctttaatccctgaaggaatgttgctgtcatactcaggaggctggtgtaactggaagcaaaatgatgcctaaattagtagataaataataccatatcatagcctttataccattacttagtgttactcaagctgctgtaacagtaacttgtgctgtaactttaggtgaaatattgaagattaatggtaagtcatctcacaaaaatagttacaaaagctaaattcagatttattttggagacatagagaaagcgtaaaaaatttaaacccagtgaacaactattgcttaggtgatgaggactgttttatttctagttcaaatacagcaaaatccaaaatgcttcaaaatccaaaacttttttttagctccaacctgatgacacaagtggaagattgttacatctgatctcatgacacatcattgaaaatatcatatacagttgccttaaggctgcatgtataaggcatatatgaaacataaatgaatttcatgtctagacctgggttccatcacaaagatatctcattatgtatatgtagacattccaaaatcagaaaaaatctgaaattcaaagcacttctggtcccaaacattttggataagggatactcaacctgtatgggcttagatcgtatctaaaagttactcaattaggcatgaaaaagaattatttaccacttattcgttaacatcttaaactggtattttagtgttcccaggttctatttagtctcttggccaaagtcatggtgaaagaaacagctttaagaatgtgtaaaagccttaattcataaacctgttgttagaattagcaagatatattcaaatactcttaattttagaaatgttctctttattttaaggtcttgtgtgaaggacaccttgctttgtaaaatgatatttctttggggccattaccttaacctgtatccattccttcatgaattttaacttgtataaggtggcttgttctaaaaacctaagtgggtaaatataagaaatgaatggtaataaagcagttagtatcatacccgtctttatccatgctacattttttatttttctcagtcttatttttctactttcaaaaagataatgtatcatataatagggatcattataaagcaacttttcatactttaaaattgaaaattaccagctagtaagttcagaacaaaattaccagctagtaagttcagaacaaaattaccagctagtaatgcagaataaatgataaaagttttactctcaccattttttacctgttgataaaatgatggatttagagtaggcaatgatcagcagtcactactaaaaccattaagtaaaaggctgatggggaactttatactgagtggatcagactgaatgatcattcacaaatggagagataactagacattatgtgccttatcataatatgcagtaagaagtacacaacattgactactagacgttcccacccagaacattgcacctgaattccatcaagtctctagctccaaatgccagtttacaagaaatacagaggataaaggaataacatgggaatgcaatcaacaaaatccaggacgtgggaaatgccacaggataggggttgatggcaaggaaaaaaggaaaaacaaggaagaaagcctaaagattaatgaacacttacatcagccaaatgattgtgttaaccttacttggattcttacttgaaaaccaactttgaaacaataggggaaatttgaacactatttcctgactttaaggaactgttttagattatttcatgtgttataatactattggggttatgtttttaaaaagtgttatcttttagaaataaagtataaaagtatttgtagctgaagtgataaaatatctgagatttgctttaaaaataatcggggaatgtagatgaagcaagattagccatgtgttaatctttgttgacatggtgggggttcattgtacttttctcaatacttttgaatatatatggaagttttcactgtaaaagttttttaaaaatcacatctcaggccaggcgtggtggcttacgcctgtaatcccagcactttgggaggccgaggcgggcggatcatgaggtcagtagttagagaccagcctgaccaacatggtaaaaccctgtttctactaaaaatacaaaaattagctggatgtggtggagtgcacctgtaatcccagctactcaggaggctgaggcaggagaatcacttgaacctaggaggtggaagttgcagtgagccaagattgcgccattgcactccagcctgggtgacagagcgagactccatctcaaaaaaagtcacatctcaaaagttgtagaatgcatgtaatttaatttctgtgattttctctaatccagtagttcttaacccataccccatggacaggcttgaaggagttcctaaatattctgcatttgggtcaactccttgcctttatgtgtactttccaggtgaagaatccttgggcaatatgccattttgagaatatagagaaagcaaatcctagaagcacatctctctctagctcctcatcacaaattaggaatcattttagcacagttttgcaaatttttcattcctaggggcctgaacaaagcaaggacaacaaaaatatttgactcttctaataggttaatgcagtttgttggcctcataatttcttacattttttaaaagcacttttaatagaatattttaataattattcctttcatacttactttggcagaacttcattaaacattattttctaatttctatattccttaactaaaattaaaacaaacttagatttgtttttaaaactcttaatacaggcttgttgcataaaataataataaaacatatattttaccactaggattaagtttgcagcagtagaaaaatattaaaccatggtatacaaaaaaactagtcatttaacctttctcaaaacagatggtataataaatgtataaaaaggcaagctgttatcagctaaaggctcacaaattgattacacagtgaaactgaaacttgcatcctgttgggaacatacatattggtttagttgactggcatgagggaaaaggctgatttaacaaatagataaatgtaaaaaaacaaagtcattcctattctgatagatccctttcagatttaaaagttactaacgattttgatgttgtggctgttttaaacatagttcaaagaactttgactaattcagcttttttttgtactgtgctttgtttatttttatagatatttgggctttgacttatattctcattggtgagctcactgccattttcttcctaattcttctttaaagaacttgggctggaaattctgtagtcaccaaccttagctgataagtatttctgctattgttagcttagtgttccatctgcccccttactgatgccatggctgtgacatctcagttggggaaaacagctgcttcatgagatctctagccttaacagttgtcccagtgaaaatgagcaggggggtttcattgcaaagacaactggcataaatgtatgaatgaatgccagattagtagcatgttagtcaaaagaggaattgagatcaaattgaaagaaaagctgaatatgatagatgaagtctacagaaagtatcacacatactgactgaaaatatttctctgcagatggaatctgcctgtgtttcaattcacgaagctctgaagtctgtcatcgattatcagactcatttccgtttaagagaagctcaaggccgaagccgagcagaggatctaaatacaagagtggcctattggtcagtaggagaagccctcattcttctggtggttagcatagggcaggtatttcttttgaaaagctttttctcagataaaagaaccaccacaactcgtgttggatcataactacgttttgagaattgatgcaccattgccactgtaatattgctgtcctctaattaattttaggtactgaagaacttaatattggcaacatttttaaatccttactcatacacttgttgggagggatgtacaatgcatattcccaaactgtggaaaggacacctttttttatttgtaaaggtggaaaaactttggaactcattttgggctattcatgttaaatattcaacaccaatgatctactctgttcgcagttgtttatatctactcttcgcacactaaactttggtattttgattccttttaaccatttaagactacttttcttataggtagttgatattttaaaaactttagatttaatgtctacatgtgttagggaggaagaaaattgccttttaattgttaataagaaaaccaaatgtgatgaactgtagcccaagccctattctgcactgttcagttttatggaggaaaaataaatctaccataggaatgttagttaatattgatatatcatggtaaaattgatttctcactagcttagaaaatgtcagacttttgtttttggggtttataatttaaaccagctatgctattttttcataaaggcatttgtagtacacagaaaacagtagtttcagtagtgtaaaagagtttatacaggccttaaatatcagactttgtaacaggtagaaatattacagaataatttaagacactacaatgggggcaaatgaaataggaaaatttttagtgagttacacgtactcattacattttcagtgcttttacaaggaaaaaaggtgatatgtttaattttaaaattttaattggctagctcttgcccttatatgactttaatgtctgtgagtcattcccagcttaaattaacaattgttagtattagtctcacacataagtgccatacattttatcctcatggatgtgatgcactgaaaagttagttgctctccttttttcttttttttgtcgtgcatattttatttctgtagtttctggttagctaccctaaagtgatttaaaaatttagaatgctttgtgtttcctatttggtaatcttcattgacttttctttagttaatgagtattaaatagtgcatattctgtagactatagggtttacattgtgttgcatcttataacttgtatagattgagctgattgaaataagattttgttccaagtattatctgatagaatacaagatgattcaaaattatatagatatttaaagcttttctgctgttttttttttttttaattgcaactgcttttctgccgtgcctctcttccctacccaaaagtgatgagttctgaacaagacaagactgtcatattgtagagactttggtatgtgataccatagaatactgattggatagccatcctagtcacttaccaatactgactagaagttaactcttaattctaagctatcttaaaatgcatatatatacttcttgcatggaagagcaaaacaaattcaagttgtcatgcctgataatttcagatgccaccgtatagcaaagggtgaacatgttttcaaccctttaactttttacggtgtttgaagaccagctactccttaatatttatcaatggattaagaagtttaagattttgcagatttatcaatttgggtttttgtactgaagttgtcttgcggctttgcaagtgtccctttatatttaaatttgaaagttgtaagcactgatgttaatgtgattgatcagcatgggcatatgtaaaatgtccttttctggttgcctctctatgctattgtgttcagatacttacaccataattaaacagtaagttatagacttgctgagtttggcatagatagtgcactcatttaatctgtgcctctcaaaacttcagaatattagcatattaccacaaataatttttggtgaaactattgagatattaaaatttttgaaatcactactgttacctgttatagaaaatagtgttggcttagtct

SEQ ID NO: 10622 - DNA, 6000 bp, Homo sapiens
tagctcagacagggtaactttttgttttgttttgttttagctgctatttcactttgatccttcaacctcaaactatctcagacaagtccttccttgatgttttcttttctgttccatttgtcccaagccacatgcaggagttatttatcttgcgtcttccaaaaggggaagcaagaagggagatttttccacttaagcctggggaacaagtgaacaactgtgtgaggggaggaacattccacaagctgcctcaaaagggaagactagactcctctggaagttggggttattgtgaagcaataccaaacccccaggtcctttacatttctgttagttttacttcattcactctgtgcaatagggggtgaggttttgtgtctctttaagcccaagaaaggaccattatgaagtgggctcttcctctgcctgtttctgcttcccaaatgctatagtacaagtgaagacatatgatcccagaggagaccatatgtgtcaagaccagaatgtgcttggggtgtcttaagagcattttaaggaccgaggctgccacttcaaagttcacctagtctacccatttcaattgatagatgggggaaccaaggtctagagagaccaaaagacttgatactactgtggtagaacaagaccccctggcatttaatttcaagctgagtatttttctccatgatgccgggttacctcccaccaccatttggtcagttgagaagtcttggaagaaataagggatgatgagcctgacagggaggttttgggagaagaaagagggaagacatggccactgttgctcctgatggaaggttatttgtgggtagagagagcaggtttgttctttgtggctgcaggggagatggggtagacagatcagaaagtttgagggaggcacatttagatcagtaaaagaaagaactttctaaagtcacttgagaatgaaaagccatttagttagtgcaagaaatgaaatgtctccaccacagagcctctgttaggaatagcattttagttttgaatcctcagaggagatactgctccaaaatcccttatagtcatgagagtattagagtctagagcttggcatttagagaatgaggccttaacagttaccagaacagaggtattttctagatctcagctaacatcccctctgcaacacatggaagcatctggatggtttccgtacaggacctaaagaagtgctgtctcttctgggtagaatggagaaaaatgtggccaccctcaagtttccatgggttacattccaagactattgttctttgttttagaatgtggatctcattgtcccaaactggcaagaagttcctgcctattaacttctcccattgcagagggagtaggaaggagggggaggaggcgacagaggaggaagaggagagattgggtttagggaaaaaaataattttagaatatcagggattgaagggaccttgaagatgatctggtttggcattgcccaaacttaactagttagcccatcaccttagttgaatcactttgcaaaaactttaataaatgtattacaaaagcagattttatatcactaccataaatggaaaaaactctgtgtacctttgtcataaatagaaggaaactgtaaaaacaaacacataaaaaaaacaaaacaacttgattcagttccagctggatataacttcctgtggaagctctgagctggaggcttattctctttttgttaaaaaaggagatagatgagtataaaggaggtgtttaagacatcttggcaccaaactgagactttcttctcatataagcagaattgaaagaatattaaatggaaccaacctcctcatgtttttcactatcatttaacttgtaccatctaacattatcttgcacatatcaggaattcagaaggaaatctccataaggaagtctcaccctcactgaactctcaatctctcctccccatagggttcccagcaccatgagggcctggatcttctttctcctttgcctggccgggagggccttggcagcccctgtaagtacctaaatatcatgtcttcttgttttcattcctaccgctagcaccaggggttctgagcctgccagccctggatgctgaaagggaacagggacttccccatttcaagttagtggtcttttttttttcttaagttaggaagctcgggataaaaactgggatgaggaccattgggtggaggtatcagagaagagagagttccatgtaatgttagataaacttcttagtagtcagagcctcccagcaatgaactaggattgctttagaaggaaatgacctctttgtcatatgaggaattcaagcaggcaggagacaggatgtgggggatttctggtaggggtggtattagaagagattcaagctatagagagaggaatgtgttggcttctgaaacagtgagggttgtttggttgtaagcaacagttcaatctgactaaattggggaaggaggggaagatacagaggtagattataatattaaaggccttggggaggactggaaaagggcagctctaggctttgggagttaagaactaatggacagtctctgagatattgctgtctgaatgaatcaactccagcaattttcacatcttgagagaatgtgccaagaaggtttttataaattcaaaaaatgagagccaatctggctgagcttgggtcctgagccagcttcttggccaggtgagagtggggccccttgattgacagacagttcctcgaagcattgcatgcagggacaggagtagttatccacagctcatctggaagccttcacaaggagaggaggaagaaacagggcaggcaaaaagtgcaatttctttcaacctgtgatcccctcatcctctgtttactaagaagtgggagtgatggcagaccctggcaatcttgatcaggctggtagatggaggcaaaagtttctcaaagttggcattaagttttgaagcagctccagccagctaagggcctcaaagttgtgtgttttcttgcttcctcctactccaagttgaaatggcaagaaaaattgcctaataatactactaataatatcacactgtgaggaagatgatgacatctgttaaaattcacagtgtcatcccctctggatgtcaattttcctatctgtaaagtgaaagaattggtctggatcagtgattttcagactttataagaattcaaagcagcagaaatacttttccaagctaaatcttaggtagacacctaggatataaaatatataaaatgggagctgcttgagtgttccacggtgctcacatgactggcttcttctttgttctgtccctcaccatggcagtccatgaggcacaactttggggatctccagtaagctgctctccaagctcccctagcctgtatccgaggccacaggcactttggaggtgaagctggccttattcctgacccctctgaacgctactttctctttccaacagcagcaagaagccctgcctgatgagacagaggtggtggaagaaactgtggcagaggtgactgaggtatgtgggcagtgaccgcagccccttagcccctctctacctgtatctgtgccctgagaaattagggcggatgctgtgggtctcaatgctagagtggggcattcgtctccctgtacacacatagcatagatgcaaaccctgagtatatcccacatcctgacacactcctgaatgcttcccaaaccttcaacggaaccctacgtttggggaccaggaccttaaaatttttgttttttaagctatgcaacagttgttcttccatgattacccacagtttttgcaaacgtaaaacagaggaggccgggtgcggtggctcatgcctgtaatccctgtaatcctttgggaggccgaggcaggcaattcacgaggtcaggagttcaagaccagtgtggccaacatggtgaaaccctgtctctactaaaaatacaaaaaattagctgggcgtggtggcgggtgcctgtaatcccagctactcgggaggctgaggtaggagaatcgcttgaacccgggaggtggaggttgcagttagccaagatctcgccactgtactctaccctgggcgacagcatgagactccatctcaaaaacaaacaaacaaacaagcacacacacacacacacacacacacacacacacacacacacagaggaaaggggagatgcttgggtgtggctggcaggggtggaggcttgacaccctcttgtgaacatagatctcagtcaatttagaaagtttactttgccaaggttaagaatgtgcctgtgacacagcctcaggaagttctgagacatgtgtccaaggtggtcgggagtacagtttgctttcatacattttagggagacacgagacttcaatcaacatgtctaaattgtgcattggttgagttcgctaaggcaagacaacttgagaagtgagggcttccaggttagaagtagataagagacaaatggttgcattcctttgagtccttgatcagccttcccctgaatacacaatttaatctggctcagtgaatctgcatttttacataaacaataggggagaggaagcaatcagataagcgtttgtctcaggtgagcctcagagggatgactgcatagaataggaggcaggtttgtcctatgcagttctcagcttgacttttccccttagcttagtgattttggggtccaaggtatattttcctttcacactctctttccctaacacccctggtgacctctaaggcagctcaacagaatcccaggcatactgcaaaacacagcaggcctatagattaaatctggattcccaaccctgcgtttgtgctttctgtgacctggaacccttcagctacccttatgggtctgggatgggagtggggccatttcacccattcttctccctcaattccaggtatctgtgggagctaatcctgtccaggtggaagtaggagaatttgatgatggtgcagaggaaaccgaagaggaggtggtggcggaaagtatgtcccttccctgtaacttggcacatccaagctgcccttggctgcctgggcctggggcacgaggacagcctacatgaggctccttccagcagaaatgcagggtggggtcctcagtgggctatgaaggaaacacggctttgacttaacaagtgggaaactgtggcactcagtcccctgggatctgggcaagatcggtttccaggccatccatgtgtgtggtaggaaggagagttctccagctggaaatgggcttctcccctcatagctctttgccctgagtccaaagctgagtttcccagtcccacggaggtcgctgatcacatctggtcaccgaaatctcccattgcttctgtatcagcccgtgccccacagagaagtagaactgagagaagagatcaggaacttgcacactcataagctcattctatttcacacagtccaaggaaacgaggtcctgaggaaatgcaacctgacataatccgtaccatgctatccatgcgttagtgccctgggagagaaatgacctaggggctctggctccagccctaggtgcaaagcatttgtactcaaggggttaagagcaaggactttggaagcggtccaaccaagctttgaacctaggcttctccacgccagcttgcttagcatctcggagcctcagtttctcatctctcatatggggctgatgaagatggcagacccttgtcccagggctgccgggaagttttcagacaagctgagtaggcatccgctaaaggattattaaaacacccaaaataaagcattgcgaggaaaaggccacattaagctctcatcctgaggggatagctaatggtatttgatctagctgggcacagggtttctgttgaacagagggacatctactgagtcatgttccttcccgcctccacgcccacctcatccggtgtttaccaggctctattgtccagcatgga

SEQ ID NO: 10623 - DNA, 6000 bp, Homo sapiens
ttcgagaccagcctggccaatacggtgaaacctcgtgtctactaaaaatacaaaaattagccaggtgtggtggcggccgcctgtagtcccagctactcgggaggctggggcaggggaatcgcttgaacccgggaggcggagggtgcagtgagccgagattgcgccactgcactgcagcctgggcaacagagcgagactccgtctcaaaaacaaacaaacaaaaaacaacaaaaaacaacaacaacaaaaaaacaatgaaggcgtgggcccccatcaatatcgggctgggctgggcggggcgaggtggcccctacaccaccgggggcagggcccgttgctcccgttagcggcgctctcgggccgcccctgccccgggaagccggtacggttctgggctggtcactgctctgcatccacgagcatcggccctgataccgcctagaaaggcccatcgttcccgcctcccgggcccctgcgcgcctccgtccagaggcccagaggaagctcctgagcggggaagcgccctgggcggcagcgaaggcagcggtcgctcccggcttcaaccgcccagtcccccgcgccacccagagcccctcacgcccgggaaagagccccgagaacgtgcgaatggggtcggggtccgcgcgcggaggagatgttgctgagaagggtaccggggtcccggagcgccgcccccgccgcccgccccccgccccggctgcggtcgacctgcactcccactccagccttacctgaggccgactcgcacgagcccacgcggggctgcgggagccgatcgggatcccggccgccggcccccaccccaccccctcgcggcgccggcgacggcggtgctgcggcccctttaaatccgggccgccccgccctgcgccgtcgactccgcggcggccccagatccaggccccagatccaggccgggccgcggctctcgccgcccagcccagcccagcccggcccggcccggccctgccgcggaggcgaggccgccagtgtcccgcgcccctgatatctgcagtgagcctgatacctgcctctgcccttctgagcctgttcctcttccctgagtacagggcacaaagcttgcgccctgaggggcggccggcgcgctccctggcccggtccccgcccggccccgggccccccgcccctccccgacccggggccggggcccctgccgccgccgccgccgccttccgacccctgcgccccggccccggtcccccgggccatgcagcctcggccccgcgggcgcccgccgcgcacccgaggagatgaggctccgcaatggcaccttcctgacgctgctgctcttctgcctgtgcgccttcctctcgctgtcctggtacgcggcactcagcggccagaaaggtgagcgcgacccccgcccggcccgcacctggcgcacctgggcgtcggcggcgggagcgggcccggcggtggccgcggaaggcggccggaagccgacgcaggcgccccttccccgcccgggcggcgcgaggacgcccctcccaccctcccccacttgtttgctgctggagccgcggcgttctcctcgggcccgggccgcgcccgtgggtgctccggaccggactccgcgggcgcagctgtcccgacgctgagctggggacccgtggggttctcggagaggggcagagacccaaggtcacagaggtcccggaacgccagccacagccacctgggcaggagctggggcggcgtgagggacacaggcgcgagggcacccccccaccctgctgcctgctgccccgcgccggcctgggcgaccccggcgtgacacccggtcctgggactcccttcggcgcccagaacgcgtcggcagcatccggcctgtgggagggagggagggagggagggaggcgtcctgaggcagcccggcccctgctgccctgcgctcccgtgcggccccagcccgtcctccgcaccccgagcttcccgggctggcccccgccctccgcgtgcgcccagcgctcttgcaggcggagggtgcgggccgatccccccgcgccgccccgctggccggtcttggcgatggtggggccgagtagggcctgagccctcggaggcgctcttcccccggcctggaggttccgggagagtggcctcctgcctgcctgcctgctggaggcctaagcgggctgagtccagctgcccctcggcctccccgccacctgcttccctgtttccctgtcccggagcgccatcccagagaggctgcggaggagggcgagggaacctggacccttccggaccctccgagctccatctacccacgccgagctctgccagcacgcccgcctgccgcacttgttctgccagagcagaggcctgggctggccttggggctccagggccagagaggcatcacccagggactctgcggggagcctgcctgacacgggagggatggctgggcagaggccgtgctggcggggtatattatcaagggcaggcatggctggggcagaattctctgtaggtagggtgtgtcacctggggaaggacattctgggtccttggcagggtgactataaaagcacactggcatgaaggcctaggtggggccatatctgaagggctggggcatgctctttgagtcgtgggtagagccgtgagcccttgccctttgtcctgagccagtgtgtgcctcccgcagcagccacatgcccgcggattgatgtcaggagccacctctgcaagcctggcttaccacagggagccaggctccaggacagcagagtgagggagaggcactggctccatggcacccactgtgtctggggggcatccaggaggctggctctctgagggcctggggaacaggagagcaaagaaggggagcacttagattcacgagcccagcccctaggggatagaagcctaaggatcctgtgaggtatgagtatggggtgacataggcctcccttgtcgaggggctgtcactgtttctgtggtgacccagtagtaccaggtctttggaggcctcaagagaagctgggaatctgggctcttatgtgaacccatctcgttgtcacatgtagaaaatctgtcttaaacccctggtgaaaccagacgtagccagtcggaggccagattggaacctggcctccactttgcagccagcgggggtccaggaacttgagggaaggacccaggaagtggaatctgcagggaaggaaggaggtgggcagggaaccagagaggaagggcagcaggtgtgggcatcatcctggaaacgcaaggtcaagcccaggacggcctcttagaccaacgcaaaatggaccctggagaagggtttggggcccaatttcctatctagcccgtgcagcagctctgccagcgctcaaactgtggccctcggtcaagcacctgctgaggatctgcccagggaggcagacccttgggggcagcccggggtctcagccatgcagcgctcccagccttcaggctgtccgcctccccaggcctggacttcagcaatgatggacacccttactcctaggaggttgcagggtctggagaggaggcagacacctgccacacacatgcatggtgacagcagaccgttaacgggcctgatatctgcctatgcccctctgagcctgtcccttttccctgagtacaaggcacaaaggttgtgccccagcttggctctttaatctttccccaaccaagagggaagcagggggaactgtggtttgtgggccccaggatgtcctaatgactcgcctccaggggagggtgacacagcctccaggcctcattgctgctgctcttaacaacgtggtcctgaggcaagaaagtgtggcaggggctcccaggctggtccctctcctcacctgagctgcctccccagctcccgagggttatagggtgccagcatggcttggcagagccctggcatagggcctggcccatggggaggcagtcacagagttggacccacagtcagagaagctgagggcaaggcgggtggaggagctggcaggcgggggaggctgcccagggccagggcctgcagtgtgtagggaaatgacagaagggttggtgtgggcgggagcccgtggggccctttatctcctggtaaacaggacccgggggagaggggaggcccctaggaaggaagcgagggtaaggcgcaggctgttgccagggtgattcaggcagcatcacccaccactgcccacccagcctgtccatctgaggcagtcgtgtgggacagagaaagccagggtggggctcgggggtgggggtgggcagtggctgtaagtaggcaagcggggactggcatctaggcaggagggaggcgcacctgcaggtgcaggtggctctgaacccattcctgatggctctctaggcctctgcacctccagtcccatccctgtgggcgagtgctgcctacacctggtgtcacccagcaatgggtgagccctggggatagccagctctgcattcaaggggttaggtttccagggtaaccgagcccctgagcccagcgtggagcctggcagagccagtaatctgactcccctttccctcccgccaggggctgtccagaggctccgctttgcctcagcctttagccccagagaggcagggtgtggagggtgggggctggcttcttgggtaagagatgcctcagggaagatctacctggctccctgctccttaaacctttccctcctgcccaggtccaccccttcctcttccctggtcacttggcacttcgacctcctgcccgtttcggaaaggggtgtgccctgaggtgactgaactttgcctgatcatgaccttgatcatgcacagggctgctggtggggtgaggccatcccacgcaactctggggtctgtgaagccaccaaggatcaaggaatggaagagctgcctgagtgtagagggagttcggtcaggcttcttaaacttggagacttggaaacagaaggccttgtaggccacataggttttcagagactcgcctggcagaggcctggagcgtcctgctgcgtggactgtgggcaccgagccaccaggaggttgttgatctcattcttgctcactggtccctgccagactggtggtgcctctctactgtcgggcagccccacctctgtgctgccccatccacctacagccctcatgcctgggcccagctggaggttctgacaggggccccctggggtggcatgcggacccttcagggtgccccaggcgcagcacaggtctccagagacacaggcaccagggcgttcagagctagtcccctcgctgctgttgactgtccttgagcagccccagggccggtttctcaacctcatttgctcacctgagcaatgaagtgaggtgggctcctggaactgcagcagccaccccccggggccatcgtgaggctaagaatccagtgcagggtgagcaaccagcgaccgctacaaggacagtgaagagctagcaccaggaccttgggtagcccacccgctggagggagcgtgtgctgcaaaaagcaagagtgggctttggaggccaacggatggagcggattcagtctgaggctgttccagcccttgcttaggatccacctacctaggtctggaaatcgtatttccacttcagatgccttctcagaggataaaataacccccggtgggggagagtactggaagagggctaattcccctggttttctccccatgagcattagtgtcagtgtaattttagagtgaccccagctatgtcacgtgtggcaggcacaagaacagatgtcaatgagctattgcagaggtggacacccagatgtgtgcgctggcacactggaggggcccgtagggtggctctagaccgccccctcgtgacggcttgcctaccacctgcaggcgacgttgtggacgtttaccagcgggagttcctggcgctgcgcgatcggttgcacgcagctgagcaggagagcctcaagcgctccaaggagct

SEQ ID NO: 10624 - DNA, 6000 bp, Homo sapiens
cttccctgccttcctcctgttcaggctgttcctttaacctttggctagaggcaaggatgaacgtcacctcctggacaagacttctccaagtctttggcaaccaggaccgtgggctgggctccagggccttgcagggcctccttccaaagaaccgagtctttcttcactggttctctcctctctctctctgcctggccacaatgccttctgaggccttatcaccctttgttaacacttgctcatccagactcttctgccagggccatctgggtcttttaaattggcattagagtttaaaaaaagtcaaatcaaactggtatttaacaaaaacattgcaggcggtggctcacgcctgtaatcccagcactttgggaggccgaggcgggcagatgacgaggtcaggagatcgagacaatcctgacaaacatggtgaaaccccgtctctactaaaaatacaaaaaattagctgggcgcgctggggggcacctgtagtcccagctactcgggaggctgaggcaggagaatggcgtgaacccgggaggcggagcttgcagtgagccgagatcgcaccactgcactccagcctgggccacagagcaacactccatctcaaaataaataaataaataaaaataaataaaataaaaaaataaaaacaacaacaaaaaactcctaatcattgttaatgtggaaatggttgccactggaataaatttgaaattatgtatttaaaaaaatctaaccagtatttaagttctgctatgtgtgcctaacactgttaggagcacacagttaagacacaagttcttgcattcaagaatcatattggaagacaagatttaagtaaatgaaagccatttaacggtgacccagaaaataaaatgagtctggaatgattaataaaatcatataatgacattgtgtttcctcatctgtggaatcacagaggatttgatcaggttatccataaagttccctcttttattccaaataaatgacactagatatttcaaattttattattttttatatataacatataatttgtattatactatataatataatataaaacataattatataatatattatataatataggtaattataatatataattataatatataaaatatatataatatataatatataattatattatatattatataattatatacaatatataatataatatataatttataatatataatataataaaataataatataaattgttatataataaaataatataacagtactatgtgccagacaccatggctgacaactcttccaactttcataaaaccatgaggtggccattataaatcttccatgtggcaggtggggaaacaggcacagagaggttaagaatttgcccgtgggcacacagcattgtggtacagttggcatttgaacccaagggagataaccagtgtgccatggcatctctgtgtagccctaacctcattctttcccatacttacttttcaaagtgtatttccttgcttctttaatgggaaaacaatgtatccttcttgggatgcctatttttctcttttccattaacccacaaacttggccttctcagttcaaacttgtacaatttgcaaccaagtttctaacattgtcttggctgggactcttctctagggatttggtttactggaatctacaaattttactccgattttagccgaaagtcctgtctcattcactgtatcgcttatctttttaaattttctcaaaacgtggtaggcaaaatcttcatcttgtagctcgctttttttctaccccttttaacattttgattccacagcctccctgggaggacctcctcatagtgcttcactgaaacctgagtttcttccatggctgctcctgtctacttcatccctgcagctgctgcacatccacccaagtcctctcaagacactgctgtgggactgagaaataggaaaaggaggaaagccagggacagctgtgccacagtgaattccaacgtagggcaacgaaagctcatcctgacagcgtactgcactttcgaggagcgtggcatttgagctgggaataaagtccgaggacatcaggaggtgaagggagagctaccgccctggctgagagagggagatgagtctggggtctgtgtgtccctcaggccagccatccctgacctctaccctggaacaaactgcctgtggtgttctgtatagtgccaaagcccagaaaacaacaaatcatgatttttttactcagaatattctcctcacctgggttccagctgagtagatctgagccatttcatgtattacatccagttcctcactgaaatgccaattgtttttcacccactcgagaaggcaagtcagcttgctgtgcccacagacatgacctcaaatgggtttgatttatttaggcaggtcagtcatctgaaaaggtcagcccttagcagttcctaggaattaatcagtggtgtgacacaacgcagctgtgattgccacaaaccagcgacaactgggtagtggcaggcacggtactaaattattaacccccagaagtttgtgcccgcccccccttttttttaaacttgccttgaatgccacctaatgagtgcttgctggggcgtgaaacagtcttgaacctacattcttgcattgttttggaaggcgtcctgtgttgatactgagtgggggcctcgtacagaccacattttgtcacaaaataaggtagaaaagagtgaatcatacacctggaaaaagatcagagaactgtgctttgaaagattaatagatgtgtttccctttttatgacgaatgaagattattactgacaattatttaaaatgtttctaataattacaatggttgttctagtttaaaactcatttcacaaaagataaagaattatacagttctaattaaggtttgggagtaatagttaaaactggttttccccaaagtacttttcaactgttcctgcacaaggagatgagtaaagaatttgctcagggtctgtgatgagctggaccctggaatgaagaccagaatccaagctcctgacctcagacccagcttagatgataaggagcgtaaatactcatactggagtttggttgttcttgaagagagatttatgatccccaaaccaggagttcctttttcccctggttgctttcaagaccttgtggtgacccacctactcccaggaggcaatcctgattaattttactgcctccaaaccggtctttgtgtcagcacttctgaattgacttcagtcttttgtttctttgttatttcttaagagtgaatttcctttctccatgtgacctgaaatatcttgaaggcaaaagacgcttctatttataactgtgcttccttgaccttcctctcccacccttctccctccatacccctcttcctgcctccctgccgcccctccccttccacacacaagtggaggcccagtgcaggaaaacctcagcctcctggcgtcaggaaggtttcaaattctcactggtaatggacacacaccgtctggaggagctgggctgaaaaattactggcctggacaaatgctcctgatttaaatgtaaattcagacttaaaaaatagacctggtgatattcagaacttacaatatcgtttaaacagactggctttctctgtgaagatcactctttaggagccctgaaaaggagaggccaggtgggaaacgggaactatgggaactgcttcctcagggaggggagtgcagggctctccaccaagtgccccctggaagctcaatgcccagcagcgccaggcgccttccgattgtatctgcgaacctaaagccctcagatgtttatgcagctctttgcggttttaaaagggttcccacacacatggtttcacctgatcctcatgagtgccttgccaggggtgaaggacagatttcattatcctcgctttatgaagaggaaactggatccctggagtccacggaaatgagaggagccaggatctgagcccacccataaatattcattgaattgcactaatatagaaatatatgattattttaaggtaaacagaatgtttgtccttaagaagctcatatctaattgtggagaaatgttcaaaaattttttttttatttatttttgagatggtgtcttgctgtgtcacccaggctggagtgcagtggcacgtactcgactcactgcaacctccgcctcccaggttcaagcgattctcctgcctcagcctccctactagctgggattacaggtatgcgccaccacgcccggctgatttttgtattgttagtagagatggggttttaccatattggccaggctggtctcaaacttctgacctcaggtgatccgtctgcctcggcctcccaaagtgctgggattacaggcatgagccaccgcacccggctccaaaataaacgtaattaaaataaccatacaaggaataaataaggcaagaccagacatccttcattgtaaaatgaggcgagaaagtgctgtgattttttaggggacttaggtaactgttaccccatgattgaatggaactgaaatttctgtatcttccaccccaactccattccatgttcctgctgaatattctgggttttgctagaattccttatgacacataaaaagtcttcagctctacgccttaggcatggcgatgtctgggtttgtcacgtcatcttcagtcctgtatttacagtgcaactcagggccaaaacaaaaaagaatttttttttttaatttaaaaagtcacagggaacatgaaaaaggggaagagggaaatttgtcttcagtgttgcaggaaagtccaccctctccttctaggggtggaacttagtggatctaatgaatcacacatgaaaagagacgtaaaagaggaaggagtttcaggagggtattggccaggtcaaaggagagggtggaggaaaagagccacgaaataaccgggagacaagctttcggaggcttttgactgactggatgtgggaatgttgtggaagacttctggcctgccatttcctgagaacgggactgctgagagaggagctgggaggagcactgcaaatttcactttggacacgtgagtcagaggtatctgtgaggggactgagttgggagggcaagcagggaattggacatgtgggcctggagcacagagaagggacttgagcatgcatatttgggtgttccctccaaaacttatgttgaaacttaatccccagagtggcagcatggagaggtggggcctttaagaggtgattggatcatgaaggctctattcccactaatgaatggattcatcatgggagaactggcggctttataagagaggaagagagacctgcgctagcaccttagcacgctcagtccccctgccatgtcatgccctgaacccctcaggactctgcagagagttcctaccatcaagagggctctcaccaaatgcagcccctcaactttggacttctcagcctccagagctgtaagaaataaattccctttccttataaattacccagtttcagatattccttgtttttaatttttaatttttttttttttttgagacagagtctcactctgtcgcctaggctggagtgcagtggcgcgatctcagctcactgcaaccaccgcccccccgggttcaagcgattctcctgcctcagcctctggggtagctgggattacaggcacctgccaccacgcctggctaatttttatatttttagtagggatggggtttcaccatcttggtcaggttggtcttcaactcctgacctcatgacccacccgcctcagcctcccaaagtgctgagattacaagcgtgagccactgcacccgaccccagtttcagatattctgtcataagcaatagaaacagactaagtatctttgacatggagtggatactggaagccatgtgacttctgtgggatcatctcgaaagaaagtgtaaaatgag

SEQ ID NO: 10625 - DNA, 6000 bp, Homo sapiens
tttgcgtaaatccttggtttgaaagaccaagaatggtgagaagccatccttggttgtcagaaagaatcctgtctcatccagcaaggtgatttttagcctcatatatttaaaagttggggtttttttctgcctcataatcaaaccatgtttcaaaacaagagcctgttcccagtattcctacagaagttaaaccagtccttttacatgaagcaaaatggtatagaaataaccagcaccagggctcatccaatccataccaaagggcaccttctttatgaggaattttgttttctggatcgtcagtgagtctgggtctttttcagcctcatcagagagtgtggcaagtgagttccacaagggccgtagttggacaatttgacacttgttcccacctcttggtaacccaggagagcaggggccagaaactcagacaaatcctggagcagttccaggcacttggactacatggtggtttcagggcccccgcttttccctgtggggttgggggcaggagcaagagagcctgacccagaccaaggggtgcactgagctcccactgagcatctgagatgctcttgggatgccacaggcttcctgtagcagtggccactgcagaaactcaaacctgtctgtcccacctgcaagacccaccaggacaggagaagccagaggttcttcttactcccagctgtgacttcaggtgccaagaaaaaaacataaggtttgaccttgggggtccccttgccttccatttggtggtttcagtttcaggcatcttctccaccccatgcactaccccaatacctaggcccccttttttctcaacaaggccttccccatcaaaaattacttccatacttagagatttctttccttttttctttacttgcatccagtggacccatcctgtgtcccagttcctcagagcttgtgtatctaagtaagttactaaaatgttctagaagaatttcacaaagctcatgtaaaaaactaagttctgaggaatatgaatcgctgctttgtacacacacacacacacacacacacacacacgcattcacgtacacgaaatgggaggaggcttctatggtgaaatacatttggataatcctgagtaaacagacaattctctctcttctgcagaatttctcagagcctttgctatgctctgagcgtctaagaggtgagtacaggacacagatgttttctctgggttctcccagtctatagtggacaagtcacctgggaaactaagctttggcccttgcttcccttccctgtgtttctagaacagcttcaattcagactgtgcaggattccacaggccactagatggcggtgtttctctgtagcaggtggccccgcataagacagagccaatagctgttgagacaaagctaggcctagcgcctgtactcatcaggggcgcacagtcctcaagtaaccagtgctgcctgattaatactgacctaccacacatgcaacatttagggcatttatgttgtgtttacttgagtcacatcatgttccagggtctgatttgggtgattttgtttgtttgttttaggtcccagtgtatatatataaaaaaagcttctgtaaatataagaaaactctgtatataaaaccacaaattaataaaacacataaattatgcatgctaaagggaatttctctttaatataatttaatatattaaatgttatgtcatttattatattaaaaattaatatactaaatttttatatttaatatcaatatattatttgatttaaaatattaaattatattaacataatatgttaatatttaatactaaatatgaaattttaatatattaattattttaatatttttaatttaatatattaaaatatgtttaatatattaaaaataagtcatttcaaattaattggaaaagagaggttatttaattattgttacacaagtaattcggttgttatataggaaaaaaatttcaattgcgtttatcttacagatgaattaaagagtgaaacatgcaaacatacacattaaacaaatacccagactcttttcgctgcagtccttcagctaatgaccatgttggctgttcccagtccctcattctggtcattttctcttttagtaattggaacttgtaatagcacaattctaagatggttgccaagattcctgcacctttgttagggaaccaggagcataggagagccagggtgacaacattaaaaaaaaaatcaactccatcttaaaactagcaaggtacattccttgtcagtcacatggtcatataagatgtctatggctaaagaagcagcttagtaatgtctgcaaagacaaaccctaggacaaccaaacattcagacgccctgatatcgcataacaatatatacttttaagatgattagagtcaggccaggcgcagtggctcatgcctgtaatcccagccctttgggaggctgaggcgggcggatgacctcaagtcaggagtttgggactagcctgggcaacatggtgaaaccccatctctactaaaaatgcaaaaattagccaggtgtggtggtgcatgcctgtaatcccagctacttgggaggctgaggcaggagaatcacttaaacccgggaggcagaatttgcagtaagccgagatcgtgccactgcactccagcctgggtgacagagcgagactctgtctcaaaaaataaaaaatataagatgattagagtcatgctttgatgtatttatgcactaaaatgcgaaggataacttcctttagaaaacatttaaaccaactacatgagccaaattcaaggggatttcttttctgtggatggtatatcattaaacacccccagaatgggagatctgggggtgtttagtatagatgttgctctttagatagttgaagggctgctagtttagggaaaggttttgtttgtttttcctttgtggctaccgtcagcatactataataaagatctctgtacctagtagaatggtccagcacgggagcgtgccaccttgtggaagagtgagctgctcattgtgggaagtgtttgctccggcaggatgggcatccatcaaggatgctgctgagaggagccctggttgttggggaagttagccttccatgcccacagggccctttgctttgctaaggtcccgtgaacgtgggaaagaaaccgtggtcccttcaactcttttttttttttttttttgagatggagtctaactctgtcaccccaggctggagtgcagtggcgtgatcttggctcactgcagcctccgcctcccaggttcaaactattcttctgcctcagcctcatgagtagctgagattacaggcatgccctaccatgcctggctaatttttgtatttttagtagagacagggtttccccatgttggccaggctggtcttgaactcctgacctcaggtgatccacccgcctggacctcccaaagggctgggattacaggtgtgaaccaccacacctgaccaactctttatagtctattgggaattccaagctcctcaaatggaaaatttgctttgcctggactgcagggcttctggcttggaggctgctgtccactggggtgtttttctgtgtgtgtcaccatatggcacaagcttttagatataaatgtaagaaaatgaaaaaaacacatttcaactaatcagtgaggccattgccacagaaaaaaggcaatgtagaaaaaattaggtatactggaaatggtagagagaagtggggaataggaagagatttgttaaaggatacaaaattacagggagataggagaaataaattctggtgttccacagcactataggatgactatagttaacaataatatatagtttcaaataactggcaggaggacatttgactgttcccagcacaaagaaatgatacattttgagatgggatggatatgctaattaccctgatctgattactatatatgtatcaaaacatcactatgtaccccataaatatgtaaaattattatgtgtcaattaaatttttttcaataaaataaaagcaaaaaaattaggtatagggttaggttaaaatataatcatgttggccaggcgcagtggctcacacctgtaatccaggcgctttgggaggcccaggcaggtggatcacctgaggtcaggaggtcgagaccagcctggccaacatggcgaaaccccaactctactaaaaatacaaaaattagccaggcatgatggcacatgcctatagtcccagctactcaggaggctgaggcaggagaatcgctagaaccctggaggcagaggttgcagtgagccgagatcgcgccactgcactccagcctgggcaacagagcaagactctgtctcaaaaaataataataatagtaatgtttacaacatttaaaccaactacaaagagccagaaagggctcagtggtcacttcaagctctgatgattttggatgtgattatttgtccctatatatactcacttaaatgaagcatagtttgactattttttattcagtggtgttatttctcgagggtgcctctgcctttgttaatcagaaaataaccaggggtctggaatcttgcaatggggggtggcgtgggaatgagggcgatattttccactagggagagagaagaggcagctagctggcttatcattcctttttcacatgcagcctacagccaagaaaagtaataatcattgacaaggtaagtaactcttgagcaaggagctgtttctctagatttaaaagaaatgcagattgtcagttgaaggtgagggagcctcagaagtgtcagacagctgattctaaacatcttcttggtccaccgccacgcccaccttcaataagccgagaagaggtgaggaggcgggtggctgggtgccaatcatgctgaggagagatttccagtggttccccgcggggctcatattcacattccctaagaggacgttctggactctcgggcagagctttgtgagagaaacaaggctggcttcaagtgatctgcaaccagagtaattgggatttgacaaggactgtgaaaggctgactctccctgttctctttcatgctggcaccgggcagagtgtgggaactactgcctcaatagtaagtacagtaagtcctgtgagaaactgcgagagcgctctgggctggggcaggccaaccgcatgcagggggacccggggtgagtggtgtgggagctgggacatgcctacgcgtggtgggaagcctccccgccggccagccagaggacacttctctcctgagctgggggctgagccggcagctgctgggggcgcccacagaccccctcggaagctcatgtgcagagccgatgtgtggcaggcacgtcccaacccttgcaaggagttcaggggaaagatggctgttggccacaggcccaccgccacgggccaacaacagcagggacaggccctggcggtacctctcccccgtgggggtgagccaaacccaccagggactccttggttccgtttagctccgggaaggcctcccccaccgctcagcttggatcttctctcctccttctcccttcccagccatggtgtcctgaaacgaggggccggctgccccggctgagagcttccttccacctcctccatttttgcagttccctgccgctgtatcctccttctccctggcctttctgtctattcctctgggtctattccctcccctccttttccggcgccgccttctttccttttctgtttcccgtccttccttgcccggtggctgccttctctcccggttgtcttcctcggcactttctttcctcctcttcttgctgcagcgtcccttctttctcattcatgccacccgttttcctactcggctcctttcccgtcctcttgccattttgccccccaactcttttttcctccctgtttcccttcctcgtctcctcttcctcctacctcccttagtcagaagggagtggctgggggtgcag

SEQ ID NO: 10626 - DNA, 6000 bp, Homo sapiens
catttcagtaaagagcttcaaaatgggtacaggatcttttaaaaatgtatgattgaatggcatgtgggcagccctatcacaaagacccctctggatctgtgagtgatacttaccaccagtaattagagcaaataaatgcatactaaaatacctaaaccctttatcacacaatgaaattctgacagaatctatggcctgaatatgggtgggactgatggagttgagaaacctctttaaatatgtgaatgaaatttttttcagtcccataacatattaagggagtttagcctaagggctcagcagggttcccaaggcatgaatttggacaggaatttcctactgtagtacatccaacttgagccttgtggacccaaagcaccataggatccacaacatgctacagtataagaatggagatttctcaacccctctggcgaggacagggctgctaatgaacaagaatttgagacatgagccctttgactatttttctctgtcttctacccaggcctacctagaaattttgggttgagaaatgtatggctgaaaatgccctaagatgtttgaagttctggttggtaagaccacaagctctaccaggtatctgtattctgcaagtcagtagtgcatgaaaaggcattgttacttatttacagtgatattttcctatgttatagccacagctgaccagtcagcagcttcatttgaaatggaaatgtctcagactggcttcagtgctcattattcacaggtatgttgaccagttggtgaaaaatgaaatatatgtttgcaagacttcccttcccaaaccaacatctagccatcagtatgtaagtgcaacgtgcagttcatagcttgaacaattatgcaggctatgatgatgttttctaattcaaataggaaaatatcatttcacaagcttcttattaagaaaatatgttctctcacacagttcactacattgtactaatagttgtgaatcagacagtgtgagctttgccttgtaattatgtatctgtctaaatgaaataatttaacatatttgctacagatgtggaatatttttccacaggtcaaggaattcaagggtcttattagaattccatgttcaagacctaggatgctgggcacccagaataaagtagaaagacaagattagaaaatatatcatttgcagttaatgaaagaaaaggcataatggtccttgcaaaagaatattgacatttccatgtgcaattttactgtataacttgggtaagttatttgtgccttgatttccttttctgtaaaacaggtatggtagcaatagcatctaactcatagagttatcatgaggattatataagctaacaaatgtaaagcactttgaacagtatacctatacacattgttaatggtgtttaagtatttccccttattatttttattaaatattattatcttatttatttgcatgtaaggactgggtcatgcttggagcagtaggagcctatgattggaatggaacagttgtcatgcagaaggctagtcaaatcataatccctcgaaacacaacctttaatgttgagtctaccaaaaagaatgaaccgcttgcttcttatttaggtaaggtttggatataattataaaagagttgttttacttttccattttttacctttagcattatttgcttatgtttctataggcttgcaaccatatagcaggattatttcaacaagttgggtattttccagaacccatgcaaagttttaggcctctgagcagctttagttagtcaaaatgacatacatgggggtccttttttgttagtagggctgtctaatgcagggaatggtttaggttgatatgtgccctttctgatatgttcagtttctctgtgtctggtatcaactttaacttcaaggagaactttgaacctggtggacaagaaatgagagtagaaaaggaaacctcgacttctcctatatcctgaaaaccaaactcatattgtcttaaatgtcttctatcattaatttctctctatgggtcctaatttgggaaaagaaaaatgtattttgtcatgtaacttcttctttaatagctccattcacaatcagacaaatattgaacttaaacccagtgatataacatgatcttgtttcccagtgtcttgccagaaatgaggagttgtatgtctggtaccactttatttgggatctataccaagctgagcaacacctgggggatgccagggaactctcccctcactgaaaaaagatattcaccaacagttgggaggacctaaaataaaaaggaccatcaggatatggcttcccagctcttactcactcaacaaatatttgggggatcctcttttgccccaggcattgatcttagtgctgggaataaagtgataaagaaaacacataccttggcctggaagcattcacagcttcacgtgttagccttcctctctgggatctttctgtcccggagacaagtctttttctctctgtcccagttgctttctattttatcaggaaggtggcaggtctttactgcggtgtttatacatctccttattgaaggacacctattaaagctgtaggagcagcaggacttaagaagaataaaaggactagagttttagatgactaaaaatgtaacagtcaacagcagctgcactgtgactgctaaaatctcttaagacatgtagaactgcatgaatgaaagtccagtctgtttctcatagaaatcctgttacattccactctggtcagacaacagctagagtatctggttgttctaagtatcacatactacaaggagaaaatgacaaactaggatgtgccagtaaaatattacacagaaaagtcagctcccgaagcaattccctgctacaagtctcactctctcgaaaacttaaagaaattgaaggttagaaaacaaagtgtgcattgcatgtattttaggtatttggaggattgtgatataaaatataggggttaggcttaaaattcatttcaaattttagcattaaaagagatcctatggagcatgtagtcttaatttccaatcaagaaactgagagatagaacaattatgtcccagctgcctatggcaggtgtgaaaccacaattgaggcttcttgattcttatgtcagtgtttatatcacgataccaaaataactgattctgggttgattaagaaagcactgcacaaatattgagtaccagcaatgtgccaaacactgagtttatagggaataaaaagatagatggggcaggtcagttcctacactgataaaccttacttttttgggtgagagacaataatgaaacaagcaatcactatcagtatgatatgtgctatgacacagaatacctaaaaaagagggctggggattagattagatatcttctaaaagttcattacatcctaaggttctatgagactgtttatgtgaaataccttggaatcaagaaccagcttaacctgaggcttctgttatatgtagaataaatatagaacatttatcttcctatataatggatgacatataaattagtaaaactccttatgaaaggcatttgacaatgtgtttacagagctataaaaaatgttcgtaccacatttatacagaaatttcacttctgtggacctaacctagggaaaaaaatccaatatttaagaatgccaagtgaacaatgatttccattgtattattatttatgttattgggggaaatgccattatcctaaatgcccgaaaatatgcaggtagttaagtaaatagtaaatccacttaatgaatattacacacccataaaaataaaaattataaagctgctgattctatgatactaaagacttgaagcagttatggtacaaggtgtacaattagcgatagcgatgaggtcatagagacttgagcttgttttctgattctgcccctggctatggctttaggcaaattactctccccctcaaagcctcaattttcctatttctaaaatggaaataattacaccatatatatcatttgggttgttagattaagtaatgactatatttagtactgtgcctgacacacagttaacactcaatgggtgttgtctattattttattatgtaaatgttattatgtatttttttattgtgtaatgttatataataaacattcctcttattagtattgtggtaggcagaataatgatccccaaagatgtccatgtcctaatccctggacccatactttgcatggcaaaagggacttttcagatatgatgaaattaaggatcccgagttggaagattatcctcagatatctggctggacctgatacaatcaagcattctaaaaatcagagaacctctcctggatgtggccagagggagacagaactatggaaaaatggtcagagagatgcagtgttgttggctttaaagatggaggggggccacaagccaaaaactgtagatggctctagagctacaaagggcaagaaaaccgattctccttgataggctcccgaaaggaacactgacctgccaatatcctgatgtttagtccaggaagctctatgccagacttctaataaacagaatggtaagataaaaagttcatgatgctttaagccaccaacttgtggtaatttgttacagcagcagtagaaaactcatacataatacaaaataataatagtagctgacattagtactattactaataagtattgagtatttacaaatttaaagacactgtgtgaagtccacaaagatgtgtatgatattgttgccactcttaggaagcccacacattttaattgataacactgtagtttttggtattcttaattatatgtgattaaattcctttaaagtaaataaactcttaagaatcctaaatttgtcattcccaaaaacctttggttaaacgttgcttaaagcagatgtggagaattcaacttaaagatgccactgcaagtaagaaaatattaagaatcttatttctgagcacagtatttataatatatgacttctctctgtccaaaaaggaaatttttgggtatgttttctacagtgtgctgagattttcttttctgtttcagaaattatttcattagcttactcacaagtgagggtatatgacattttgccaacataaagtctaatacatgtaagatttctttcaaaatagaaaagcattcagaaaaggcaggacaaataccttgtgttttttttcacccaaaataatattctaaatctgaaatgaagttttcaaaatgtttctttgtgggggtcacaaattgagaagagactgagtgtattttttcataaactgtgtggattgcaagttgtaaggctatgaaaaatcttatgaaggaagcagaggcagaggctctgttagaaaaatcccatgcttatcaataaggatcaggaaactgtaagaactcaagctgtcaaacatctgtctcaggacatagtcctaccccatctttctattacccaaactgccttatgccaatacaggcattgcaagtgaatttggtggtgaaaatacagctgggattatgttcccctgcctcctccacccacagtttgctgaattctattcctgccatacagcttccaaaggagaaggaaagatgtgaggcaatgtcatggcatcaagacagatcatacctgtttcccattacctcactagatcctggcccttttcccaagaagtgaattatgagagctgacagaattcattcttcataaatccatgcaaagggctatgccatccattttagcctttttttcctcttttttttttctctttatttgagacagagtttctctcttattgcccaggctggagtgcagtggcatgatctctgctcactgcaacctccacctcctgggttcaagtgattctcctgcctcagcctcctgagtaactgggattacaggcgcctgctaccatccccggctaattttttatatttttggtagagaccgggtttcatcatgt

SEQ ID NO: 10627 - DNA, 6000 bp, Homo sapiens
ctttaagtaaaattaatttttggccgggcgcggtggctcacgcctgtaatcccagcactttgggaggccgaggcgggcggatcacgaggtcaggagatcgagaccatcccggctaaaacggtgaaaccccgtctctactaaaaatacaaaaaattagccgggcgtagtggcgggcgcctgtagtcccagctacttgggaggctgaggcaggagaatggcgtgaacccgggaggcggagcttgcagtgagccgagatcccgccactgcactccagcctgggcgacagagcgagactccgtctcaaaaaaaaaaaaaaaaaaaaattaatttttattgcagcattgcataaatactgtcaacttaatttgcaggagctatcctgtagcctgcttgtgacatttgcaactgctgatgaaggtggacgattgaattctatggcatgtaaatgctttgcgtaatcacagggcaacggggaggatgttcctgagaaatgagattgtttataattatggttacttttgacacaccctcataagattgctcagtttgtttccaaataggtggagttctctgtgtttaggggcggctgacagaatcatgtgtaatttttttccttgaatattgcaaagatgactttacacctaggaaaaaaagtcccagaattacaatgccaccataaaatcttttgagggaaaacataatgtgtctaatgtataattatgggtttatgatgttaaaccaatttgttcacaagttagtgttccttctgggttgcagctaagattttaactcaaatgaattaactttttaaaacaatgaatctgattgacataatgaggaataatctgagctgaagagtttttttttcagggaaagagggttagaaataattttgacctaattttgaaacatgtagttaatttactttctggaactttgatgctaattgatcctttagaacagttggtagagttgtgttttaaatgtaggaaagaaattatgtgatagaataccatgatgaaaatctagccttttagtgagtgagtcttttgtttataattaagtagagttcaaatctaagatttgattaaagatttccaatacttaaaagtccaagtacctgctaatttaatagaaagtattttgttgctgttgttcattttccaggatagttccaagttgactgtctctaatctgaagatctgaaatccgaaatgctccaaaatctgaaatttcttgagcaccaacctgacactcaaagaaaatgctcattgcagcatttggagtttggattttggattagggatgctaagctaataaatgtaatgcagatattacaaaattcaaaaacatccaaaatctgaaacgcttctggtcccaagcattttggataaaggatactcagcctgtatgtaaaatgtttctccttcccgtaccccattaataagttccctgaatgctctgcatttagccttaaactagagggcatgggttacatccatatctaggtgccttaaaaaaaagtcgtctttaggtctgtttcaagatgtgtcataaaatacatgctactatagcttaagaatttaagccagcatttgttgagcaatgctgtatatgagtgcaaggtgctggagggtaaattgatgaataagactcagggtggaaggttgaaaaagcatgagtaaacacaggcaggtacatgccacatttatattcctttaggtactgccagctttttaaaactgtgacccacagtaggaaatacacgttaatttaaaagccagacacacacttatataggtatagtttcttgaaacatagttttaagaaataatacctacccatactacctggcttacccaacagctattttttataatattgttttctattttattttatttaaaaatgtttgttcttaacgacaaaattgatgtcatgatgtaattgatgcagttgttgtggatcaacagtttgaaaactgtttagctagtggtgtggtatgtctgaaatgtagagaacatggagtgatgcagtgagagatgacacttggtatttgctttggttccttaaagctgctctttttttttttttttggtctttcccctaaccctttataaatagattaatgctttctttcacttacttgattgcctttttatagtctgtcttcaacagatgaatcacttttatttattactaaatgtgagattcatttgaattcttgctagagtggcagttaatgagctttttaaatctttttggttgatttttgcaggttactaatatgccttatcacaggcattgattttagtgaaagaagtaagacttgcaggtttatttgtggagaccaatggtaatagaagatttgttttcaaaatcagaatgtcataattattatttagcaaacaggaaatttagtcatggtagtcagtaaatcaaaatcttctatatgttcttttgggaatttttttgaatgctatatacagatacttcagccagtcatcctcttctagtactgttccagcttttgattagttgtgaaagtttggagcttttcacatctaatgcttttccattggtcttctagcactattgttgatgaatctgctagaagaaaagcagccaccacagcaaaattcttaaccctgttttattaatgtagaaacatctatcagaaaagactttttttctgttgacagcaatgttaggaaggtttattaaacatccttttgctagtgacattatgccatatgttctatggaatgaaaaagtacaagaggtccctgcccttgaggatcttatcaactaacatgatttatagcaggacactcaataagtggattcttgggtgtttaccttttgtgtaatcagaatgtagatgatgaagaagatacttaacatgcattttatatctaggtaattagaaaatgtgaatagctgtttctcacttgtgttttctgcttgattgctcttctacttgcaaggcttaggtaataaggtcgagatacttatctggtttgatcttaaatgtttgaattcatataatttttaagaaatggctgctttaaagttggttgccagtaagtaataaaggatttattgtttgagtgaagaagaaataacatagttctcttaattttataattattttccagaattataaggaacagtatcaaatagtcatatgtatgggacactgtgcatacaaagcagggtttatagcacacttttccttaaaatcttttcctaaaaatacaatgagctgtatactaagtgttcacccttgatattccttccaggatccaaggattctgtagctacaatgttgtcaagactttttcgaatgcatggcctctttgtggcctcccatccctgggaagtcatagtggggacagtgacactgaccatctgcatgatgtccatgaacatgtttactggtaacaataagatctgtggttggaattatgaatgtccaaagtttgaagaggttagtgaagttaatttgatactgactaaagtaaattacattttcaatttttgaagagcccttaagcccctatagggagcacataatttttaaaagttagagtaaaatatttattttagtattttggaacttacctcaaatttctgcttacatggaatgcactggaaatgctcttattttgctttgtctttacaaatgaatgtaattgactttatttgagaaatacatcttttataagtgactaatagtcaaaaatgattgtgggccgggtatagtgactcatgcctgtaatcccagcactttgggaggccaaagcaggagaattgtttgagcctaggagttcaagaccagcctgggcaacctggacaacatagtaagacccagtctttaaaaaaaaattaaaggccgggcacggtggctcatgtctgtaatcccagcactttgggaggccaaggcgggtggatcacgaggtcgggagatcgagaccatcctggctaacatggtgaaacccgtgtctctactaaaaaatacaaaaaaattagccaggcatggtggcgggctcctgtagtcccagctactcggaaggctgaggcaggagaatggcgtgaacccaggaggcagagcttgcagcgagccgagatcgcgccactgcactccagcctgtgtgacagagcgagattccatctcaaaaaaaattaaaaaattagctgggtgtggtagcatgtacctgtagtcctgctactcgggaggccatggcaggaggatcccttgaacctggaggttgaggctgcagtgaactgtgattgcaccactgtactctagcctgggtaacagcatgttaccctgtctcaaaaaaaaaaaaattgtggtgatgtattggcttaccacagtggtttgattaaaagttggatttaatttttgatttgtaggtttgatatttttattggacttgtattgtgcttacatttatgttctcatgactatataaatgaattacacatgcaaaataaaaattcttagttttgattacttattttaaaagtcaaagctaatggaatttccttttctttctctcctattaggatgttttgagcagtgacattataattctgacaataacacgatgcatagccatcctgtatatttacttccagttccagaatttacgtcaacttggatcaaaatatattttgggtaatagttttacatatttaacttctggtgtcatcagatttttgatttgctgtggaaataaacctgttcattcaaatcatgtatttggaaatatgtgtattgctgaaagtgtgctgcatgcattgaatagtttccttattattggcaattagacattctgaaatttgagaccttaataatttggagtaaactagtattatctcagaatgctgtgtgacactgttattatttgtgtagtaaaggataaagtttttttagtattgaacttttgtcattttaggtattgctggccttttcacaattttctcaagttttgtattcagtacagttgtcattcacttcttagacaaagaattgacaggcttgaagtaagtatttaaaacctaaatatactttctgtcaaaatacattttaaaaaacttttcttccccatgctgtaaaggtacattttcaaaagttaagaaaataaggggaaatttttttgtataattttactattagctaattttaataactattaacattttggcatatatccttttctactgtttttatacttaaagaaaatatctgatatcatatatattgttttataatttctttatgcttaataatagtttatcaacatctttccatgtcccttttttttttttttgagatggagtttcgctcttgtcacccaggctggagtgtaatggcacgatcctggctcactgcaacctccacttcccgggttcaagcagttctcctgcctcagcctcctgagtagctgggattacaggcacctgccaccatgcccatttaatttgtgtatttttggtagagactgtgtttcgccatgttggtcaggctggtgtcaaactcctgacctcaagtgatccgcctgccttggcctcccaaagtgctgggattataggcgtgagccactgtgcccggcctccatgtccttaatgttaaactaaattgtttgtaatggctatatgtattctcttctgtctaaacgtcttgtagtttattaatcatctaatgttggactgttaggttatgtaattttttttattaataacaacactgtgatgaatgtctttgtaacgaaatttttgttcatatttgtaatcattttcttaagatacattcctagaagtgagacagtggttttgctttttttagagctttgcttttttttttttaagagctttttagtgctattattgccaatttagtttacagaaagtttgtttagtttatccttccacaggtagtgatcaatgaaaatttttatatattccactttttttccctaatggtaatccaag

SEQ ID NO: 10628 - DNA, 6000 bp, Homo sapiens
gtcccaccaacagtgtaaaagtgttcctatttctccacatcctctccagcacctgttgtttcctgactttttaatgatcgccattctaactggtgtgagatgatatctcattgtggttttgatttgcatttctctgatggccactgatgagcattttttcatgtgttttttggctgcataaatgtcttcttttgagaagtgtctgttcatgtccttcgcccactttttgatggggttgtttgtttttttcttgtaaatttgtttgagttcattgtagattctggatattagccctttgtcagacgagtaggttgcgaaaattttctcccattttgtaggttgcctgttcactgtgatggtagtttcttttgctgtgcagaagctctttagtttaattagatcccatttgtcaattttggcttttgttgccattgcttttggtgttttggacatgaagtccttgcccatgcctatgtcctgaatggtaatgcccaggttttcttctagggtttttatggttttaggtctaacgtttaagtctttaatccatcttgaattgatttttgtataaggtgtaaggaagggatccagtttcagctttctacatatggctagccagttttcccagcaccatttattaaacagggaatcctttccccattgcttgtttttctcaggtttgtcaaagatcagatagttgtagatgtgtggcgttatttctgagggctctgttctgttccattgatctatatctctgttttggtaccagtaccatgctgttttggttactgtagccttgtagtatagtttgaagtcaggtagtgtgatgcctccagctttgttcttttggcttaggatagccttggcgatgcgggctcttttttggttccatatgaactttaaagtagttttttccagttctgtgaagaaagtcattggtagctttatggcgatggcattgaatctgtaaattaccttgggcagtatggccattttcacgatattgattcttcctacccatgagcatggaatgttcttccatttgtttgtatcctcttttatttccttgagcagtggtttgtagttctccttgaagaggtccttcacatcccttgtaagttggattcctgggtattttattctctttgaagcaattgtgaatgggagttcactcatgatttggctctctgtctgttattggtgtataagaatgcttgtgatttttgcacattgattttgtatcctgagactttgctgaagttgcttctcagcttaaggagattttgggctgagacagtggggttttctagatatacaatcatgtcgtctgcaaacagggacaatttgacttcctcttttcctaattgaatgccctttatttccttctcctgcctaattgccctggccagaacttccaacactatgttgaataggagtggtgagagagggcatccctgtcttgtgccagttttcaaagggaatgcttccagttcttacccattcagtatgatattggctgtggggttgtcatagatagctcttattattttgaaatacgtcccatcaatacctaatttattgagagtttttagcatgaagtgttgttgaattttgtcaaaggctttttctgcatctattgagataatcatgtggtttttgtctttggctctgtttatatgctggattacatttattgatttgcatatattgaaccagccttgcatcccagggatgaagcccacttgatcatggtggataagctttttgatgtgctgctggattcgttttgccagtattttattgaggatttttgcgtcaatgttcatcaaggatattggtctaaaattctcttttttggttgtgtctctgccaggctttggtatcagaatgatgctggcctcataaaatgacttagggaggattccctctttttctattgattggaatagtttcagaaggaatggtaccagttcctccttgtacctctgatcgaattcggctgtgaatccatctggtcctggactctttttggttggtaaaatattgattattgccacaatttcagatcctgttattggtctattcagagattcaacttcttcctggtttagtcttgggagagtgtatgtgtcgaggaatttatccatttcttctagattttctagttgatttgcgtagaggtgtttgtagtattctctgatggtagtttgtatttctgtgggatcagtggtgatatcccctttatcattttttattgtgtctatttgattcttctctctttttttctttattagtcttgctagtggtctatcaattttgttgatcctttcaaaaaaccagctcctggattcattaattttttgaagggttttttgtgtctctatttccttcagttctgctctgattttagttatttcttgccttctgctagcttttgaacgtgtttgcccttgcttttctagttcttttaattgtgatgttagggtgtcaattttggatctttcctgctttctcttgtgggcatttagtgctataaatttccctctacacactgctttgaatgcatcccagagattctggtatgctgtgtctttgttctcattggtttcaaagaacatctttatttctgccttcatttcgttatgtatccagtagtcattcaggagcaggttgttcagtttccatgtagttgagtggttttgagtgagattcttaatcctgagttctagtttgattgcactgtggtctgagagatagtttgttataatttctattcttttacatttgctgaggagagctttacttccaagtatgtggtcaattttggaataggtgtggtgtggtgctgaaaaaaatgtatattctgttgatttggggtggagagttctgtagatgtctattaggtctgcttggtgcagagctgagttcaattcctgggtatccttattgactttctgtcttgttgatctgtctaatgttgacagtggggtgttaaagtctcccattattaatgtgtgggagtctaagtctctttgtaggtcactcaggacttgctttatgaatctgggtgctcctgtattgggtgcatatatatttaggatagttagctcttcttgttgaattgatccctttaccattatgtaatggccttctttgtctcttttgatctttgttggtttaaagtctgttttatcagagagtaggattgcaacccctgcctttttttgttttccatttgcttggtagatcttcctccatccttttattttgagcctatgtgtgtctctgcacatgagatgggtttcctgaatacagcacactgatgggtcttgactctttatccaatttgccagtctgtgtcttttaattggagcatttagtccatttacatttaaagttaatattgttatgtgtgaatttgatcctgtcattatgatgttagctggtgattttgctcgttagttgatgcagtttcttcctagtctcgatggtctttacattttggcatgattttgcagcggctggtaccggttgttcttttccatgtttagcgtttccttcaggaactcttttagggcaggcctggtggtgacaaaatctctcagcatttgcttgtttgtaaagtattttatttctccttcacttatgaagtttagtttggctggatatgaaattctgggttgaaaattcttttctttaagaatgttgaatattggcccccactctcttctggcttgtagggtttctgccgacagatctgctgttagtctgatgggcttccctttgagggtaacccgacctttctctctggctgcccttaacattttttccttcatttcaactttggtgaatctgacaataatgtgtcttggagttgctcttcttgaggagtatctttgtggtggtctctgtatttcctgaatctgagcgttggcctgccttgctagattggggaagttctcctggataatatcctgcagagtgttttccaacttggttccattctccccatcactttcaggtacaccaatcagacgtagattaggtcttttcacatagtcccatatttcttggaggctttgctcatttctttttattcttttttctctaaacttcccttcttgcttcatttcattcatttcatcttccattgctgataccctttcttccagttgatcgcatgggctcctgaggcttctgcattcttcacgtagttctcgagccttggttttcagctccatcagctcctttaagcacttctctgtattggttattctagttatgcattcttctaaatttttttcaaagttttcaacttctttgcctttggtttgaatgtcctcccgtagctcagagtaatttgatcgtctgaagccttcttctctcaactcgtcaaagtcattctccatccagctttgttccgttgctggtgaggaactgcgttcctttggtagaggagaggcgctctgcgttttagagtttccagtttttctgttctgttttttccccgtctttgtggttttatctacttttggtctttgatgatggtgatgtacagatgggtttttggtgtggatgtcctttctgtttgttagttttccttctaacagacaggaccctcagctgcaggtctgttggaataccctgtcgtgtaaggtgtcagtgtgcccctgctggggggtgcctcccagttaggctgctcgggggtcaggggtcagggacccagttgaggaggcagtctgcccgttctcagatctccagctgcgtgctgggagaaccactgctctcttcaaagctgtcagacagggacatttaagtctgcagaggttactgctgactttttgtttgtctgtgccctgcccccagaggtggagccttcagaggcaggcagtcctccttgagctgtggtgggctccacccagttcgagcttcccggctgctttgtttacctaagcaagcctgggcaatggtgggcgcccctcccccagcctcgctgccgccttgcagtttgatctcagattgctgtgctagcaatcagcgagactccgtgggcgtaggaccctccgagccaggtgcaggatataatctcgtggtgcgccattttttaagccggtccgaaaggcgcaatattcgggtgggagtgacccgattttccaggtgcgtctgtcacccctttctttgactcggaaagggaactccctgacctcttgcgcttcccaagtgaggcaatgcctcgccctgcttcggcttgtgcacggtgcgcgcacccactgacctgtgcccactgtctggcactccctagtgagatgaacctggtacctcagatggaaatgcagaaatcacccgtcttctgcgtcgctctcgctgggagctgtagaccggagctgttcctattcggccatcttggctcctctccgcatgtttagttttctaaagaaacagacaaactgttctctagaatgcttgtgctattttacactcccaccaacaattatgagcaatttagtctccacttcctcaccagcatttagtggttattactttttattttagccatcctaataggtgtgtagtgatatctcattgtggttttgaacatcttttcatgtgcttatttgtcgtctttatgtcctcttagtaaaatgtctctgcatgtcttttatccattttcttaatttttgtattctgttgagctttgaaagttatgtatattctagatgtgaatcctttgttggatatatggtttataaatatcttctttcataattcagcagaattgaaaataaacatttaaaaaaatgtaataataggccaggtgcagtggctcacgctataatcccagtttgggaggccgagtcaggtggatcacgaggtcaggagttcgagaccagtctgaccaacatggtgaaaccccgtctctactaaagatacaaaaagtagccaggcgtggtggcacgcacctgtaatcccagctactcaggaggctgaggtaggagaatc

SEQ ID NO: 10629 - DNA, 6000 bp, Homo sapiens
ttaaatgcacagaaatgccatctatcaataataaatggtgtggcatagaacagatgtgccaaattgagttatgacagcatatatattagttcatagaggggaaaagtaagtagcatagctaacgtttttaaattatctgtgagcttttgaaatacaattttatgtattcagtttttactttctagtggctgctagctggaaatattaaaagtttggtgttttttaaaattccaattaaattgtgcttgtttctaaagtaagaattaagaatgaataaattttgcttttctgaagaggaagacagtctgaaatgaatttcttgcccttcattggctgagtacttgccttttaaaagctcatgttgtaattgttatgaggaatgaaagtgcattataaaacttaagtcatgtgaaactattacccagtgttttctaaatttacattgattatatctctaggtacctgctcagtgcatatttaaactacaagggactactcaggaaacccactcatgctttacaatcaattcacccccctcagcattttgattcaagggataattctacacatatgctctgtgtgagaattaccttgcttggttgggaaacaacaagagaaatatccacttgtctcacagcaaatcactactagtaaattggaaagacaaatcttttaggttaactaggatattttgtaggtgtagatactagagcagaaaacaagttttgagcttctagataggtaggagttattgttaatgtcactggcatagcagaggacaatactgtgggaggtgtttgaaatgaatcctgagttcctgagttggaattggtgtgcttaatgaaaaaaacagccgtggtgagacatatggaaccattccactcatctcaatatggacccttgcttgctttttggaaacttgtttggaatcggttatctttgctttgttggcccaacacaagtaaatcctctttgtttttcctaaggtgaacaaaaaagtagttcttgcagataatatcaagttggtttaaattttaggtttgttagactagaaagacgaattatttagccgtcattgaagagtttaatctttgagtagatgttacaggtgaaaatgagcatagtgattatataaaaagtctattactaactcttattttagccatctgtattgttgactttcaactttttcaggtgcaaaattttcttgaatcaatcttttcatctccaagggatcccagcatgccttaaaaaaaaacacttgtcaacggattttagagccaccaaataaatctattttatggtcccgttagatatctagctcaaaacccccattcactctgaaaggtcctatggttggatgcacaacaaatttcctgaaatcatctctgatgcacctcctttgggttgttaagaaggtgttgaaatgtgagaaggctggtagtgaaatcaagttgtggctcagggtaattaggaagggagaaaacccagcattttcatagtacattgtctggcttttagttgcagctgcacacagcggatatgaatttaaccggttgctacagtgcagctggttcagatctggctttataactggctgaagtaaaatgaaatggctggaaaattccagtcaagtaacaccagtgggaacaagtggaattaaatagtgtgagcaaatgctggccgagttggagaaaaacttaagacataaacttgagggtggtggtgaggacttcgggtgggcaggcggggggaggggggtgcattttctggtctttttcacaagggtctattgtttcgattagtttccttgcaggaggtagaaggtttcctccatcccgagtaattcatagagtgtttggcttgtctaccttcctcctgactgaagtcacctgatactttttgttttttcaagaaggaagagagaaccctgttgcctcagttactagcaatgatacaattctcaaaatctggtctttttttgtttctttgaaatagtttctccatgttgtgtgacacagcagcccctgtcttatcatagttgtcttccctccaccacctgtaccagagatgttggatatgttggaggtgaaggtgtgcaaggtttttaactaactgttctaattaaaggattctgcaggaaagaacatgggtttacaaaagagaagcttttgtattattagtaattttttttctttgatgaatttatgtgcttagtttggagaatcgagagttggctgggaaaagatttctgaggagttaagggactctggtgctgtttgggaaaacatttgctgtaactaggtttagggtattcagtctctgccagtgcttaggagctatatttgccaggtgatttccctgtcgcagggattagccagtgatgtgaaacatttgattaagggactaatagaaatctttcctggggtacatgagtggtggctgttactggggtgccccctcctcaactctttctctctgtatttcgagtaagtttgtagtggtgagtcatgggatacagttttttaatcctatgaagaatcttggtaggaagcaaagttctgttaggtatattgttaattaagccctttaaagtttctgcataataactcagaaacgagcctttttcttttctcagaactatgccatgactcatccactttggaagcagacaagatataaattatcaataaaaattgcccataatctggcctggcacagtggctcatgcctgtaatcccagcactttgggagatgatggtgggaggatcgcttgaggccaggagttcaagaccagcctgggcaacgtagtgaggaacccccgacctccaccatcccccccgccccccaccaaccccctcacttcaaagttttttaaatcagccacgcatggtggtatatgcccttagtcctgtgtactcaggaggctgaagtgggaaagtcctttgagcccaggagttgaacgttgcagtgagctatgaatgtgccaccgcactctagcctgggcaagagagctgaccctgtcacttaaaaaaaaaaaaaaaaaaaaaccgatattctgatagcaacactgctcacttgctcactctttctcttaggaaagtaaaaaagttttgtcttgatgcacagatttatttaaactttagttctaaatatataggactttaaaaaatattttctgaaagtgatatccatttttgaggtgcaagcagttgggtccattttggagattccgccttaagccattcagcttcaaaatggcggggagctcttgctacagagggttaccccgttctgcttccttcccattctgttaaaccttgtacatgctccttcccacagatcactattatcttcaaagcccaccatgagtgtacagatcagaaagtctaccaagctgtgacagatgacctgccggccgcctttgtggatggcaccaccagtggtggggacagcgatgccaagagcctgcgtatcgtggaaagggagagtggccactatgtggagatgcacgcccgctatatagggaccacagtgtttgtgcggcaggtgggtcgctacctgacccttgccatccgtatgcctgaagacctggccatgtcctacgaggagagccaggacctgcagctgtgcgtgaacggctgccccctgagtgaacgcatcgatgacgggcagggccaggtgtctgccatcctgggacacagcctgcctcgcacctccttggtgcaggcctggcctggctacacactggagactgccaacactcaatgccatgagaagatgccagtgaaggacatctatttccagtcctgtgtcttcgacctgctcaccactggtgatgccaactttactgccgcagcccacagtgccttggaggatgtggaggccctgcacccaaggaaggaacgctggcacattttccccagcagtggcaatgggactccccgtggaggcagtgatttgtctgtcagtctaggactcacctgcttgatccttatcgtgtttttgtaggggttgtcttttgttttggttttttattttttgtctataacaaaattttaaaatatatattgtcataatatattgagtaaaagagtatatatgtatataccatgtatatgacaggatgtttgtcctgggacacccaccagattgtacatactgtgtttggctgttttcacatatgttggatgtagtgttctttgattgtatcaattttgttttgcagttctgtgaaatgttttataatgtccctgcccagggacctgttagaaagcactttattttttatatattaaatatttatgtgtgtgcttggttgatatgtatagtacatatacacagacatccatatgcagcgtttcctttgaaggtgaccagttgtttgtagctattcttggctgtaccttcctgccctttcccattgctactgatttgccacggtgtgcagcttttactcgccaccttccggtggagctgcctcgttcctttgaactatgccctcacccttctgccctcacttgatttgaaagggtcgttaactctcccttacaggtgctttgactcttaaacgctgatcttaagaagctctcttcatctaagagctgttactttttcagaagggggggtattattggtattctgattactctcaattctaattgttatatatttgagcccatacagtgtattaggttgaaccatagaaactgctattctcgtaggtcaaaagggtctagtgatggaagttttgtagataagtaccaggcatctcagtaactcctagactttttctcatcccatgccccgttttaaattgtcagttttccctctgactcttctgtgttaaaacatgaaactataaatttagtaattatcatgccttgctctttttaatctatatgactgatgcaagcccctcttcttaaccgtttcttggctttgagcccagaaacacagctctccctgtctccaactccagtaagccctcctcagcctcaccttacgaatccaaagaactggggtttgttaggttctttctctaatgtagaggcccagatcccatcacaaagtttttcattcttccttgtccaccatgatcttcatcacagtctttgatatgtctgcatgcaaagtggaacagagttgggcggcaatgacagaagagcttccttggcctgactcggtgtgcggccacttcggcactgcttaatccagatattcttgttaactaagcattgtgcttcccaggtggtctgaagtcaggtactctctctctcaacacctgtagttgaatatgatttggtcagttgctcgttgtaacttggagaaattcctataaagtaagatctccttgcctcttccatccattgttggcacccccttgcaaaaggaaaagaacagcaaaagtcaggagcagtaatctgagaaagttaactccaggataggtaggtttctattgttatagctagatgtaaatctttagttccaagaagtgatagagtttctgctttaataatttgttgataagtttacataaacagaaataaaagatactatctttaccgtagtagttcaggccaagattatgcttagttttagttctccaggtagttacttttgccatgtcctattgatcagtgacactgccagaggcccataccggcaagaggaagaggacgtcattttgtaaagtttaacttcttagcgaactgatgtgccacccagtcacagagtggagttgtgaattcatgtagaggtggcaaacctctaccttgtgttgatgagagaataatcttgggcagtctgggaaaataaggaaggcatctccttcttactcatggagattcaactatagagagttgaaacctaaacccgccttccttttatagaagctggactagagacggactgaccatcagctctgaactgtggctttttttgttcacctatgatgccatgtaccaaattcagaagctatcgttaataatttgttttata

SEQ ID NO: 10630 - DNA, 6000 bp, Homo sapiens
gaaggaaggaaagaaggaaggaaggaaggaaggaagggaaaagtaatgcactcaacttgaatcaccaaagcagtcagacgaggtattttttttcctttgagtaggataagatggtagctagatgtaggtaagagaaatgggtaacaagagatgtttcttccatccctcgtaagttgcctggagaatgttaggatgaggtgagtaatgatgccataggacataagtaagggagaaaaattaaggccattccagccttaattctttagaaacagtggattcactgtgagggaatgggagcacacctgctctctggctgtgatgagaagcagtagaggtccaggtgaggagcagattggggcatcagggactctagaagccatgtgacacaggaggaaccatggaatcattttgagcctctgttttgttttgtttttcatttctaaaagtgaaattttgatttctacctttccctaccacactgggttctttaaaagattgaaaaaattgaattttaagcaccttagaaaaataggatataataaattttgtatttatttattgaataagtatttattgagggaatgccaaatgcaaggcacggtgctatgtatagaataagaggtgaatattgactttgtgtctacctttcagaagattaaagagagtaggaaaataagcaacttgataaataactatgcaaaagtatgttttaagtgcagttctcaaggttaagaacaccgaaaattctgagagggagctgacttctgatgatgggtcttgaagaactgatagggtttggaatggtagggaggagaaacaggagaagtgtgagggttgcagggggggatggggagatagatgtggaattccaggaggaagaaacagtaagagcacaggcctggaggagggaaagtatggggacatatttgtgcatcagattgtctaattagttgttgcttaaagtatcaggaggtctctctggtaaagatgggcttacgctgaaacggtgaaatgtgcacttgatttagcagctcacgggggagccttttagagttttggagtttggtggtaacctggtcaaggcagtgttttataaagatgcatcaaggacaaagtgatatatagaattattaaaggggcgagacactggagtcagggaagccagaacattataagatgcctgataaagaagacctaagctagaggggcagtagtgggaatggaacaggaagagaaggatcagggaaatttggttgctaactggatttaagggtgatggggagttacaacccttttgtcattagaagttcttggactactttttcattaagtcagtatgaattagttttaattaacatattgaaatccaaatgctcataataaagtcccacatcccactgtcacttttcagtccttggaacatcttaactggatttagaaaaagtgttctatcaagatcagaggaaccatgactgttgctcatctggactaggaggaagctcaacctagattatgaggctaagctgtatcaggattaggggtgttttgccttatcctcagaaaagtgacttagaggaaccagaagaatggccgctgtagctgacagtcagggctttagaaatcctggccaaatttcctctctcaggtgggactttaaccctcatttgcttctgaattggcacttgccatgatgaattcacttagtttaagaaagaagttagtttcagggtcttgctcaactctaaacatcaatttaaggtggctgactgggagagagatgagatttataatacttttgaaaactgatagagttatttctttaggaaatagtgctggtttgtctgtttcttatgaaagggaattttccttttttttttttttttttttttttgagacggagcctctctctgttggccaggctggagtgcagtagtgtgatctcagctcactgcaacctccgcctcctgggttcaagcagttctcctgcctcaacctcctgagtagctgggactacaagcacgtgctaccaccctggctaatttttgtatttttagtagagatgggctttcaccatattggccaggctggtcttgaactcctgacctcatgatctgctcgcctcagcctcccaatgtgctgtgattataggcatgagccactgcacctggcccctcatcttcccttctaactactgttttctttcagtttgagaatttacactattgtttggatgtctttgaagtcttaggatcctcttgggaaagaagtgtttttttctgaataaaagaaggtgtactgttatccagcaagaacatgtcagagctcgatggggccagtgttgctattgggtaggttttgcccctgctccaggtccgtttctaacctctggacctcatgcttctgtgggtgtgtacttcacaaggtctgtctcttgctgtccttgagaatcaaaggaagaggtaattttgttggaagttatcaattcaagaaatagtttatgatctctaataaggtggtgagatcacgctgaccaaaatatttagtgaagtcgtggaaggaaatagaacactaactagtacaagacactgtgacagtgttgcaaattaagaggaaaataaaaactaaatgaggcctggaattagggaatggaggttggataaattaggcctcttttctctaatgcaagcctctctaacaggccacataatctggccatgtggggccatttttctcactcacacttgatttttgtttctgctggtggtcttccatatttccttcagccattcatagtgttagagacctcttggtttggtcttattttcggatgtgctctttttgaaatggtacctttttaaaaaaacatctaacaaagcagctttactgttggactgttctttatgattgttacatctctggaaaagtcgaaacaagtgctccctttttgtgtgtgtattgcctagataacctttatttgctttttccaccctaattctgtttagacaggtgggtcatctcctcttaagagttgtttgaaacaaccttaaaatagtctggctagcctgttaggacctagaccactgaagctgtcattggccttctctgagggcaggtaagccaggattgcaagcccagaacagagttcgatgaatttccattgtttgaattacaatagtaactcatattcatagttaaagaccttttaaaagcatataatatgaacattggaagactctccttcaaacctagtctgcaattgacactgctagaagcaacacttctggccaaatgtcctgggtgtgtatcttctggacatttttcagtgcatattcagatgaatacatgtatttattttaaaatttgaatatatgtgtgatatatacatatatatacacacatacacacacacagagttttgtactgttaatttatagtaaactgcatttttgcttctcaaactcaggatctcagaagaacaaatgaaagaataggagtaattccattttgttggaaagcttttgtactttacctgaatctagaaaatctgaattactgtatgtttttgtgagggctgactttactgttttgctttcagaattttttctaatctatatgggaatgaaaagcccaacttatcaattaagttaaaattttctacatattccagattgtaaattggtgctattgtaatccattttactatttttgtaagcagtattattgttatacgtttgcgcactatttactcacaagggaaacattaaaaggtaggcttagcttcatctaaattgaaatagagataataatagtttctttgaactagctgagatctaaatatacagtacggaatgacaaccttcatttttgattgtgatatgaatatcttaagatctggtaagttacttgcttatctttacaattacagtatttgcaatagcaaaattagacctcagtattgtttaaaaacatgtcaatgtaatattcatggagaagaaaacaatagctttcttagtacagatgataaattatatacttattaaagtgttgcatctgatcaaataagtgtagtatttcattatagacttggtttgatgttgaaacattgttattttaagcaattactttaaactggatattttaaagagaggctgtattcctctgaatgtgggtcacagaggcagagaaggacaaatagtttaaagggagatttaaattatgtgtagtttggaggattgttagaagtagaagtaattctgcctgtgatggaagagacttaaccagaaaactgtggcagtagtcaacagataccttctgattttgtctgggtgtcataattaggcaattcgctggaggtgttttctggataagtgatgtattggcaaggatttaggagataaatagactgggcagctgccacctcatggagaagtaaatagagtcagttttcattgttttcagtaagctgacctccaaaggcatagatgtgagctttcttttgaaaggaaatgaagtattcaccgttaaggataaggatgtttgtaatgtgacagtgttaatgctagctaaatgagaaagccatatatgaatacttagactgttgctacctgggagcattatttattgacctgtgccttcgtcagagcttcagatgtgaggggaatgatgctaatagaatcatgtaaagatgtttgtcattaaaaagtcacatcgcaattagtagattcagaattcatcgagtcctcttgctctgtgtcacacccgctgcctctgtgacaaccttcatttcctacttagcaaatccaagcctggtagctggagccccaggaagttgttaaagcaattaaaggcttctgtctcccagcacattgcttggttaccatagtatcctctgcctccaagtctctcctgatgatgtcagtatgcatacaggggttgttcagatcatctacgtggggatgattcaccccacaataaagcccctctctctcgttgctcgctttccagtgtgatttcagacatctgtagcaatggaaggtaagtgccttgttttgcatattgaagaattactaaatgcttctattattctgtttcaggtttcttgctttctaagatatactactgactgaaatcatagtgaatgggagcatccagtcaattacttagaacagatttgtagtttgtacttaaagtgtgtgtgtgtatgtgcataggtgtgtgtgggcaggcacatgtggggtaggcttataaagaaaactgaatgcacagtgtaacgcctgctactctccctggtaaacagcaatagctttttatttcaaactattcgaaatatgtaacttccttaaaatattttgacaagtgtcacagggcaagtagggctaatttttaaaaagtgtgtaagtatattgtattggcatttgatatgttttacccagtttaaatgatattaacatttgaaatatctaagatggtatgggaagatactagaaagaagaaccatgctgagaatttgcatgttatagaaattaaaatatgtaggacaaagatttagttggtgaaggggagatgtatgaagttcaaagtacagtgataatcatcattccatagttatgccacacttttatagcttttcaatatctcacacaatttgattgtaaaaataatgcttctattattgtgatgaatgcaattagtgcttcatgaaagttttccttgaatatgtatccatccttcttaaggataatccagctatgttcagctttacagaaagaatatagtagaaccacttataacattcagacagaacagtgatacgtgaatattttccttgagaagttagtgctgtttcagtttttctctgacggtatgccttatcaataaacaataaataatgagacacatgaccggttcctctctatcagcctccttctgaatctcttcattctgagagttctgcccataaagttagtcttgcatttatttcttcttcttgattcccaagga

SEQ ID NO: 10631 - DNA, 6000 bp, Homo sapiens
aatatttattttataaatatcacagttatatcgcacgttgcttgtctgtatatttccattggtatcttaagtcacacttctagttttaattatttttgtcctttccataggcaactatactcttcatttagacatctcagaacacagcctataacttgctctgaaaacaaagaatctataaactttttaaggcccttacatacaactcagatggttatggcttatcattggacagtaaattaataattacctgagaataaacatgatggataatcatccgaacaggaagcaggttgtccccacaggtagtttactgacaggattcttttaaaacatgcctttaagtgacatttgatactattgggtgtggtaaatactacaaagctgaagcaattttctgctagcacttgaaattctgtttgcttgtgttactattcctaaccacatggtggcgcttcaagtacatttaattaaatgtcttaccctccttcctacacttaaaactgtaagatgaaggtagtttttacttcacctgtatacaaaatccaactatttgtacacctgtcttctatttccacatcagatcctctagcatattcttttctctagtatatgtgagtgccctctctgtaaaaactcgcactggatcagcctttgctcttctaattactcttttctaccttgtttcttttctggctgtatcattcatctttgatttatgattattattattattatttctgttagaactaacttcagttaactgaagttagtgtcttgcgacccaaatcatactttcccttccccttgcatttggcattgtgttaaataaatgatgaatttttgtatggtgctatagaatttacagagttgtcacttgtatgagatagcctcattttaaaggtaagggaaaaatgtcaggaaggtaattatttaaggaaaaacaactaagcagaatgatttattggggaaaacaatttttagcttgagacagacccattatcacatttctctgcttaaattagacctgggactttagacagatttcttaacctttataattttcttatccataaattgtgaatagtattttaataactgacgtgtaacattgaatgagttatttatataagtgcccggctcactatgtgatagggttttttctgtgtatgtgttttttttaacccagtatttactccttgtttcctgcttcaagttccacttgctaactccttttgatctcttttgtctgcttttctagaactcttttttctttagatttctctctcttgaacatcttttttcaataatgcctttgccatctcttgtcttataccttaaggcccaatccttgaccctctgttttttatcctatactcattattctgaaagagctaatttattcacaggaatcattagctctaatctcatgtgagttaaatcttcagactcaacttttaaaaacaatctcatctgtccctctaaaaattagcttcctttagaacctcttctccttggcaatatattagtgatactattgttatcttcacactaaagattcaaaactttagtttttgttttaggaaagttttttatttttacatttctttcatccttcataattacccagtcatcatgaactttgtagttatctatttcttcattaagaatccttgaggcctaggtgggcggatcatgaggtcaggagttcgagaccagcctggccaacagtgaaatcccatctctactaaaaatacaaaaattagccgggtgtggtagtgggcgcctgttgtcccagctattcaggaggctgagatggaagaatcgcttgaacccgggaggcagaggttgcagtgagctgagatcacgccactgtactccagcctcggtgacagagtaagactctgtcttaaaaaaaataaaaaagaaagaaagaaagaaatccttgtactagtctccacattttaaaagtcaatactcatacaagattgttttcaagttgcaatacttatatatatccttttactgattaaggattcatattgactcatattccctaaaatcaacttcagacttcttattatagttttaaaccaaggttttaattacatcactttacctttcagatttgcagattatcttaactgctaaacttttaaaaaaaatgtatcaattgtttattgagtacttgcctatatcaggtactgttatagaccctggggatacaacagcaaacaaaaccaaaatgctctgttctcatagcacttatattcttatggggaaagtagacataaacaactaaataaaaggtatatttcatggcgattaactgctaaagaaagcaaaaataaagcaaggaaggcaaataggatgtgtaatgggtagggaggggcggttaatatttttttaagaagataagtaaaggtctcactgagaaggtgacatttgtgtaaagatcaacatgcatatttgggagaatattctaagtagagggaaggcaagtgcaaatgcccttacatgggactgtgtcatgtgtgttgtatcatacatgcttgagaagtaggaaggatgccgatgtggctggtgctaactaagcacaaaataagcaaatgttgaattgtatttagagggaaagcaggtgcaaaaactctcaagtgggactgtgtcatgtgtgttgtatcacacatgcttaagaagtagaaaggaagctgttatggttggtgctaagtaagcaaggggggaatacaggagatgaggcctgagtggtaagaggggaccagattacataggacattgtaaatcattgtaataattgggcttttgtttgagaaggatggaaagtctttgataggtttgagcagagcggtggtgtgatctgacttacatctttattaggatctctttgactgttgcattaaaaataaactggagtgggaaggatgtcagggtcagaagtaggaagatggattagaaggctaggcaagctcactgtcatctcatagttttaaatatcatctatttactaaagactcccacatttataatacagtgctcctccactcacgatgggattacatcccaataaacctgtcataaattcgaaaaatcttaggttgagacatcgtaagttggaaaccatctgtaggtccattgtgtacctttttctgtaatttctattgtgaactccatttggagttaatttacttaacatttctgaactcttgatcttcaccaaattgctactctggcaatttttcatctcaataaaaggcagtgctattcccccagttcctctggacagcaaccttggggttatccttgacccttctcttgcataccccaaatgcaattcaccagtaattcccatagactttgattttaggataaaagcacaattgaaccactttacttctgttgccaccttctagtccaagccaccatcatctctttgttactggaatcattccagtaacttttgaactggtttctcaactgatcttgttctcctttgcacaacagccagtattctttcaaaatacaaattatgtcatgtccgtcttctgcttaaaatcaaccagttatttcccatctgactagaagccaaagtctacagattagtctctaaggcatgatatagcccctggctaccttataaatttcatctgctactttcctgcagtcattgctgcagccaaagtgccttttggcaagttcttttctatctatctatacctcggtaatccacatcaaactttcttattcatatccccaaaattctacaaaagcagacattgcaggtggtaataagactaacatttattgagtgactcctgagtgccaagccttttttcatttaatattcacaacaaccctgtgcataaaaagtagacagtgctcatttccatttttgtagaatgcgaaactgtgcttaggagaagttaagtaacttgacaatggttacatagccagtaagtaatggagccaggatttaaacatgtttaagaactataagcactatattgtctccttaagcgttacatagttattgcctttccatgtgagttctaagaagtttcttgagatgtatccacctacacatctccccagtctccctaccccaataagattagctcccaacttcactgctagcaattttatgagatttcatttgaaaaaaaatctgatgcctagataacagttaaagtctgcaaatcatggatgtttccctcttcagtcactatgttaggatttaaaaggaacctaaaaagagtcctttttctgtggcaaaataagcaaatgttaagttttacttatttcatcatttttatttcagagtgagataattcgagataatactggcattttggagtgtgttaaagaaggaattggaagagtgataggcatgggagtgcctcatagcaaacgacttcttccgcttctttccttgatcttccctacggtgcttcatggagttcttcattacatcatcagctcagttattcagaagtttgtcctactaattctaaagagaaagacttacaatagccacctagctgagagcactagccctgtgcagagtatgttggatgcttattttccagaacttattgctaactttgctgccagtctttgttctgacgttatactttacccattggaaacagttttgcaccgccttcacattcaaggaacacgcacaataattgacaatacagaccttggctatgaagtgcttccaattaatacacaatatgagggaatgagagactgtatcaataccataaggcaggaggaaggagtgtttggtttttataaagggtttggtgctgttataatacagtacacactgcatgcagctgttttacagattaccaaaattatttactctacacttcttcaaaataacatttgagatttaggttccttcactgagtagtctggaagatataatctggataatttgctatgaagttatgagggatacaagtgaaatactggggaagaaaatggattggaaagtaaaattggtactaaagcccatactgattatcttgactttgttttttaaggcataggtatatattttggatcaaaatccttccaaatttgaaaactcaataaaaataacacttattaaattctagttagtgtagcactcatgctgaagtaaacatgatcgtaggcagaagcaaaattttattataaaatctaaaacaaaactttatagagttgaatctattccatctgacttcaatatttgccaaacgtttattttacctcctagattgatgttggtatagtatccttaatacagtgtagtatattaatgtccttaatacaatcaggaggtttttacctttaagcaaataaattatgtcattattgaaaaagacttaagggatgattagacttggcaatctgtaagcaggagtataaatgttttaaattgcattgtccctatgtaactatcttaatggctatatatatgtattttataaagccatttatgtatacacatgtaacttggaatttccttcatccctacacattttctacacttacatcaccttattgcataaaacaaagtcacgcgctttctgcttgaacatcaaaatatcaaaaaccaaggtacccaaaagatacaagtcagagacaacatccttgtccatatccaaacccagtgtttcagtgctagcaacttaatttctcatacatttatagagtttggtttgctttgctagttgtgtgaatcattgggctgtttttagagccactgttaagagagaatataaaataatcatgacaattactactgtttccacatttacaaattgtgtacttaaatgaacctcatttcccttttatttctgaatggcttgtctgagaggaaacaaaattaaaattcatctgggaatttgtgcctcttgtctagtatatagtcaccactaaataatggcttccgtttttattttctttcaggttttgctttaaattttgttt

SEQ ID NO: 10632 - DNA, 6000 bp, Homo sapiens; identical to SEQ ID NO: 2356

SEQ ID NO: 10633 - DNA, 6000 bp, Homo sapiens
ttattaaaagtaatggcagaagccacaattacttttccaccaaccttaatattaaggatttgcaaagttcaaaggaacttttcaagtttttcatctactctcttcacctgactgtattgacattccaaagatttgtgcttaaaatctgaaaagaattttagtcatgtatttaagcaatctgtactgtatctacatatttaagcaatctgtactgtatctacatggttcttaagaatttagcacaagaagagcacctgtcacacgctgtgcatgggtttttttctttttggtattcagccccagtccagtgttttcatgatactttgctgtagatctattgtatacatcagtttactggttaccctgaaggtatttctgccttcttgtacagtaatgtgacttttgcatatttattttaatctccactccccaatgttcttcactcccctgaccgccctccctccccaacccagttttcctgggccaagactaccataagcagtaaaccagagaacctgataaatccaggaaaataaaagtgaaaaatttctatttcaatttttatctgcagttttaggctaaagatttcagctcagttcatcccagtaatttccaaccttaaaggataatcactatgtgactgccacattaaattatacatgcatgtattgatcaatatctacaatgccttatctgatattcaaacaacttgaaaataaaaaatttttcgttaaaaaaaaaaacctgggccgggtgaggtggctcacacctgtaatcccagcactttgggaggccaaggcaggtggatcacctgagatcaggagttcgagaccagcctagccaacatggtgaaaccctgtctctactaaaaaatacaaaaattagccgggcatggtggtgggtgcctgtaatcccagctactagggaggctgagacaggagaattgtttgaacctgggaggcggaggttgcagttagccaagattgcgccattgcattccagcctgggcaacaagagagaaactctgtctcacaaaaaaaaaaaaaaaaaaaaaaaaaagaaactctgacatgtgacatgatcttacatgaggctatttatgattttgattttgattttttatatatgattcctttattagtatttaagtgacatctctttacattttttagtggtttctccaggaattaccacgttatctttaacataccccaatctacctagagttaatattgtactatttttagaatgtaaaatatgaaaaccttgctgttgaagagttttaattaccttcttttattctttgtgctattcataaattttacatctgcacattatatcttataatacagttaaaatttttcctttaaatagtcattaagtcttacaaagaaattaagagaaaatggtatttataaatatttgcaggcagattctttggggctatgtaaatacactgtttctcctttatattttacccacaatttttgcattcttcaatatatcttgtctacagtaattattactgtggtgttctagtggtgattttctattttgcatttatcccattaagggagaatgtatctcagatcagaaatatttgttttaattatgagatactgtactgtgttacctttctaagattaaaaaaaattatgaactataactggctctaagggtttcttttaagggaattatatattattttagaattcatgaatctttaaataatgtagctgttgtcttttaatttcatggtgaatactaagactggttttgtgatagttattctctttatgtaacttctacatatctctactgttaaaagctatctttttcttatggtaaaattggtttagagtggttgacagtttaaagagggatttgtgatgatatctgttcattttcatagggttggggagcagaatatcaccggcaggatgtaaccagcaccccatgttggattgagattatcttcatgggcctcttcagtggctggataaagtccttactcagatgggctcccctctgaaccccatatcttctgtttcataatgcagaagtattcttttcaattatattgttagtggacttgttttaattttagagaaactttgagtacagatactgtgagcttacattgaaaacagatattacagcttatttttttctacataattgtgaccaatacatttgtattttgtgatgaatctacatttgtttgtattcatgttcatgtgattaactcttagaagtgttgtaaaagatgcagagtaagtattatgccccagttcagaaatttggcattgatcttaaactggaacatgcttttactttattgccctaacaattttttattaaatttatttgaaaatgcatcacatgatgaaaaattatagtagcttataagagggcatatacagtgaagagtaagttttccctcctactctcgatcttccagaagctgtacttttaccagtttctttgtcccaccaacttaaaaaaaaaaagtacaattcattgttttgcaaaagtgtatggtaggggcttaaaagaaactataaagttttatttgaatgaacactatgcactgctgtaactggtagtgttcagtaaaagcaaaatgatagttttctagatgacataaaatttacatttaatacagataagtgttcttcagtgtaatgtgacttcatgctatatatcttttgtaagacatttccttttttaaaaaaatttttgcaaataactgatctcaagtatatgtcatttactcaaaatctgtcataagcattactttatagctagtgacagtgcatgcacagccttgttcaactatgtttgctgcttttggacaatgttgcaagaactctatttttgacatgcattaatcttttattttgcacttttatgggtgacagtttttagcataacctttgataaaatacactcaagtgacttggacttagatgcttatccttacgtccttggtaccttttttgtattaacaaacactgcaatttatagattacatttgtaggaagttatgcttttttctggtttttgttttactttcaacctaggttataagactgttattctatagctccaacttaaggtgcctttttaattccctacagttttatgggtgttatcagtgctggagaatcatgtagttaatcccattgctcttacaagtgtcagcttacttgtatcagcctccctacgcaaggacctatgcactggagccgtaggaggctcttcagttgggccccaaggataaggctactgatttgatactaaatgaatcagcagtggatgtagggatagctgattttaaaacactcggctgggcacagtggctcacacctgtaatcccagcactttgggaggctgaggcaggcagatcatgatgtcaggagtttgagaccagcctggccaatatggtgaaaccctgtctctacaaaaaatacaaaaattagctgggcatggtggtgcgtgcctgaagtcccagctactcgggaagctgaggcagaagaatcacttgaacctgggaggcggaggttgtggtgagccgagatcgcaccactgcactccagcctgggcgacagagcgagactctgcctcaaaaaacaaaacaaaacaaaacactcacccatcaacgaatatagactcttctctcatttatcgatgatcctctttttccattttttaagtacttatgtggaagctagtctcccaaaacacaatctttagagagaaaagacatgaacgaactccaaaatatccatttaatcaatcatgtttttggctttggataaagaactttgaaccagtttttttctcaggagctgtcaaatggacacttaattatgacatgagaatgaagaaattattttggaaaaaaaaaatgacctaatttacctatcagtgaaagctttattttctggtgccttttgaaagtatatggagtcatatcattcttctgtttaaaatgttagtttggtttgactttccactttgtcctttctgctcttgtgaagaaaaaaaaaagcattttcgaggaaagaattatgcaatttcttttgttttctgtgtcattatttattgctttttcaatgtgcagccagtggatggttttagttctttcagatgaactgccatttgtgtttcagctcacagttctttgctgggtaaaagaaatactttctgacagtcacctgagccttaaatgtaagtattacatgacatgcattctgtttcttccagagttctgtctgccacacgaaagagaatatttgcttacttgatagaactttggcattttcatcattcttttacttaaccaggcttatggcatgatctctggaacaaatttgtaggaaaaaattactccaattgaatgactgatgtatgtaatcaacttcattgggctgcagtaaactagtggaaattagagagttgttttattggtgttttctactgtgagttaattaaaaattgtttttatttggggtcattatgtcacagtcttgagttaacaagatcttacgtgattggccttttctttgttttctcttaggagttgtgtctcatgaatgacagtactaaagctattaacaactaagagtttgacagagaactataagcctgttgtatctcctaaaagttgtcaactccccacccttggactttaaatgaaaattttattcagtccagctattcttacagtccctaaggattttcatatatctatgtataggagataaaatttgctagtaagatttttaaaaactggctagtgaaaggaaagtacctctgaaagaaaccattttagcaaattatggttatatgttttaatttaatctacagaatgttttatagtaaaattctagcaccactagaataatcacatagcatgtacaatatatttatgctggctgaaaagacagaatctgggaataataaaattgcaaccagtttggtaatgcaaacagcagaatagaatgaaatctcagtaatgaattaaagcaacaaaaagatattgattggcaaaaagcaagatataagagattcatttgcttaacatttctacataatatttatggtctggtcagtattggtctggtcagtattgcctggctgacgtgaaatgtaaactagtaggcgtgttattgatctgctaaaactaaccctctttttaagaggagatttaaggaagacgtcaatcaaaatgtcaaatatgtgtgtcagaatataaataatttttcacattgtattgttgctatataaaaaaaataatagaattggttgggtttctgaggtgaaatccagagtaagagtactagacagttcaacaagccacatctaatggcacagatagaggatgtagctattttatacctttcataacatttgagagtaagatatccttcaggatgtgaagtgattattaagtactcatacctgaaatctgttgtcaagattagaactggggttcatgttaaaaaccttccatattacctgagggtacctgtggggaacagttccttcccctgtgtggtagtattttgttggaagagaatgtttatacaaaaaatgaaattcttccaacagcagagaaactctaaaaagtttgatagtacctatcaaagtgctgtacttctgtgatagagaacatctgatgtaccaatttagatctatttctttatactttttctaatcaattgcttaatagtactttggatgattatcacctttgccacttaaaatatataaatatcctttttacttcatgaggaaggaagaattttttgataattactgagttcagccttttgtgatgacttatattttggacttacattttaactttaaagaatgtcagatcccttctttgtcttactagttaaatcctcacctaatctcttgggtatgaatataaatgtgtgtcatcgttatattgttcagctagatgagcaagtatcttagggtagtagg

SEQ ID NO: 10634 - DNA, 6000 bp, Homo sapiens
aggcgggcagatcacttgagcccaggagttggagaccagcctggacaacatggtgtaacctggtctctacaaaaaatacaaaaattagctgagcatggtggtgcacaccggtaatcccagctactcgggaggctgaggcaagagaatcgcttgaacccaggaggcagaggttgcagtgatcatgccactgcactccagcctgggtgacagagtgagtgagactccacttcaaaaaaaaaattgacagtgaccatgcagcccacaattacaagcagaattacagatttttttcaggctctcaagtatgctgctttcttttataactgtgtgtgtgtgtgtttattttattttattttattttattttattttattttattttattttattttgagacggagtctcactccgttgcccaggctggagtgcagtggcgtgatattggctcactgcaagctctgcctcccgggttcacaccattctcctgcctcagcctctagagtaactgcgactacaggcacctgccaccacacctggctaattttttgtatttttagtagagatggggtttcactgtgttagccagaatggtctcaatctcctgacctcccaaagtactgggattacaggcgtgagccaccgcacccggccgtattttgttttattttatttatttattttttaatacatagagacagagtcttgctatgttgtccaggctggtcttgtgctcctgggctcaagtgatcctcccacctcagcctcccaaaatgctgggattacaggagtgagccaccatacccggccccacatgcttttcattgttgttatttaaacagttttattgagatataattcacacaccctaaaacctacacatttaaggagtgcaattcaatggtttttattatagtcacagctacgtgcaaccattgtcacaatttcagaacattttcatcacatcaaaaagaaactccaagccccttagctatcaccttgtcccccactcaaccctaagccaccccaatctacttcctgtctctacagattttcctattctggactttcatatgaacgggatcaaacgatatgtgacattttgtgactagcttctttatcttaatgttttcttttctttcttttttttttagatggagtctcgctctgttgcccaggctggagtgcagtggcacaatctcggctcactgcaagctccgcctcctgggttcacgccattctcctgcctcagccttctgagtagctgggactacaggctcctgccaccatgcctggctaattttttctatttttcagtagagacgggatttcactgtgttagccaggatggtctcgatctctggaccttgtgatccacccgcctcggcctcccaaagtgctgggattacaggcgtgagccactgcaccctgcctatcttaatgttttcaaggttcatctatgttatagcatgaatcagtacatgattcatttttttctttttttcttttgagacagagtcttgctctgttgccaggctgaagtgcagtggctccatctctgcttgctacaatctccgcctcccgggttcaagccgttctcctgcctcagcctcccaagtagctgggactacatgcacaagccaccacacccagctaatattttgtatttttagtagagatggggtttcaccatgttggccaggctggtctcaaactcctgacctcaagtgatccgcctgcctcagcctgccaaagtgctaggattacaggtgtgagccatcacgcctggcctcttttttttttttttttttttttgagacagagtttcactgtcactcaggctggagtgcaatggcatgatcacagctcactgcagcctcaatctcccaggcttaagcaatcctctcaccttagccccctaaagtagctgggactacagttgtgtatcaccatgcccacctaatttttttattttttgtagagatggggtcccatctctatgttgcccaggctggtcttgaactcctgggctcaagcaatcctcttgccttagcctcttcaaagtgctgggattacaggattaattcccttttatggccaagtaatagtccattgtgtggatatgccacattttgtttatccattcatcaagtaatgaacgtttggttttggagggctattatgaataatgctgctgtaaacatttctgtataggcttttgtgtgacgggctttaatttctcttgggtacatacctaggactggaattgctgagtcataaagtaactctgtgtttaatcatttgaggaactgccagacggttttccaaagcagctgcaccattttacattcccaccagcagtgtatgagggttccaatttctccacatccttgccaatccaactatgcttttgagaaataacaaggacaactgaagagccccactctaattgggtagctagtacatagcagcaagaggagtgcagggatggaggaggggtccctcctctactctaagcccttaggatcagccagagagaatacagctatctctagtactcttcctgaccccctaggctatgttagctgcccccagacatgtgaccaagtatacatatagtacttgtcattcttctcctctagactgtaagctttaggcaggcaggaatctctattgttctgactttatctgcagcatctgaacagagtctggcacatgatagatgtttcgtaaatgttgattgactgagtgactgactaactgaacaaatgactagatatttctctactggtggtttttctccctgttcagggagaaagaaaaagagcagtcttagaggcagaaagcatcaaggagggaagcaggaatgagaggagagatggaggataaagagaaaggcagggaagaagcttggggacctggtgtcacttgaggtcagctttaagttatgaggtcaaactcagagctaatggacttcccctagtcctttgctttccatctagctgcatctttttttctagaaatgttcccttttattttttgttattattctcaataattttgtctttgcaagaagaaacaaaaaagtagaaaaatagttgatattacaggtaaaaaaaacataaatcaacccatcaaaattaattcagaatttaaaaggatggaagtcaaaaaggttgactatgaaggatttttaagttggaaacaaaatcttcatctaggtttttctccaaaggtcattgaaagacctatagcccaaaaagttgaccacttgttcaacaggacatgaaaatatggcttacctcacagccttatttataatggctggccttccacataaatcctgccttctacctggactaatctgaatccagtcatcaccagattattggtccctctctccccaaaggtctgcatagctccctgtcctcagttacttcttgtctcttctctgaaagcacacatgcacattcacacacacacatacacacacacacacacacacacacacacaccctatctttccttttcatgaatcttcagggtagctctgccctctccactttgtgtgtttggaaggaaagaaagcgaaatatatgagatgccaatgcaatttctcctttagcagagctcggtaggacaattacccacccaatctgcctggttttatagctctcataaccttcctttatgaacacgctgtgacagccggatgtgggcattgattatggcagcagtcttcagccacattcctatttaactgcaaagcagagctcctgcctaccagcccagcactggtcatgtgactttttaaattactgtatttatgtaagccttttcccaaccagagcctatgtccaactgcatcaaaactggggaggatttgagcttgccacttcccctccagtggctctttggccctacagcctagggtctcttgctggaatcaaactggggctctgggctttcttaggagaggtctgcaagagttggggtgcacaagaagcatacctttttcattatgaaagagctgaggaaatagacaatgaaacatgttggcagatgccaagggcagtggcttggttcccaggggttcacctggcaatggtgccaggtgcaagagatcagcaaaacttacaggattggttgttgttgttggggggcgggtgtcggaaaggaatttgggggaattagagaatggagttgggaatcactgcttgtaggccttccactctggaccccagcagaatcatatggactctagccactgggagagggaagttttagtgttccaaagaaatcctggtagccttgcaggcagtctgtcctgaccaaggactctgcctgactgtgccatggtgcagggcaagtctagcagagaaagccagtgttcttcagttactgcagctcggcgaagaatcccactgcagggcactagggaggccggtcctgcagaggtcagcagtaggagtgactggcttaatctattcgaaaacctcctggaaagatcccgaagaccgtggaccaaggtgacctgcgtgggtgagcgatccattagccgaatgacagcgctgccgcagaaagccagaaaaaggatatgcgtgggaagcgcaaaagcgtgggctgggcctgcagcaacggaaaggcgccacgctcgtgagcggaaccagcgttccgggggcgctcagtgtgggcaggcaggaagcctggctccactaggacacacagattctctcctgagcagctgcgaactatgcgccccttctacccttaagagatgggatgggagtccaacaaacccagccattgctcagaccccagcccttctctcctctaagaagcaggttcacctctgccaccgcactcgcatttttttttttttttaaagcccggcctttcctaggcggggtcaagggccccgcccaccgaagccacgcccagtagccgccccggggcggggttcccctcggctcccggctgccctttcccctccggcctctgccggtgctgctgcgccctgcggagctccgaacacgtgcgcgtgagtaaggacccagaggggagagtccttggaggtttcccagcctggggaaagaagcagtgcagggtggcttctgccggggcacgggacgaaattggggttcgtcccctcgtgatcccgagcttggagggcatctgaaagagacttgggcctcggagtcgtcccctgtttttctaccatccctcttccctcttctccctagggagtcccatagagcctgactccgagagcctcgatctcccagggccagaggcagggactttggaaggtttgtgaggaacaaatgtccggtggaactgagtcagcccctttaacccgagccttgaaaggggcaggctatttttagatctgtttttagacccagcgaacaatgaaccctctctactcattttcctgttcctctaaattatttggaggaagtcaggagtgaaatttggggatggctggaaaaaggtatgatcttagccttacataaattataatggtgactgtgaggccgggcgcgtggctcacgcctgtaatctcagcactttgggaggccgaggcgggcggatgacgaggtcaagagaagaagaccatcctggccaacatggtgaaaccccgtctctactaaaaatacaaaacttagctgggcgtggtgtcgcacgcctgaagtcgggaggctgaggcaggagaatcgcttgaacccgggaggcagagattgcagtgagccgagatagcaccactgcattccaacctggtaacagagcaagactccgtctaaaaaaaaatggtgactgtgtaggaatatttattatcatttgtgcaaacattttggttatttttattttttttaacggagtcttgctctgttgcccaggctggagtgcagtagggcgatctcggctcactgcaacctccgcctcctgggttcatgccattctcctgcctcagcatcccgagtaacagggactacaggtgccc

SEQ ID NO: 10635 - DNA, 6000 bp, Homo sapiens
aggttggatcttgttctttgcattttttaaaatccaatctgataatcactgccttttgataggactgttgaatccatttgcatttaatgttattattgatatagctggatttaaatctgctatttcactttttgtttttatatctttcaagtatgttcactcttttattcttcctttattgctttcttttgcatcaaatgaatatttttctagggtaataatttatattttaaaatttttcttctttgctcatttattccaatatcagaaaaccagagccaagacattaatttccatctgattttatatgcagtctttaaaagtgagtgactttctcttttcccaagggccttagcgtttgctaaatttgctggcctgatggtaagtaagcattatgatatagtttggatgttgtccctgcccaaatttcatgctgaaatgtaattccactgttggagatgggacctggtgggaggtgactggatcatagtggcagttttctcatgaatggtttagtgccatccccttggtactgtgttcatgatagtgagttatcttgagatctggtcgtttaaaagtgtgtgacaccttccccctctctttcttgctcttgctttcgccatgttacgtgcctactcctgcttcaccttctgccatgactgttagcgatgcttcctatacaccccacagaaccgtgagccagttaagcctcttttataaattacccaggcttagatatttctttatgacaatgcaagagaagcctaatacacattactagcacaatgctggaaccctgtaagccaaataataggtaccagatcagttttctgggaaggctttgtagccttgcttctgcaaaggaagtactacacttattctttaatggttatgtgattatagctgattaaatgaaatttattctcaaatataactctttggatggctttgattatatgattgattttttcaatacatcttggtaaaaaggatggcagattcgttgaatctgttcaaataattacatagccaaggattcagtaaaaatatttactctcaaattctgatgggccagtgggaacaaggtatcattaaaaatatttcatttcagtttgcaataagcatagtttgttaaaatgagggttagcaatagatgaagaagaaaggacttcctcttacactcatcagaaaatgggacattaaaaacaatctaacactattccaaaacaaataatcatgattatatttcccttgttggcttattaggctaatgtgattcattcttgactcacaaatcttggatcagcagtatacttccatggtttgttgcttcaggacaaaagagtcctagcaatcctgattcagtgctgtggttcagtctatagatgtctacttgtggtcagaagtcagcgaatactgataaggctggggctgtaagtctattctagctaagagcatctgataaaatcttttccaccaaggctctggggctgtcctttgttgacctctttagcttatagcagaggtctttaggcaagcatggaagaaaaataaaaaccaccttttgttgattaaatttaaggctctattaatttattacagtaaacaactatatcagaataggggagaataaaatcttctactgtgttatggattttgtcagtgtattctcaagggtaatggggacaaggacaaatctactttaaaaagtaacataaggaagacaacttatttattaaacatcatgtgggcttaatatataatgaaattctaacaacattattgagccaattaagaaatatgaagcaggctgggcacagtggctcatgcctgtaataccagcactttgggaggccgaggaaggcagatcacctgaggtgaagagttcaagaccagcctggccaacatggtgaaaccctgtctctactaaaaatataaaaattatatataaatatatatatatatatatatatatatttgtttgttttgttttgttttttgagacagagtcttgctgtgtcatccaggctagagtgcagtggcacgatctcagctcactgcagcctctgcctcccaggttcaaggaagtctcctgcctcagcctcccgagtagctggggttacagatgtgcaccaccactcccggctaattttttgtatttttaaatagagacagggtttcactatgttggcctggctggtctcgaactcctggcctcaagagatccaccagcctcagcctcccaaagtgctaggattacaggcgtgagtcactgtgctgactccttttgcatttctttaagtggtaaaataaaacatatacgttaatataatccaaaggtttatcaactctcaaacatataaaaataagaggcaaaggtgtgcaaatggtgttcaataccatgcttggtgaccaatgtttttgtattctatctttcttagaaattatccaagcagctaagattattcaccagtttacttgatttagtatcaatctaaattctcagttaattaaagaccttggaaattaagttgatatattacagagtaacataatcattgatgatataaactatttaggaaattcagtttaactacaatctccatgataaaacactctccatcactctctcatcatcttgctttatgttcttcatggtttcgcaaaccggtatcatcttgcttatttatttgcttacttattttttgtgaatattttcccagtagatgtaagcacaataaataaagataatttgtcttccttagtgcctagaacatgtaggagatattcaataaatagctttgaatgaaggaatacagtaagtcctcactcagcctcctcaacaggttttggacactttgattttgagtgaaactatgtataaggaaaccaattttaccatagacaaatggacagaaagaagagttaagttcctacagcatatttctgataacaaaagtaccaccaaacttctaaataaagactaaaacacttccaatattgaacactgaaataattgtgaaccatacatacatttaagaaagattagtaaaaacaaggaagagaattatttacctgcttattccagtttagagttcagtggccagagcctgtcccggcagctcagggctcgaggcagtaaccagccctggacaggacgccatcacatcgcagagcagactcacccacacccacaatcgttcacactgggactacatagacacagcagtttgcctaacatgcatatcttcgggatgtgggaggaaactgaccggggtacctggagaaaacccaggaagacatggggaggacatgcaaatgccacacagacggtgatcccagcagggaaacaattttttttcctcatcaacgttataacagaaggatgttattcaggggtctgctgtatatgaataaaatatttactcatcataattgtaccagatgtgaggaataggtctcattttactattttatggagcttgggtgggctactgggtgacagactcgaaatactggttttctgatttctaatacaatatgtcatattattccccaaaagtaaataaatatatttgtacaagtgaaaaatgaaaagaaaatgtctcgtgtagatatgattcttaaagagggtatttgctatggattgcatcctaatgggggcctctttaggcagtggtttgtttgtttgtttgtttgtttgttttttggagacagagtcccactctattgcccaggctggagtgcagtggggcaattcggctcactgcagcctccgcttctgggattcaagtgattctcctgcctcagcctctccagtagctgggattacaggcgcccgccaccacgcctggctaatttttgtgtttttagtagatacagggtttcaccatgttggccaggctggtttcgaactcctgacctcaggtgatctgcccgcctcggcctcccaaagtactgggattacaggcatgagccactgcccctggccaaggccgtcttttgatggcagccaatgtcattagactacaacttcttctgtacaagttccccaaagtatcaggggctctctaagagagtattacttatttctttcaggtcctgatggttttctctttggagtggttgtaatagaggaccaaggaagttgtgagctgttttctggcttttgctgtaacaaaagcttgttgctgaaattgactatttcccccactcctgcatcccaacacagcatccattattcttcccttcagtgctctctttgcaaaatcagtctagcctaggcagcagacttaacatggtatgctcctgtggggattcatactttatttctggcttgcttttagggtcccagggcaagtcgatattaaagagatactaataaattgctaaatggaaagggagactaggactcagctggctccaggcctgagcttctgccttgtcccagagggaagccaatgttcacagcagggcacatggagttaccagttgtccacccaaaggaactctcatccccttcactaaccagggaaaatgtcatattaagattgtcctcctgttgcagtgagccgagatcatgccactgcactccagcctgggcgacagagcgagactccgtctcaaaaaaaaaaaaaaaaaaaaaaaagattgtcctccttcaatctttttttactattaaatgagagctttgtattaaactattcagaattgggttgtccttgtttttaggttcccacactatctcttttgaataaaacatgttgttgggtgacagcccttagggtttttctcaaatcatttctcatgtgaatccccttcatcctcactgtccttcccttaagaaactggcgtgtgataatgatgatttagaggtcatttctgctgacctcatccctgaatcagaggaaacagcatggagtaagttctaagttcggggcccacaccatatcaaatttaggcctggggaaggcagtatggctctttccaaaccctccaaaacactactgggctccaagactgctcaaggtctcactgatagtcaaggcttgtgctcctttttttcagaagagtaagattaaagaaaaccactgtgaattaaaaagtgtgggtgccaacatgggacgggagtcccccctcactccatggatgacatagagggggcagaagattacagaattggcattgtcctgcgtggaagctgggccacccacagtggcgtgggaagcctctcagatgctggattctaatgggctcttgatcaccttggattgggctatttcattgttatcacaaaataaacaggatgctccaagtcatgttatggcagagaaccaaccagcttcacactggtcctctaaaccaatcctcacaacaggactgggagacaggtgttacctttcccactttacagagaatgaaacagagtggcaaagcctccgaaggaccctacacttcggacatcgcaaagcaggatctgagtcccggctcctctgtccaaacctacttgctaggctttctttcccatgtctactctatagctggaaaggtcgtggaggacacattttaggccaaccctctcggtttacaatccagagaggggagaccctcagaagccaagcgacatgtccacggctacgcggcgagtgtgtggcaacgtggaaggggagcccgagacgccctggtctctcccttctctcgcaggttcctttctccccgaacgcagcccgcaggggacgctggaggaggagctgagctggagttgccggggccccgggaccgggcgttccgggggcggtccccagcagccgcgcattccagagccagcagcgcgtcctggccgctcctgcgctctcccgcctcccggggctcggaggagccggggcacgttccaggagctgcctagggctgaggttccaggcctgggggtcgcttccagctgccagatcccgtgcagtcctggggaccctgagaagcaccgagccatccctgacccaggaa

SEQ ID NO: 10636 - DNA, 6000 bp, Homo sapiens
ccagacaactcatgcagcttcccaagggcagggctgcttctttctgaagagcacagtgtgttcccactgctccccattcccccgtgccaggacttcctctccctctctcccagcggcatcccggacgctctgatcccaccgagtccctggagaggtacaaagcttagggatgaggggaggaagggggccaggtgcagtggctcacacctgtaatcccagcactttgaaaagccaaggccagaggatcacttagcccaggagttcgagaccagcctggacaacacagtgagatcctgtctctgcaaaaaaattttaaaaacattagttagccgtggacacacacacctgtagtcccagctacttgggaggctgaggtgggaggatcacttgagctcaagagatccaggctgcagtgagccatgattgcaccacggcactccagcctgggagacagagcgagaccctatctcaaaaaaaaaaaacaaaaaaaaacatgaggacattttttgagcatttgccttgagtccaaccctgtgctaagtcagcggctggagagagggagggaggcagagatgaatagagagatctgtccggagctgaggccagatgctccagctatgaagatgcagtgaccctaatgtccccttccctccttactaaggtataggagttgcccgaagggcctccgcaggatgagccctaagacttacagagcaatcgagaggagaaagcatcacatctttggggtcttccagttgtcagaagcttgtggcccccaggaagccctacaggtttgggaacaactgaaggtcacagttctcgtcttctgggtggctggccctctgtggcaggtttgtggccacagtggggtcagtgccccctcccgccaccatgagattgtaacttaaggaaatgaggtcaccgttggttggatcaacatggctccagccccagcctgtggttatcagtgacataagacgcttattctggcctgggcctggtggggggtgagggggaggcacatttgtttgggtggttgggctccaacctggctttggacaggccgttaattatccttgggaaagaggccccacagagtgttctgaaactccgtgttttcagggagcaggcccctcctcaggcaacctggccacagaatgttccagcctctgactgcccagtctctgactgctctgaataattattaacctcatgaggatttatactaataaaatatagtaactggaactctccactgatagtttataatgtaatataactcatggtaccttccatactataactcatggatttatagtgtgcatgccaacacctaggtcagcactttatttttatttttattttttgtttgtttgttttttgaaacagggcctcattctgttgcccgggctggagggcagtggctcaattatggcttaatgtagcctcgacctccagggcgatccttctgcctcagcctcccgagtggctgggactacaggcatgagccaccatgcctggctaattttttaattctttgtagagacaggggtctccctgtatgttacccaggctggtctcaaacttctgggctcaagcaattctcccaccttggcctcccaaagtgctgggattataggcatgcaggctgcccccggcaggtcagcacttcatgatggtcatctcattggtcatcgcagaaccccttgaggcaactactactgttcaccccatgttacagctggggaaactgaggcaccaggcggccaaaaccacatgaagcactaagtggtgtaactggagtcaaacacgggtctgtgatgctgaagcccaggctcagcacctcccctctgttgtaccccacttccctggccccagcatttcagggccccaggctcatgggagccactgctttttgatcagaatagttgactggaggacttggatgcacccttctagggtgaggtggccaaacaggcagatggaagcctgggaggtgggagcttggaggtcacctggaggtcacggtgttctcacaggctccccgtaggaggcccggagtggggagcagtggcttaaccaggaggaggagctggaagtctccaggttgcctgccttgagcctgggttgtgagccaggctgggtagagggccccaggcatcccattaaggagcatgaaggacattgctcttagcaataggaggcctgagggcgtctgagtgtggagtgacgggtttatgtctcagacagctcaccccttgtgaagatgggtttggtgtggggccacccagaggccaaagccctggtgggagctgggggatgacccaagtcagaggggccgagggtgctgggactttggctttggagcaggggtgggcagaacccggtgactggctgtcgagggatgtattttagacatccacctggttggtaatagatgcacatacttttacctggacgactcaggatttgaaactcaaggctccggagcacgtgcttgcagaatctccatccctccctccaccccaccccaagcccttgcggcaggcctcaccgccgcctaagtttccattcgatcaaattttgaagcatagaggtcagagacttcaggcaggaatctgaactatttaagtgctcttcaaaaagcaaataaaattgttttgtatagatgtcatcgaactcatgcctcagactagaatttcaaggccctccaccacattccatttacactccccccacccacacctccccaggcccttgcgtacctctccctacaaggccactgtccacccacacccccaccctcccacgcactcgcctgactccctgacgccatctggcgtcccccacctggaatgtgctcccgactgctccaccagcgcgtgccttccctgcatcctgggagttctgctgaggactccctcctccactcaggctcattccactgaagtttgtgagcacacgctctgtgctgaggctcagggagccctcgtcctgggggtgttgacgggagtgggagaggcttgtgggacagacgcaactggacccctaagcacccctgtaccctgcaggcacctgggccctggtgggaggggacacacctgaagattatgaaaaaggactaggatgcctgcatcacatgtccactgagggccaccggcccctcagcttttcaccgattcccatcccatccaggcagtgcaatgccttggaaagagcatgggctctgggccccctgtccctgggctcagatcctgcctctgcctcctcttggtcctatgatcttggccagccagctgtgctcctctgagcctggtttcatcgacgtgaagggagaatagtacccttattaaacactggatcaactccttgagcatcgatattaataataatgataaaaaccatggacatttattgagcacttactgtttactaagaccacacttagcattgctcttgttctcatttgatcttctcagcaaccccatagcaacccctatgattgtccccattttacatctggggaaactgatggatgggaagccccttgcccaagtcaatcagccaagaggtggcagagccaggattcgaaccctggtagcctaggctttgaaccctggtagcctaggcttcgaaccctggtagcctaggcttcccctgcactgctgtattttctttaccaagaagggtgtggaatcggccctcaagagagagatgagtctcacacatacacacacacacacacacacattgactcacactaacatacacacactcactcactctcctgccctggggcagccaacagcttgacctggcagtcatccagcagccctgtgaagtagacggaatctttatccttattttcctctttttctctcctttcctctctccctccttcctttcctttcttattttcttattttagtgaggtatgtgtaacttacatacagcaaagcatacaaatattaaggtagaggcctgatgaattttcacctgtgtttacacacgtaaccatcactctgatgaagacataatacattctgtcaccaaagaagggtcccttgagcccctcccagtcagtagcccccaccactattattctgacttccattgccatagattaattttgctgattttcgaaccgattgaaagcttttccagttttacagatgaggaaactgaggctcagagaggtgaagcagtgtgtcctaggtctcccagctcctaagtggcagagccaggaggtgagcccacaccggtctgccactgcccccataggccttcccactgcccacactggtgacaggggagtcaggcccatggaagtcctcaaaccacaatgaatccacaaaaaacatttccttttcttccaggtgggttgatttctggcagcccgttggccttttaaaatcagttcagccctagccaatgaagttagttagccttggcaggcccctgccatggggtggttgtgggtgagctcgtggcgctggctggggtggcaggaagccagcagccctggaacatttgccttggacacgaaggcgaaggcggctttattgacctcatcaggcagcccaggtgattgaattgtgtttatctcacagcctggggccctccaggaaggagcctgggagcagccagttctggccttacataaccagcctggccagagcgcctcaggccgtccctgcccagcaccgcagcccccttgttctgggtggccctctagccctgcggagcctgttctctgcttattctggttaggaagacagggacccacgcctgggagaggcttcttggggccttgtgggtgagctcaccttggcgccacacctgggattcactttgctcttggctgaggtcacctccagagggttgccagtggatgacatcatcccacaatccctcagtgctgtgcggaggcccagcctcgccaggtgggaaaggtgagttgcttcaaggaagagtctcaggcagcttcctggctgggaagggaagcccaggctctccttagttgactgtgtgttaatcacccagcaatttcattactcaacagctctccagagttgcacattacagctggggtagaaattgggtgctgaaggccaggcagagcatttggctgtagggaggccgatcctcctcgggcctgttaccggcgggtctttgttcttagacctggggttcttggcctcacggattccaaggaatggaacgttgggccatgcggtgagtgttacagctctattggaagccgtgggtcacggaagagaactgtggaacccagcgactagtgtgcagctcatttaggacaaacccgggcacttagccacgcaggaacaatggccagcctctagtccgatcaggagcggcaatgggagcctcgctgaataagcacagcggacaccctgccggatccagaggggtggaagtcagcggtgggtctgtgacgactgcgatcagcaccacgagctaaagctcagctcgagccggaacacagaccagaagagtgtgtagttgcaagacttaatagagtgaaaacagaactcccatacaaaggagggaccaaaagggggttgcccaatccagctcgaatgcctgggtttatatccccatcattgtccctccccctgtgctctcaggcgatagctgatttgactgtttctttacctcctgcttttagcctaattggtatttcagtgagctccctttactacctgattggtcaggtgtgagctgagttagaagcccggtgtttaaaggtgggagtggtcaccttccccagctagggttaggaattcttatttggcctaggaaatccagctagtcctgtctgtcataacctcctgggctcctgtttgcctctctccctccagctcctttgctcttggtggcctctgattggggccaacactacaagcaaggtcaagcgcaggtccgtgtctcccctctcccatcctaaggcttcccaggaccagggccctccttcatttt

SEQ ID NO: 10637 - DNA, 6000 bp, Homo sapiens
gtgtgtctgtgtgtatgtatatacacacagacacacagacacacacagacacacacacacacacacacacacacatatatatatatatatatatttttttttttttttggagacaaagtctcactctgtcacccagtctggagtgcaatggcacgatctcggctcactgcaacctccacctcccgggttcaagcaattctctgcctcagcctccctagtagctgagattacaggcacatgccaccatgcctggctaatttttttgtatttttagtagagctggggtttcaccatcttgccaggttggtcttgaactcctgacctcgtgatccacccacctaagcctcccaaagtgctgagattacaggcgtgagccaccgtgcccagcctaatatatatttttaatagagacgagatctcactatgttgcccaggctggcctcgaactcctgagttcaagcgatcctcccgattcagcctcccacagtgctgggattataggcatgagccaccatgcctggcctcaattattttctgatttatctttgggaggagaccattctttcgcttaagaagaaaaagaaaaaaacaattttaagtctctttaatgggccttacagttatgcaaagatatgccactatccctttgggagtgagggtggaaagaactagacttgcctgcgtaacaatgagaaaggaagttgcttcttaagacagggtctacactagctagaggggacaaccaggacctgagcctcagacagggtctcgctccatagcctgttgcccaggctacagtgcagtggagcgatcacggctcactgctgcctcgacttcctgggctcaagcaatcctctggcctcagcctcccaagtagctgggaccacaggtgcacccagcccatttcccttcctctcaaggtgccttaagagaaggagaaggcttgagattcaggtgagggatgggcagagatcagaggctgcctggcctcctggtttggccacagtctagatgctcaggagagaagtgcttacaggtgaggcaaacatgagccaggtgggcacggagctatctgggagcacctactgtatgccagacacttgaactctaatggtgaggtctgaggacacagttcctctactgaaaaatagagacagggcaactatgttgccagggctggcctcacactcctgaattcaagctgtcctcctacctcagtctcctagtaactagaactacaggcacccgtcattgtgcccggccattccacagctatttacataattaactgttcagttacaattctggcaagcgtgctgaagaaataacaggtcctaaataattacagctagtattacaaagcaagcgctgcatgccaggcttacacatactgctaacatgtctactttttgcaacaacctcttgtgggtgagactatcatttgcctgttttactgaaaggacagtgaagactgaggccttgtgtgatggtgctgagagctgggcctatgacgtccagccctgtagtctgtgctctgaaccacttcaccctgtttctttctccatcctcacagtagagacgtcatctaagaggagcttgcaagtccagagggcttcctgaaggaagtgagctgagaataatatgaaattaaccagaccaagggccattccaggaagagagaatggtacgtgaaactgcccaggagtagcagggtgggagccaggaggcgtgggtcatggcaatctatgtataaagagctatgggaatctataggaaaatttaagggagtggctgacacagtcagatttgtgttgtaagtatcactccgcaggttgcgcagggaacaaatgagggagcagaaggaaggggttctcctatccgctgcacggcactgcgcagaagacaggggagccaggcattccctgaagggtgaaaagcaaggagtagagctgggtagtagactagaatttaggagcctggcctggggcctgggtggggcgaaagaggcggagcctgaatggggtgtgtataggggggttgcgtgtaggggtgtgtgtataggctggggcggggtcccgggagtgggctgactgggtcgggggcggggctctccaggtgggcggggatcttggccacccctggccacacctctctccggctcgagctggtctaggcggggcgggcccgagggggtgtggcaggaggtgggcgggcccgggtggggggggggggggcgtggaaggaggggcgggcccgagcaggagggggcgggcccgaggggcggggtgggacaggaggtgggccgctcgcggccacgccgccgtcgcgggtacattcctcgctcccggccgaggagcgctcgggctgtctgcggaccctgccgcgtgcaggggtcgcggccggctggagctgggagtgaggcggcggaggagccaggtgaggaggagccaggtgagcaggaccctgtgctgggcgcggagtcacgcaggctcgaggtgagccggaacccttgtgggcccgggctgcgctcccagccgccagggggcgagaggcggcggggctacggggactgcccctcccggcgcaggggacctgggcgtccgccgggcggcagggggtggagggggcggtaaatcagtaacccgcagtgcacacagggccttttgtcccgctccgtccaaagagcaccccggccgcggagctggttactcattgcccaccgaggcgggggcaggctggccctgtgcagctaccctcgggacccattgattcgcacctccccccaggctggcccggcaagggtgggggaggacaagcgcgcttgtccctgcggctgtcttcgcgccggcggcagagatgagggacctgaggccccgaaaagttcagtcacttagtgcccgggggcctccagcgcgagtgcgggaggctgaaggagaacccaggactgtctgatgcctaaggcaggccctccattcccacgtggggggtggtcggtcagcggtcagcagccatgggtgactcgactaaggactctgatatcagggcagcctggggtaggaataaactccccgggcctccccacccactcccagcccaagctgtgtacccaaagagctgccctccctgccaagccgagcttggtagggagttttaccaaggaggatccgactggattcgagagttgaggtgggccagagacagcagtatctgagtcaggtagagaagagcaatgaggggcacagagggatgggcaagagagcacatgtgcccagttttgaaagccaatggcttcagcgctcctgaaggggcagacggtgtgaccaaagagataggcagcggcagagagggagccctaggatgttgagctggatcctgctgggcacaggtagccattaagggcttgcaagctggggggcatgacatggcagacttgcaggtttttttgtttgtttttttattttattttatttttttattttgttttttttgagacggagtctcactctgtcgcccaggctggagtgcagtggcgcgatctcggctcactgcaagctccgcctcccgggttcgcgccattctcctgcctcagcctcccgagtagctgggactacaggcgcccgccaccgcgcccggctaattttttgtatttttagtagagacggggtttcaccgtgttagccaggatgttctcgatctcctgacctcgtgatccgcccacctcggcctcccaaagtgctgggattacaggtgtgaaccatcgcgcccagccgacttgtagttttttaaaactctgctggaagatgaaggttgaagagccgagggagaggatgtttccagaggcccatgcaagagatggccatgacctgccttgagaaggggcaggggaagccagatggactggaagtggagtggcagtgaccaaggaggaggaggtgtgataggcttcccacgcagggtagatccagagacaccagtgccacccataggcccctaggactgcagtggtcaccgattcctttgtcccagctgagactcagttctgagtgttctattttggggaacagaggcgtccttggtagcatttggaagaggatagccagctggggtgtgtgtacatcacagcctgacagtaacagcatccgaaccagaggtgactggctaagggcagacccagggcaacaggttaaccgttctagggccgggcacagggaggagaacattccaacactctgcgtgccgacgcacgttctctcttttatcctcaaaacagtcctatgaggatagtaagccagagagagacagagacaaggaattacaagttggtgagagtcaggatttgaacttggctctggcagatggaaaattagggtctgtattctttacaaaaccgtgtgtgcctcagatggagttggtgcataacaagcagaggtatccagggtcgcggtcctgcttgccacggaaggggccgccttgtcagttgtgaccacccagccctggaaatgtcagtaatgctgtaaggagtggggatcggatcagatgccatccagatgctgaagtttgaccttgtgtcatttttcactttcttttttggctcttctgcaatcaattcatttatttagcaaaaaagaaattatgtgtgccgagagcatgcagaagatatgtctccgttctctgcttccctccaaaaaagaatcccaaaactgctttctgtgaacgtgtgccagggtcccagcaggactcagggagagcaggaagcccagcccagaccccttgcacaacctaccgtggggaggccttaggctctggctactacagagctggttccagtctgcactgccacagcctggccagggacttggacacatctgctggccacttcctgtctcagtttccttatctgcaaaataagggaaaagcccccacaaaggtgcacgtgtagcaggagctcttttccctccctattttaggaaggcagttggtgggaagtccagcttgggtccctgagagctgtgagaaggagatgcggctgctgctggccctgttgggggtcctgctgagtgtgcctgggcctccagtcttgtccctggaggcctctgaggaagtggagcttggtatggcttctgaggtgggagagggtggcaggggtgggaagagtgggcaccaggagggggctgctgggctgagcaaagctggaaaggatccttgcccaggccctgagaaggtggcggcagggcagggctcaaccactgagactcagtcagtgcctggcttccagcaagcattcatctatcactgtgtctgcgagagaggactggccttgcagggcgcagggccctaagctgggctgcagagctggtggtgagctccttacctgggtgtgtgtgcgtgtgtgtgtgtgttctgtgcactgggtgtgtgacctaggaggtccaggcagcatgtgtggtataagcattatgagggtgatatgccccggtgcagcatgaccctgtatgtggcaccaacagcatgtgccttgtgtgtgtgtgtgtccgtatgtgtgtgtgtgtatgcgtgtgtgtgtgtgtgtgtgtcttggccactgtcgtgtgcactaaatgctgtgtgtgtgacatgccccaagagtgtggcatttgccctgggtgtggcatccgcagcatgtggctgtgtgggtgtcaaggagtggtggctccttcagcatgcgttgcaaagtgcttgtgccctgcatgtgcggtgtgttctttgtacacaggaggctgcctcagatggggctgcggggtctgctgacctctgccctctgcccacagagccctgcctggctcccagcctggagcagcaagagcaggagctgacagtagcccttgggcagcctgtgcgtctgtgctgtgggcgggctgagcgtggtggccactggtacaaggagggcagtcgcctggcacctgctggccgtgtacggggctggaggggccgcctagagattgccagcttcctacctgagga

SEQ ID NO: 10638 - DNA, 6000 bp, Homo sapiens
tggtgagcatgaattgcaggctcatgaaacttgaattgtgtgcccagtgtggtaaccttttttttttttttttagacggagtctcgctctgtcactcaggctggagtgcagtggcgcgatctcggctcactgcaagctccgcctcccgggttcacgccattctcctgcctcagcctcccttgtagctgggactacaggtgcccgccaccacgcccggctaattttgtttttgtatttttagtagagacggggtttcaccgtgttagccaggatggtctcaatctcctgacctcgtgatccgcccacctcggcctcccaaaatgctgggattacaggcgtgagccactgcgcccggcccagtgtggtagcttttgtcccactttggtttccgtaacttcaaaataggaatgagaagtctcctgggttcctcacctttagggggcaattgggaggggcagataaaatggtgaacatgaaactactttaaaaagtgtaatgaattggctgggcacggtggctctcacgcctgtagttcgagcactttgggaggctgaggtgggcggattacttgaggccaggagttggtaaccagcctcgccaaaatggtgaaaccctgtctctactaaaaatacagaaaattaacctccagctactcgggaggctgaggcaggagaatcactaaacctggaaggcggaggttgcagtgagcggagatggttccattgcactccagcctgggtgacagagtgagactccatctcaggaaaaacaaaaaaaaaagtgtaatgaactgtgcaaatagaatacgccgtttataataactcctaggaaataataaaagtacctaaacagttaaaacctatacagcttttggtaaaacttttcaggaaagtcctggttgaattctttgttactccaacagatgtactttttttttttttttttttttttttttgagacggagtctccctctcaggctggagtacagtggtgtgatcttggctcactgcaacctccgcctcctgggttcaagcaattctcctgcctcagcctcccaagtagctgggactacaggtgcccaccaccacacccggcccggttttttgtattttagtagagacggggtttcaccgggttgtccaggctggttgcgaactcctgagctcaggcagtccgcccacctcggcctcccaaagtgctgggattacaggtgtgagccaccgcgctcagccttacttatttttttagagacagggtcttgctcttcatcaggctggagtgcagtggcgtggttattgctcactgcagtctcaaactcctgctgttattggttcaagtgatcttcctgcctcagtctcctgagtagctggatccacaggcggatgacgctacactcagctaatttttttttttttcctaatttttcatagatacttcgctttgttgcccaggctggtctcgaactcctgagctcaagcgatcatcctgcttcctccaactcccagagttctgggattacacgcgcgagccacgatgccaaccaggagaccagaaattaagctcagctttctttctctcccttcttccctccctccctccctcctttccttccttccttcttttttaaaactttgtggtatctgtttgtgaattgcttattttacttaccatattgtcttcaaagttcatccatgttatagccggtgatgggatttccttcctttttgagattgaatagtattccattgtatgcctatgccacatatggtttaatcattcatccattgatggacacttgggttgcttctgactgttggctgttgtgagtagtactgctatgaacacgggtctgcaaatatctctgaaactctgccttctttttctgtttgtttgtttgtttgtttaaggcagtcttactctgttgcccaggcttgaatgcagtggtgccattacagctcactttattttttatttttttgagacagtctcactcttgttggccaggctgcagtgcagtggcgtgatttcaactcacactgcaaactccacttcccgggttcaagctattctcctgcctcagcctcctgagtaactgggattacaggcatctgccaccacacccagctaattttgtgtttttagtagagacagggtttctccgtggtggtcaggctggtcttgaactcccgaactcaggtgatccacctgcctcggcctcccaaagtgctgtgattacaggtgtgagccaccacgcccagcctgcccagctaatttttgtatttttagtagagacagggttttgccatgttggccaggctggtctcgaattcctgacctcagatgatctgcctgccttggactcccaatgtgctgggattattggcgtgagccaccgcgcctggtggagtggtggagtcttttttttttttttgaggtggagtctctgtggcccaggctggagtgcagtggcgccatctcgggtcactgcatcctccgcctcccaggttcaagcgattctcctccctcagcctcctgagtagctgcggctacaggtgtgcgccaccacactcggctaattttttgtattttagtagaaacggagtttcatcatgtttccctggctggtctcctgagctcaggcagtctaccagcctcccaacgtgctaggattacaggcgtgagccaccccaccctgcccaacgactcacttagcttcaacctgtcagactcaggcttctcctaccttagccttcttagtatctgggacaacaggtgtgtgctaccatacctggctaaatttttctttttttgattttttgtagagacaggataatttttttttttttttgtatagacagggtcaggctatgtttatgttggccaggctgggaaataaggtcttaatagaggaagttgaagattcctgggggaatagcatgtagagcagctatagagggagagggtgctgattactagctaaaagacttagaaatttttgcaaacatggactcatgatagtttttgggtgatgagtcttcttgtaggatagcttgaaagaggaggaggaaactagaggccctggtaatataaggtaacattaagtatcctgatgtcagtaatggagaagagtgaaagactatgattgattgggtgactgtgtgggcagaggatgtgaggagaaaaggacatcttgtgtgtgtgtgcgcacacatttttagttgtgtatcttctacttgttttctcccccaccttgtacctgtactttctcaagcccaaaaatgaaaatttacctgctaccaaccacatcatcttgtgcatctgtgtagctcagtttttatttctttagatctgtggtcctccgtggaaagagagccactaccccaagacacatctaatataatacacagggcgcttacgtggttagaaaagaagagataagccgggtgcggtggctcactcctgtaatcccagcactttggaaggccgaggcgggcagatcacgacgtcaagagattgagactatcctggccaacacggtgaaaccctgtctctattaaaaataacaaaaattagctggatgtggtggtgcacacctgtcatcccacctacttgggaggctgaggtaggagaatcacttgaacccaggaggcggaggttgcagtgagccaagatagtgccaatgcatcccagcctggcgatagagcaagactcatctcaggaaaaaaaaaaaaaaggagcttgttttggccaggtgcagtggctcacgcctgtaatcccagcactttgggaggctgaggcaggtggatcacctgaggtcaggagttcgagaccagcctggccaacatggcgaaaccctgtctatactaaaagtacaaaaattagccgggcatggtggtgggtgcctgtaatcacagctactcaagaggctgaggtgggagaattacttgaacctgggaggcggcggttgcagtgagctgagatggtgccactgcactccagcctgggcgacagagggagaatccatcacaaaataaataaataaaatatataaattttaaaaagtagcttgttcttagtttaatattctttttgagttctaaaacgctaatttgaaaacatgtctattgatgatatttgagcaaccgtatccatattaagccttaatatgagaggaattatcttctgtgttaatttttttttttgagacgaactcttgctctgtcacgcaggctagagtgtagtggcgtgctcactgcaacctccacctcctgggttcaagcagttctcctgactcagcctcccaagtagctgagactacaggcgcccgctatcgctcccagctaatttttgtatttttagtagagaagagtttcgccatgttggccaggctggttgtgaactcctgacctagtgagccacctgcctcggcctcccaaagtgctgggattacaggcgtgagccacggcgcccggccatctctgttatttcattgtaatgttttaacgggtaccccctgtaaattagtgtatgaaagggcttttgtctgttgtaaagcactttacaaatgcaaaagtttgttggaaattgtatttgaatgccccacatctgtgtaaccaatcctctctatatgaggatgttgtgtatgtttcagttttattttgaaattttccagaaatggaatcttttaactgattttagggaaaccctttaatctctctaggctgcctttctttatctatgaaatgaaatagtaagttctttttagctctgcgatttaaaagctttaattttaaatgagagagtggttagtgatcttcatgaagtttgataggtggcaatacatttaactgattttgctctttatgtgtagatcatggaagggaagtggttgctgtgtatgttactggtgcttggaactgctattgttgaggctcatgatggacatgatgatgatgtgattgatattgaggatgaccttgacgatgtcattgaagaggtagaagactcaaaaccagataccactgctcctccttcatctcccaaggtttgaaatggtctttgaatctattccttttacgtcttgagatgataaaattatgaagatacccgggtgcagggaaatgtagtctcaactactcaggaggcctaggacaggagtgtgagtccagccttggcaacacagggagatatcatctctaataaaatataaaagaaaaacatggtgaagataaatttggaacgttttcaaagggaaagcaaaattcgtgaaaatacttattgatctctctggcagcctttgtcttgctagaggccaattatatgggttgaatttgaaggccagctatgaaatttttgtgacagttgaaagcaaaccaggagaatagattctagataaaaaggcatgttgctgaaaatttaaatttttaattcatttatgtatttaacacaggttacttacaaagctccagttccaacaggggaagtatattttgctgattcttttgacagaggaactctgtcagggtaagtgttttccagagaaatatatgttagaggcagacatgtaaataagatgggatagtagattcctttttggatagcatcttttatagtgaaatgtctaactttattttattttatttatttattttttgagacagaatttcgctcttttgcctgggctggagtgcaatggcgtgataccggctcattgccacctccgtctcctgggttcaagtgattctcctgcctcagcttcccaagtagctgggattataggcatgcgccaccatgctggctaatttgtgtgtgtgtgttgttatttttttagtagagatggggttttgacatgttggccaggctggtcttgaactcctgacctcaggtggtccacttgccttagcctcccaaattgttggcattacaggcatgagccaccgcacctggcctgaaatttctagctttaatatcttcagtgttaacatccatgcaggaaaatag

SEQ ID NO: 10639 - DNA, 6000 bp, Homo sapiens
attattacacagccaacatttgaagaaatatctacctacaaaaagttgatatatgtatgctttacaagatgtatgttactattgtatctaattctgtgatttctttatatgtacagtagttatataatcgccttaaaaagtcacttcaacaaaagataaaaattaaaaaatggattgagatcgtggagtcttttaaaaacaattacttctgcagctctatcacaagccatatttttatgctacttcattccttttactggcttcaaggaagttgagctgctaatgaagaatttgaattgtactataataatatcaggcaataatcctttcaaaaattaattcatatgtttctcagctgaagttaagatcatagagcaaaaaaataaatcttatttttctataatttgcttcatcttctatctttcacaatccccaatctttcttctctaacatgtctcacagatagcaaagaaaacattattaatagtatatatattaaattttctttttaatttttctactgttttcagttttattgaatcgaccttaactcaactacctaaaagaaaaagggacttggaagtgagatacttaaacccattgctttggtagtagatttggctcaagaggcagaaatgttataaaatctagggtcattttgagagttactggatatagtaatagaactttagatactgaattaggaaaatagtgaatgggttctcataactgctaaatctttcctatttatacttagggtaatcactgactttttattgtatcagtttctcaatctgaaaaataaaaccatgcagcctgcttataaagctgattttgagagacaggacaaatactggtcctatgttttgtttactatagaaggttaattgtatgtggtccttgtgagtcaggggatgtgactttgtggaatccttgtaatattggctagtgttgccatgagatttcactctttctaatgttctaaggcccttttacatagcataacatttcttatataatggaattttatattataaaattcttagatgctagataatgatgataagtgaccatgaattgtagattgtactttttatgtatcttaatagttcttgattgatttgactcaaaatatcatctctaggatataccattctttgtccattgaaactctgcttggtgagaaagttgagtgtttattatccaactcttatggggcagtttttgtaaatatggtataccacttaaatatttggtttccagttgccttttggtgatgatggaggaagtgatggtggtggtgatgatgatgatgatactgatgataataaatcatgtaacatcaaaagtaaagatttagtacatgtccccctagatggccacctctataacccaatgctgggatttgttgcttcaaaatgaactggacatttagtactttgaaaacataaagtatttctataatagtatttgataacagtgctttgcagtttcctgactttaaaaaaaaaagtaggcgtgatgaggaatcattgtaaccttaggaaatctattattcttttatgttttggtcaacatttaacagtctttgttaaggaggaacatataattatctttgaaaacataaaagaggaacatataattatctttgaaaatgttacgctagtcttagtttttaccctagaatgtctaaattcattcttgtggtttaggttaaaggttgccctcatcttatattaaaaatcttttcatttttgtgttattctaatccatgaatagtttctgacatggttcttttttatggtgaatcctcctgaaagagatacagttcttaaagtacatttccctgatacacaaatatggcacaagcactttaagctatattccttgccctgaatatttcctattctccacttcatctgccttaaacataatagtaaagcaaagagaggggaaagaggttaatcaggaaggttaatacttcagtgttcattgagaaattttttaaagtgaagagagaaaacaaaaaaattcgttgggcttttatgatttagtttattcaagagattagtgatcttggggatgcattacaaagctctagaaccttaattaaaacttttggccatacatatttcttagtatgacacaagctaactaatttaaaggatatgctttcactaaacgtttagcaggaaaatacactagtagccatcacagtatgcagcatttgtttttaattgaaagcatttgtaggccctgatgtagttaaagattaactggaaacagagacaattctacgatgccatccaagcaaaagattttgaatgtgtttgaagagaaaaattattatatacctgttcaagtcatgtacaacctcaacctccaccaccaaaaggagccattggaaattatgagactcaatgtgttttttttcagtcaataaaggcatcccgatactgttcctttttttttttttttttttttttttacaaaggaataaatcaaatgaactctcaccagaaagactgctggaatgttaaagttgtttctctagttgtgtgtgcgtggcaaacaagttttgtgttgtataattgctgcaggaactgttcgctgtttcaagggctaataaatgtttccgctaaaaaacaactggctgccctattctgttcttgagtgaaaagataatgaaaatgctttattttatttacagacaatgctaatgaggaagagttggaaaagatcaagtaaggtaattcttagcttgtgatctttcagcttttcttgttgagcagaactatcatctgctttcccagatctctctcatctcttcaaagtatgctaccagatttcatactattcaattgttacttttccccataaatttaagccaaccatgtgatgttttttaaatagaaatcacaccgatcaatagcttcaaatcatcctttcactattctctggtcacttctcaacatcattctcagcatctggtctcaactatatatgcaacagggtctagaaaattgctctgagccaggaataaaatgatgaggctaggggagggacaactccagacagaagaaagattcgcacaatttattttattttggggggtcacagaaaattgagtatgaggctttctaaactcagaaattcctgtatcattacatctttatagtatacaataagaacaatttttccccattgtctcttctcactttaagaaataaagtgagaggagtttatggttcctgtaacttactaagccctggctcttcttcaacttgtaagatatgcaaaatataaactaagtgtttaatttgttcagtgatgctgccactgttggacacagatcgatatcaagatgaaacaatttttatatgaatataccttgaaataaatcaaaacgattttacttgtaaaaatcttgtctgctcaaatttctacttagagtcagtattcctttttaataatgactaatttttttagaccctggaacatgacagtctttttccttccattctgattgaatcatgcttttacctaagcttttctttaattttgtcatttttattactgtgaattaatatatatcaaaatgtttttatatttatggtaatgacttaatctgtttgaacaagtgtctcttactgtacattttctccctaattcctatggcattaatggcattaatgaccaaagaataatttggcttacaaaaaagtcagggctcccattaaaaatcacctttattattttaataaaatgaaaaaggcttattaaggaaggttgctgaatatttctaacttaatgttcactgtgattttcactaatcaaaataaagtttcaagatgttttgaagaaatatttgcactgttcatatttgtattactttttcctttacagttatactttacagttattgttatattaaaagtgtatatatttttaaattcatataattggatatatttgtgtaaaaaacatgacaacccatcaatatgtaacaatattctttcagatatatttaacatgtaatgctagagcaggatattatataatacttagtattaattaatgggaataatccattctattgtataaaaggaagattagaaatgaagattctgccaggcacagtggctcatgcctgtaaccccagcactttgggaggtcgaggtgggtggattacttgaggtcaggagttcgagaccagcctggccaacatggtgaaaccccatctctactaaaaatacaaaaattagccagacgtagtggcacatgcctgtaatcccagctgctagggaggctgaggcaggagaatcgcttaaaccctggaggcagaggttgcagtgagcagagatcatgccatttcactccagtctgggcaacagagtgagactctgtctcaaaaaaaaaaaaaaaaaaaaaaaattcttctttaaaaattatattaaatgtatatttaaatgtaaatataattttaaacataaattaagtaaaaatatataacatatttttgttccatatacagaaaatttaaagtgaataataaacatctatcctctactgttttatatctaaaattcttggagtttatatttattattagcaatccatttatatattcgaacggatgcatttttcaagcttccaactgaagatacagaattcctatgtctaacagcactcatttgagtacttggcagattatatttagtacagcgttaacataagcttttgggttttagcctaagggattttcaactttgaaaaatttaatggggatattgaatactaagtgaagtaaaatcagttaactcatttgatttttcttttctgtgagaacatactgaacacctgctaattcattcagattttttactgtgccctaaaacatttgccatattcatctatattagtgttacaagagcgcaatgttaaatccaaaatcgggggaaagtttgacatttcaattactagctagtccaccttccttcacacactctgctacattgaaactgctccctgaatcttttcctccggtaaattgtgcttcctgggaaactaaggggtaagggactatactgtgtagctttatagattttactatgttactgttttatgaaaatgcatcattttctaaatatttcaatcttcttaaaaattcttgtctgagtacagatttttcgttttttatttttggaaatagggtgtaattttatgtgcattacatttaaatatgggtatttcatatatgatataactatgttcaaattcaaaggtaaatttttcataaaaacacagatcattttcttctttggaatcttgatttacagaatgaggtctcccgcatcttcatggcagggctttggcatgcagcctgtctttgagtgtcaatggtgaatagataatctaagaagtgtaaattttgtagcaaagacttaaagatagccagtgttgttagaaattctctccagtatggagtttttcttcctttacttggtttctttcagaaataatgtacctacagaggaagaaaggctaaatcgactcggttgttgttcttttaaatacgcctgtctccccgctctgcaatgtgaatcagctcatggaatttcctgttccttaagcatctactcgtcattttcatcatcttgactttctatgatgaaatttctttacctgtttttgtaaccatacttctgctaataataggctctttcaatggaaatcttattacttgtggcactcacataatgtggggttgtatttaactattgaaatcaaaagaagaatcgccagcttgaggacagggagatcctaattgctgttcaggactaacttattttttctttttggaggtggggggcgggtaattgtattaccacttagtaatacataggaaaaaaatgcatctaaacttacctctgaaaaagaagaatgtataaaatatgcattatatttgaatggcatataaacaagtatataggtataaat

SEQ ID NO: 10640 - DNA, 6000 bp, Homo sapiens
attacaaaattatctttatttccactaataaattttgccttaaaattaattttatttgatattaatgtagctataccagctttcgtttggctagcacttgtgtcgtatatcattttccacagttttactttcagtctttgtgtatatttagtttttagaggtgtctcgtttatatcatattgttgttactattagtatgtgtcctatctgttctatgttcctttttttctactttttttttgatagttttgtttttgttactcctttttttcttctacctatcagatgggatgttgtatatatttctgttcatggttgttctagaaatttcattatgcatctctgacttatcaacgcctaaactcgcccagacttctgcgcagtgcagtagccttagaacactttaatcccatttactttcctcccagcttatatatgtggttgtcacatatgttgtatctctttaaatgtaagttattactgttgttttatatagttaatattgacttagatttacccacaaatttgccacctttcttactctccattccttgctgtgtctttgagcttccatctggagtaatttttcttttgcctgagtatatgtttagaatttactttagtgcaggtcacctggtggcacatttactttgctcttgttttttgaaatgtcgttattttgccttctttttgaaggactttttttttctcccttgaaatggatggttatctggaaaggtaaagataactttcccttgtattctgacttccactgttactgggaagaagtcacctgtcagtcttttgctccatttagactaatccatttttttttcctctggctgctttcacgattttctctttgtaattataattttttttttttgagtttcattgtgttgtatatacgtgaggattttattgtattttcccacttaggctttgtttggcatcttagatctgtgggttgatacatcagttctggaaaattctcaaccatcattgatttgttcaaattttgtttagaatcttacatctatatccatgagcgatgttggtctttagttttctgtttttgtaatgtcttttgtctgattagtatgatactaatgctggcttaatagaatgatttcagaagtattccctccttttgaatttttttgaagagtatgtgtaggattggtatcatttcttccttaaatgttttggtagagttcaccattgaagtcacctggacatgaagttttctttttcggaacatttttcactacaccttaatttctttgatagatttagggcttttaaaataatctgtttcatcttgactgtttggcttttaaggattttttccatttcatataaattgttgaatttgctggcataaagttgttcataatctttccttagtaaccttttaataactggaatgtcatgtccctctctcatttctaatattggtaatttgcatctgctctcttttttcttgacttatctggctagaagtttattgattttgaacgtcctagtaaaccatcttttggttttatttctgggggaataaagtaccataatcaagcttagtaatccttcttcttaccttcctccaggattttgactagatgggattctttgtctaatgaagtgacctaaaccttcatttctacagaattgagccgttgataggcctgtctttactgggttgctgcagttttccactgactaggactgttagcactaagaggcattccagtgaatttcctcgtttccatatatagcctatatagccttcttgtttccattgtaaaacagaaacacagttttcctctgataactggaattagctaccctggccagtccattgagctgcttttctgttactttaatggcatgaggaacctcaaaaggccagggccagtctcggctcctaaatcatcaaaacatgattatttttcctgaaggaagtgttctactcttggactctagaatttctaaacccaccaagcccaacattttgggaatgggaagcaaaaattattcacgtagattcttaggtatactattgaacagaaacactccttctaccctttggctctgagacctgtgcatcctgatagtggggagacagctccatatattgactgcttattaaattaatgtaccacattctataggacaccaccctaccttttcatgatgttgcctcccagatatctctgtaaccgagctctcattttgccactcagctgttctatcaagctagttactttaggagataagcatgtgttaaaaccattgaattcacttccattgccataaactgtgtacctggttggaagaaatgtttttgggattcctatgcaatggataaaaccttcagaaatgtcaagaatattagtgccagtggaaacactgcaggcagagaatgcagatttataccttgaatgtgaattatctttgtgaagacaaagtgctacctatttcttatggaaattgcccaatgtaaccatcatgttaccgggttgccagcaagtctcattgacagtaatgccatattaggaacccagccttggaaatgtagtcacactccacgttgttgccaggttgggcattcggcaatgatagtagccaaataatgtaggtaaggagaagaccatactattgaacctctgtcactgctttgatagccacttggtacatgggcccattaaccaagccctgggttggctggagaaaaagactgacatctaccagacaattcatcttgttccgcttattattgaaaatcttctccacctgatgcatcctgttaggcacttatgggggatatgaatatcttcacatgccctcaccactccaagagggttatctgtaagtctcacggacagatcttttacaaattttccattttgttctttccaagaacctaaaagctggacaatccattagacactgcctgtaagtcagtatatttatcagtttgtcatgtcgtcccctcctttcttgaatgtgaataaccaggtatgtagctagaaattgcccactaggaagattcgctgtccccattagcaatgcacggatctgaaattgtctcacttctttacatatctgtctgtctcccagattagactataaaatctccatgagaactaggactgtgtctcctgttcgcacaatatccctaatgtctagcacatagaatatattctaaacatatgtggcgtaagtgattgatgcattttcttgaacatttggagagaaaatgttaagcaattaaacttgtaaccaatttaagattttttttagtacatgtgactgtattatgaagaacaatgcaaaatttggagcaatttacaagaagatggaacagttcaagtaaatttgcccatgacactagtgacttcaggctcttttatgtatgcaacctaagtgatgaatagggaagtacgtgtttatggaatctgtcattggtggtatttcagtgggaaaatgtgaaaagctctgattttgaagggttgccagagaaagaggaacaggcagaggaaactgaaagaagaattttttttttttttttttttttttgagacggagtctcactctgtggcccaggctggagtgcagtggcgcgatctcggctcactgcaagctccgcctcccgggttcaagccattctcctgcctcaccctcccaagtagctgggactacaggcagctgccaccactcccggctaattttttgtattttttagtagagacggggtttcaccgtgttagccaggatggtctcgatctcctgacctcgtgattcacccgcctcggcctcccaacaggcctgaaagaattttaacaagcaggatgagcataaaggcaaagtggggttgtcaacatcaaggaaacagagtgttgggaaacaatggtcgactttgtcaatcgccaaagagactcccaggaaaaatgagggcaacaaaagtatcagttggatttaggaggccactgcttacccaaagagttcaggtagaattgttgggaggtgcagtggttggagaatcaactccgtgaataatgaattgtgttgacacggtacataatacggtatttctgactacattggcggcatttcactaagtaattactacctgaagtgcctaccttcagtaaggcatcctgttgttggatggggaaagagaaggaggaaataactcttagctttacctgtactgtgcttctgagacccaggtatggaccttcactcccaatttactatccatggtctcatccgatgttcagtaactgggttctcctttggcagggagtagggattgcctgagaattaaaaggggaggggagatttctgaactggacctcttaggttatgactagattgggtgcctgaggcagcaatggggctttataaggcttctttacgcttcatttaactaattgcttttttgttctctcttattcagtggagttccaatctgttcggttgtggagaacgaacctgagaaaaaggatctttcgcagggtagtttttgggggcagaggctgatgtgctgcaccccctaatcaggggtatggttggctgcagtagtcaagtgagagggccgcaaagggaaaggaaaagtcgagactatcttagggaaccaggagagtcgctgtacctctgaaagatctacggtttgtctggtctgtaaggagcaaacacggtggaattcctttccagatttttctgggcctcgacctctggcttttggggtacatgccaaaaaaaaaaaaaaaaaaaaaagcgcagggagagtccactagcctcggtgacagttccccattgcggtttcccctcctccacccttctttgcgagctccttccctctgcagagagttatcccgccacattaacccctgactcacagctggaccgccccggcccgcagcgccacgtcccgggtggggcctgccacggcaaagcagcagtccggcctcgagcggcccctcgggggcggcggggtgggcgccaacagcagtcaggcctgacaagcggcgacctccaagggtgaggcctctgcgggcccccgactcacgcgcgtccgggctctgcaagcgcggtggggagcaggctgctgtggtcgcggggactgggttgcggcgcgccgcgtacgggacggccccaaactctcgacgcccggggcaagacgcccaccccctgggcgctctcgctgggccagaaaggaagacagaaaagccgcgggctgactgtggtggcgctcgcctgcaggcaagtaccgggcgctagggcgggggccgccgccgggggcgcggggtgggctggggccaggccgccaggggcgcggggtggtctgggggccaggccgcctgcgctacctccccagcctacccgacccgacggcgcgggtgctggcgctgttgtccccagcggggcgggcaggcctttccgtcacttggcttactctgaagggaaaatccacacagctgtctgcctttttgtttcattttgactagaaaacccattttcgaaaagacacctcagaaccataagcaaatagcccagagtcttaaatgctctaaaggctctgcatgagcccctgccaggcacacagagccagtgctggaggttttggcatgggttttcctacttggctttttgtgcaaagctaatttggataaaaataatttgactggcagctgtgagctagttttcagtgtattaggacctctccagctttccacggtagtaaacttcttaaagaaagtattttaaaatattctcatatttattattattttttaatttatccttttaattttgaaaagcaagggtgggaaaggctatatgatctggaggtaaaaatacaccattatatagagttgaagtgtcatcccctgaacccacattgcacgtctacacaggagaagaacttgtccttctccaagtgtttagtattccttagattagtgtttttcaaacaagcctgatggtaagacgcat

SEQ ID NO: 10641 - DNA, 6000 bp, Homo sapiens
gctactttctctttccaacagcagcaagaagccctgcctgatgagacagaggtggtggaagaaactgtggcagaggtgactgaggtatgtgggcagtgaccgcagccccttagcccctctctacctgtatctgtgccctgagaaattagggcggatgctgtgggtctcaatgctagagtggggcattcgtctccctgtacacacatagcatagatgcaaaccctgagtatatcccacatcctgacacactcctgaatgcttcccaaaccttcaacggaaccctacgtttggggaccaggaccttaaaatttttgttttttaagctatgcaacagttgttcttccatgattacccacagtttttgcaaacgtaaaacagaggaggccgggtgcggtggctcatgcctgtaatccctgtaatcctttgggaggccgaggcaggcaattcacgaggtcaggagttcaagaccagtgtggccaacatggtgaaaccctgtctctactaaaaatacaaaaaattagctgggcgtggtggcgggtgcctgtaatcccagctactcgggaggctgaggtaggagaatcgcttgaacccgggaggtggaggttgcagttagccaagatctcgccactgtactctaccctgggcgacagcatgagactccatctcaaaaacaaacaaacaaacaagcacacacacacacacacacacacacacacacacacacacacagaggaaaggggagatgcttgggtgtggctggcaggggtggaggcttgacaccctcttgtgaacatagatctcagtcaatttagaaagtttactttgccaaggttaagaatgtgcctgtgacacagcctcaggaagttctgagacatgtgtccaaggtggtcgggagtacagtttgctttcatacattttagggagacacgagacttcaatcaacatgtctaaattgtgcattggttgagttcgctaaggcaagacaacttgagaagtgagggcttccaggttagaagtagataagagacaaatggttgcattcctttgagtccttgatcagccttcccctgaatacacaatttaatctggctcagtgaatctgcatttttacataaacaataggggagaggaagcaatcagataagcgtttgtctcaggtgagcctcagagggatgactgcatagaataggaggcaggtttgtcctatgcagttctcagcttgacttttccccttagcttagtgattttggggtccaaggtatattttcctttcacactctctttccctaacacccctggtgacctctaaggcagctcaacagaatcccaggcatactgcaaaacacagcaggcctatagattaaatctggattcccaaccctgcgtttgtgctttctgtgacctggaacccttcagctacccttatgggtctgggatgggagtggggccatttcacccattcttctccctcaattccaggtatctgtgggagctaatcctgtccaggtggaagtaggagaatttgatgatggtgcagaggaaaccgaagaggaggtggtggcggaaagtatgtcccttccctgtaacttggcacatccaagctgcccttggctgcctgggcctggggcacgaggacagcctacatgaggctccttccagcagaaatgcagggtggggtcctcagtgggctatgaaggaaacacggctttgacttaacaagtgggaaactgtggcactcagtcccctgggatctgggcaagatcggtttccaggccatccatgtgtgtggtaggaaggagagttctccagctggaaatgggcttctcccctcatagctctttgccctgagtccaaagctgagtttcccagtcccacggaggtcgctgatcacatctggtcaccgaaatctcccattgcttctgtatcagcccgtgccccacagagaagtagaactgagagaagagatcaggaacttgcacactcataagctcattctatttcacacagtccaaggaaacgaggtcctgaggaaatgcaacctgacataatccgtaccatgctatccatgcgttagtgccctgggagagaaatgacctaggggctctggctccagccctaggtgcaaagcatttgtactcaaggggttaagagcaaggactttggaagcggtccaaccaagctttgaacctaggcttctccacgccagcttgcttagcatctcggagcctcagtttctcatctctcatatggggctgatgaagatggcagacccttgtcccagggctgccgggaagttttcagacaagctgagtaggcatccgctaaaggattattaaaacacccaaaataaagcattgcgaggaaaaggccacattaagctctcatcctgaggggatagctaatggtatttgatctagctgggcacagggtttctgttgaacagagggacatctactgagtcatgttccttcccgcctccacgcccacctcatccggtgtttaccaggctctattgtccagcatggactttgaggctcttctcccttttcctttactgccacttaagtctgttttgttgggcctcagctccctggctcagtgtcaacagctgactttctaagccattctagaaagcttattctggaatccagaaatgccccactgtgattgttcaatggagacccaggaacacaatggttgcttcaatcttcaggaaagccatatggtatctagtgtttctgggtcccagactgagcctccagccccccagaagtgcctgacctctatctcaagctaaacctctaatccccaggctgaaccagctgctgccctaaatgttgactgtgaggctcagtgcaagagcaggcaggactcagggctgtccaaagcccagagtgggggccacagtcaaggactgtcagccctgagatctgtccaggtaggatgggggtggatgtgctagtccaggtgatgctaactcccttgtctttctgccctacagatccctgccagaaccaccactgcaaacacggcaaggtgtgcgagctggatgagaacaacacccccatgtgcgtgtgccaggaccccaccagctgcccagcccccattggcgagtttgagaaggtgagggctgagagacaggggcagggggaagggattgggcacttcggaatacaggatgtctgctcaggaaactgttggcttggtggttctatggggcagtgccagtctcagaagtccccttgctagacctagtcccagcaggaaagaggggatgagtcagagtgctctgcctggcactggatcttttcagcaaccagcaagactttaaacagcaccatcaggttccaagccctgtgccagactcttagagctaagagtataacagcatcagcaaagaatcaggtccaaaaatacgggttctggggccaaactgaaggttgacttcaaacctcatctccatcacttattaggtgtgagatttaagctaagttgccgaaccttttcaggtctcagttttctcacatccaaagagaggataaaaatagtccttaactcatagatctgttgtggagatgtgtcagaaatgtttggtacataacaagtatccaataaatgctacttaattttaaattatctctcaaatatgtcccttctctccaataggatccatccatccgtccaagtaaatattttttgagtgcctgctcctgcctaccatcatgctagtggcagtctagctcatggcagcaaatctagggccagcactattcctacagcctcccatctggcttctccatcttcagtttctccagagactacatagcctctgggctccacattttaatatcattgttaacattttcctcctcctcacccctccccactcccagtgcccagtcaccagtgcccatcagttctccctctgcagtgacatataagctatactaaataagtacggacaggatgttcaacacaggctcccctcctcctaacacagctacttacggccactgcatgtccagccctcaacatctctgcttggccacccctatgttcagagatcgactaggactccattggctcagcatacagttgtactcacacctaaggtttagtacagcgacatattcaggatatacagctggatcgtaagggaaaaagacactagcagagtctggaggaatctgggtggagactgactgactcccaagaggggtcatcagagtgcattcttaccccagctacaaagaggcagccacatgtgagtgatgtttctttccagggaagttcattagagactcagcacccaaagttttaattggaggctggtcacataggtaccctttgcctagcatgcaccagaatttcacacttccagaaggaaagcagatgttcagcataaaccagattgtttgtacaaacagtccaggcatagcgagccactcttatcagttagggaaagatttacaacagtgcagagaactgtttcccagctaagttcccagacaccagccacaggctgaccttacaagcaggccttttctaaggataacaattccaggcctgctatgttaactcttctttgaacactcttgtttctctcccattcctgtctttaactttctcttcaaatatcttccaggatttttttccctatatctcagaactgactcagtcatgcctctgctcagagaccatcgatggctctcagcctgggctgagcattgacctgggaacccaaaaagtggatttgtggcccagccctatcactaactcactatatgacctcaggctaatgacattccttgcttaaccctcagtgtccccatctctgaaatggacaaggatattggtatcagcgaagggctttgggaatgaaggagggggtactctgtgctttgccaacaggtgtgcagcaatgacaacaagaccttcgactcttcctgccacttctttgccacaaagtgcaccctggagggcaccaagaagggccacaagctccacctggactacatcgggccttgcaaatgtgagtgtccttgggcccttccagactcctgtcttggggagagagctctgagctggcactgatgctgtctctgccacccccatgctgggtgatcttgggcaaatctctctccctttctgagtctcggcatccccatttataaaatgaggtaattgtctatgagttggctcctctcaactctgagttcagggcactttctggggaaggactgagcgattatggaaggtcaacatcagggaagatttctggagtctctcactagcatctgagacaactgcatttcatttctctaatgaggaagaatttcttctctcaggctaagttgaatctttcttgcttcaacactgtaaagcaaaaatgatgtttgacctgggcctacaaaatattttgaaaatatctgattttgaatgctttaaaataagggcatgcctgtcggtttgctttgggccctgttacttggtactgtcatatcttcacccttttactccattacattcctatctgccctccgaagagagaggataagcaccctcttctggaaacctgggagtcagttgtctggggagggatgccagggtgtggtctgatctttggttagtgaccccagctgcaaactcagtggggccaagtgccttgttcagtatcctccctatcatgggagacccccaagaccacacctgctccccctccaaggcaacatccacactgtgggtcttgtgtattctggcacccgatggcaatgaggagagccactcacctacctcaggtgtacagggtgcagaaaagtatgtagggggtgggaaacaaagttctcctcgtgggaccccaggtatgaaattgagaaggtacagagtagaaaaggagggttgggggaagaagcatgggtaggaagtccctgggcagcaagactagagagcctgtcttaaggagtctttatgaagtggctttgctttccctgaggcatgttg

SEQ ID NO: 10642 - DNA, 6000 bp, Homo sapiens
agcccgacaaccatgttctccagatgttcagtccctcttggccaccccacaccaaatgacagtccgcgagactctgcccatggagactccacctgctggtcctctaggtggagtaactgataacaaaaatctctagcttactcctaagtgtttattctgaaggcagtatgtacagcaagaccagacttttggcccagctagcggtgactactgcaatgtcaaaagagcacataaacagacttaaaaagcaaatgacaaactgggaaaattgctgtaacataggtaacaaagggctgatattctataaagagttcttgcaaatgaataagacaaagatgaatccaagtgggcaaaagatatgctgtaggcaatctgcaaaagtgatgcataaaaacaggttcaacattactagcaattagtggaataaaacttaaaacaacaatgcaaaaccatcgttctatcatattaacaaagatgacaaaaaatggtgtgacagtgcagggtgtggagaaaagttggtgtcaaagctgtgccatctttctgtgtatctttcatatcaaacaaacgccttcaacaatgagcacacctttcgacacgagttcccagactttatcctaaaaaaaaaaaaaatgacgtgcacacagatttagctacaagtaattttgcaaaagtgaaaagttgaaaacaacccaaatgtacaaaaataggggagataattatggtacatttgtataatagtatgccacttggtcattaaaaatgccatagaagtatatttttcataaacttatttctagctgctggttttacaggtggtttttgcttttttattttatcatttatattttcctgtaattattgcatattttttaataattttttaaaaccggcaattatatggtgaaaaggagagaagggcattagtaaattctgaagcaactgaaattaaattgtaattgctcattaataaataaacatcattacatactaacatttaccttaaataaactagatttcatttttctactatgggaggaaagacctaaaatacaaattgactcgaattatagaaaataaagttacaattcaggaatatctgtctttggactgtgaaatttgtacctgttatgtatgtgtgtgtgtgtgtgcctgtgtgtgtgtgcgtgtgtataaaaaatatttggaaagatatccactagtttaaaagtggttcctttcagcagggtgggatgagagggggacaggagacaaatttttatttacacaactctgtatgacttgttataacaagcacgaaaaatcgaaggtcacttaagtaaaaatggttataattatgaaaatacttagaaatatgtaaagtctctatggtatgattagaaatcataatgcaaaatctgtatactgtgcttatacctatgttcatatatttccatgtgagagaagcccgaaggggaatactctgcggtgaaagtagcttttcaagttcattcattggttcatttattccacaaatgtgtgctgagctgctaccatgggccagccaactgttgcagccaccgggatatagcaatcaaaaatcaaatgtgcctccactcagggaacttaaattctagtagtgggagacagacaatacatggtaaacccggcgagtatttcaggaagtggtgagcgtcctgggaaaagtggagcaggccaagggagactagcagtgctctgggtcaggggcaggtttaaacaggttggtcaggaaaggcctcactgaggtgacatgggaggaaagatttgaaagagctgaagggttcagtcctggaaatgcctggaaggggtgttttacaaatagacaacagccggtgcagaggccaatgcagctaacagaggaaggggagagcaggtcagacagctaggcaggccagtgggttgtccggctctgcagccattgtaaggactttggcgttttatttcaagtaaactgaggagccgctgtgcagtttggagcacagaaacgacaggatccctgtggctgctgtacggaaacccagcgactgggagggtagggagggcagggagacctaggtgttcaggtgagggatgaaggggggtgtggacatgttgaggtgttgcatcctagacacagattgaaggtagggtcaacaggatttctagtcagattgtgtagagggggtgagagagtgaagctggctcttctggttctggcctgagtaaatggagccgccattaatgcccatgggaaagacaggtgggcggagaaggtttgaaggtgggggaagaaagggtcttattttcttcttccttgcaataatatatcccaagcaatataattaagcaatatgtatttttccctttaaggaaattccaaaaattatatcgttccaaataaaaaaatcatctccagagtcctgacgcagcaaccattacattcccagtaatggaaatgttaagtcagtccgtgctctggagaaatcccacgacagaacacaggccaggagaccgggcctagattccggttttcgaaccgtgggggcaaacacggaggctgcaaatccatccccagtccggcaagattctcgaacatgtcgggagagggctgcataggaacttcaaaaacgagtagcggctcccctggattcagcgtgagggggaaaccgcggggcaggttcgaaactcaggagtccgacgtctgaaggagcgggaggctgcttccgaggagcccggggcacgacgggaagggccgcgccggccaggcagccctcctcccggcagcctcgggcaggccgttcacgcgccggcgacggcgggcccggccgcaggtaccaacagcacctgtcagagggcagcgcgggcgcaccctgcaagggccctgcctcgtcaagagaggcagcgagaaacagcagcgatgaacgaaacaaaaccttcctccaccacggctacacagagctcgcgtccgaggaagcgggaacacacaggccccggtgctttccgaaaggcttctcgccaggacccgcgaccagcgtggggcggagggggggggtcaccctttttgagaaaccaggtcaagcaggccgtcgctgggcgacctttgggcggagggagagggcagggctgcaccgcacaggttccgcccctacttcagcgtcctcgcccctcccaagctccgcccagcaccccaagggccaacccccccgcgacgcatgcgtgcttcttcccgcgcggctccacctgccgcgcgcttccgctgctggccagtctcttctgcccctccccctcctgtacggccgctactctgcgcccggcttccttctcacaacctggttctgcccacacctgttcttcagccctgtgaacagtggctgtagaacagtctcaggccctgcagacccacctccctcgctcccgtggtggcggtggtgacgggctggggacgttgggtagaaaaatgggcgggatgtggaacgctgcgttgccggggcccacttccggaggacgggcggaagtggctgcggtggatggtgggaggggggaaggagtgcgaggggagggccgggccgctgggggtcgagggggtggggcctgggccagcgctggggatcgggcctggggcctggattgcgacccgcggcgggccgcggctcctagccgagacggggcgggcgggaaccaggtaacgacccggcgcagttagagcgagggtcgtccgcagggcggacgggtgggggtcagagtccaggaagggtcgcagtgtcaccctcttctcttgtgaacacggggcacggggttccggggagaagggtgggaggagttaaattcttggagggggtggaggtcatgtggacgccacgcccctacaggaaggaaaggagagagagagtgtgtgtggatggatgtgtgttgagagagagaatggatgtgtgtgtgtttacgaataaacttggaggggagggggcaacaggggtgggttttcgggctgagaaatgggaacactgtggggctgctgcaagcaggacttgggccttaaacattccaggagagtgttctcgggagtagccccgggaaggactttaacagaggttgggaattacatctctggcacagttttgcaagcagagggggagcttagttaaaggagcaaagaatgcaagtggaagatgccagcatctcggtctggaaaggatttattaactagttgaagagggctggtggattaaaacactcagcaccctaagaagcttgggagattcgattattatgttgcgctttagacaggagggcaggagaaagggcgttcttttctcgatttcttagaagagtctccggttacttttctgtggtgagaacgggtacgatccatcttttatcctgaatcatgtatgtttgtacatacatataatatgtttatattatatgtgtttatatatgtaaacactattgatgaggtgactgtgttctggcgtgtgatacgtgagttaagtaggtgctttgtataaccttgcggagtgtttaacgaaggtgttttgatgatagagcctagtatggactcttaggtggggagtggaaactagaaggttttaggactctatttgggtatctagattagagagcgttataatgtttaaatgttctgcaggttaacacagaaatctgcctcctgggccatgccgcttctaaggcctgtttcttctcatgagccccagcacaagacagatgggccagttctcacagtggataacttcccctgcctgagcaagagatgggatagtatctgggatctgtccatcaccagactctgagcttaataaggcagctgaatgaagggaggtaacggacccctgagaggggcactgaagtctgcagtggggggggaggggcctggacacaccccttcccccccagactcctccccgtcagggtcagctcagccatggactttggacctggataagaagagagaagctgcactttggtggatctgatttgggattctcagttttgaaaatggagtgctgaatggggatttgatgatctcctggagagcaactgagacaagagaagaaaggtaaggctcctgtctcatttcccacttaatgtcttgctgtgcctgtgcagaaggtgttgagctggcgagttcgcggaggctactattcaggaaatcttatccagatgagtacactggaagctacacctctccattactctgtccaggtatagacttgttcccaacttccccttacccaagctggatgagtgccttgtaagggattgtgagcaatggcagttgtgaggttaggccaaggagaacatgataataattgaagacttctgaagggaggttggattagattacctttaaaggcccttccaacactgagataataggattccaagtcagtctgggttaagactggaatggattacctaggcagaggcagctgctctgttttggggagctaactgaaaaggactgctggtggggggagaaggcgggaatggtctagataacctcctaagttgtctcccttcctacttctataaggggagcttagcccatgaaagctcgggaaaagagcagaggaacagaacacaggtttgggggtcaggaaggagtacttgtgttctagctttgactttttgagtcagtgtacaaccctacacaggccatgttctcttcacctacaaaatgggggaaaactgactttccaggtcccttacaagttgttacgaggagcaaatgaaacaaggattttgaaaagtatccagggccgtgtacacaggaaacaataacatcgatgttgctctacgtgccttaaaagcacagaaacaactctgagtcaggagttctgttttcttcttgaaatagtgtgctggcaacagcctaagaagatgtccttagtgaaaagcctgcccctgaatgtgtttcatcatcttgttggtaaacagtacttgggatcatcaagttgtagaacaggtgaatagatccaaggagaa

SEQ ID NO: 10643 - DNA, 6000 bp, Homo sapiens
tactgatagaatataatagtgttcatcttctacaggatagcccttttttttcttttacttttctttgttcattgggcttgtggttagacattttatcttttaaatttgcaatttaccagaattcctttccttaactatcacatgagccaatcgttcaagacaactgtcctgtatctttgtttgagggtggggaggaagcaaagcaaatcctcacccttttaaaagtacaagtaggtcttagatcttctgttttcactctatttaaacactgatcctataaaacaaaacagaattttatgaacttcaatgtttaattaaacaaacatttattaaatcacatctagaaagcaacattttcttctaatattattttataagtattctttttttttttgagatagagtctcattgtattgaccaggctggcctcaaactcctggtctcaagggatcctcctgcctcagcctccaaagtagttggaactgcaggctcatgcagccaaatgtagcccatttgatattctgttccttgccaataacactattagtgctactaatatttaaaatagtgtaatttattaacaataataattctcaaacattatgagtaaacaaaggaattattaagttaggcgtcaatctgaaaataatttagagaataatttttttaaaaacatgcaagaaaagtaaaaaaagaaaaactagaaaatggattcatatgcttcttgataattaagataacttccacaattgcaaatgaaaaaatacttaggaacatcaggagtaagcaagctatgatcttgacaactgaaggtttagatgtacacgttagctgaatgttctaaaagctcaagtgctatcaccttttagtgaatattcagaagatggtgcacatacatgttgtatcagcaaaaagtttctttatagtcaatagaaaaatgctaagtcaactttactgaaaggggactttttgtcccttctctattcccaactttgttctatttgcttgatgtgacgaaaaagaaagatcaaggccaggcgtggtggttcatgcctgaatcccagcagtttgggagaccaaggccagtggatcacctgaggtcaggagttcgagaccagtctgaccaacatggtgaagccctgtctctactaaatacaaaaaattagccgggcgtggtggtgcatgcctgtagtccccgctacttgggaggctgaggcaggagaatcgcttgaacccaggaggcggaggttgcagtgagccgagattgtgccattgcactccagcctaggcaacaagagagaatctctgtctcaaaaaaaaaaaaaaagaaagaaagaaaaatataaatgagataaggtggcaatgttgtaaaggattgagcaagattttttaacaatggggagaagaaacaagccatgtccttttaccaatgaaacatccaaggtttatttagaaatgtaaatgttttagcatatttgaatgaggcaatgggagtgttgagattgatacaactgaaagcaacagaatactgtataacattttgactatagttactaacaaagtattctattcttgaaattcactgagagtagatgttaattgtactcgccacaaaaaagataagtatgtgaagtaatgcatatgttaattagcttgatccagtcattctacaatgtatacatatttcaaaacactatgttgtataccataactatatatagttttatttgccaattaaaatataacttctgttttttagagacagggtctcactttgttgcccaggctggagtgcagtgaccagaccacagctctctgtaacctgaaattcctgggcccaagtcatcttcctacttcagcttcccaagtagctaggattacaggcgtgtgccaccacgtctcctaattttttaaaattttgtagtaacaaggtcttgctatgttccccaggttcatctctaactcctggactcaagtgatcctccagccttggcctcccaaagcactgggattacaggtgtgagccatcatactgagcctaaaatataacttaaaaaaaaatgaaagcaacagaattagacaagctcagaatattttgccaccactattgtttaaggaaactttttttcccaaaaaagtatcccaaagggatacttaagaatcctctttaatagataacttttaacagtgtgcattgtatgaaagccaagccattctaaaattctgttgttgaaattgaagcaagagatttgtaatttaaaagttagtgcttcattatgagattttacccttttttgccttagttgcatagaaagttctcagaaaacagacaagcttacccagagggagaactaatgttcaagtttccaaagtgggtggtgaattgaaaatcatgaaaaatattatgaaactaaagaaaaattaaacgtatgatctgatgaatgtatttatgtgatgattgacaagttagcctctaggttccactgagcaatatttatgggaaaggagtggaggagacagggaattctggcagcttgtgcctgctatttatgtaccgttcagcttagcaggagagggacgaagaactggggctgcattaaaaaacatcctctgggctggctcactgggcttgctttgaactcttgttcatcattattttatgctgcagcttgtctttgtgttggtggaagggaaaagaaaaacacaagagactagcctttagtttctaaatcaaagctgtgctttgctgactgctggagtggcttttcaaaagcaaaacaagtggggacattaaaattccttgcttttgtaaaccaggagctgagttggggttttttttttcttctttttaaattctcagatgcaaaagggtatgtttcaatgtgtcttacatttaccttgaaacaatctcagtatgtttttttccatttgactggcacttggagaagataaagcaaggtgaaaaaaatactaaggaggaacctgcagaggtttggaggaagggcgttcattgtcatcgaatttaagaaagagaaggatatgtaaattttactaattaatgcctcttacacatcctttcttgatagtgaccccaaggtccaaagacgttaaatcagttgcctaaagcccagacccagaaagtcaggactagaccttcctctgtggattcccactcgtcctctttacactgccctatgctgcctctagcgttagccggagaaactgtaaggaggggttaggggaggagaaggcaaagaaaagctggagagggtcgtagattcttgcctaaggaggcaagaagtgacctccctgagtcaggatacttgagcatttgacttgactaagagaagtagcccgctagttccaggcgttgaacgcgccaattagctgccgctgagtatctgggatgttttttgtttgtttgtttttctactttggaagatcaatgtaaggtagaaagttaatccctttcttcttgccctccacgccttccacgctgatcgaagcgaccgtcctccctcgaacatttcgtgggctcattctttgtaacacacttgctctgggccttaggtgtctctttaaaccctctctcccctctttatttccaaatctttatctttggctttcttaagctgtaaaggcacactggcaccttaggtggtcaggtaagatcgctggattccttatttcggcgaaagtccagcggaccattcccgccactgtacccattttagaaacacttggaagacccttaaggatcatttacggagagaaaggtgtgcattctgcggctgccggcgggcagctagagaacgtggcggggggcagcgcatctggcgccttggccggggcgcggagtgggaacagcccgcacgcgtccgctgccgccctgcctggcgacgagtggcacaatcgcccaccaggaatcggctggtgccgcgggtgggcgaaggcagcgccgccggcccggagggcggcgcggagggtggcgctggcggcgtgaaaggcgtctttgtgcaagattgagtgtggtggggggaaggcgaagagagaactgatccaggacctggacgcgggggtctgcggcgcccctacgcccccacgcccccagccgtccgcagtgccggaatgagccggatagcgccggcagggggcagtgtggcgatataggggttgccggggggagaggagggtctctgttcacctctatttgaggctgactggggagaaagctgcctggaggaagctgctggggtgcggggggctgagggatttggctccccgccctctcccctagatggcggagaaatcgggctagctggaagggcgcagctcctctcccagagctcattctggagtcggagaactgggagagcggcccccgaggcggagcctccctcccgccccgagtcgcgctgccccccacctgggggagaggggcgggcgccgcgctgccttccctccgcgcctcggccgcgtggcttgcggcttattttcccagctggcaagcgtcgcgctgcagacaagggaatgcctgtggtgagttgtttattttgttgaagtttgcggtgggcccgggggacgtggggggcgagcggcaggcagcggccgggactgttttgtttaggtctccatccacctgtggggtataaatctgccagcctcaaggcggcgggggaccggagtgagaaagctctgacgctcccaaaagccccttttcgcaacttacagatctaggaccacatttgattctccacgcctggaaccggctagatcctagtttacgctcaccccgccctccagcctcccatcaacgcttcccgcacccgctgtgtgcagggctggcgctccgcagagcaaacagcgcccacgacccagggacagctggccaccgaagtccctccccggcgcccttccccgttccttgaggataggggagctgaggttttcatgtgaagggcgcccatgaaattcgtgggaacttgttctggcgtcttctggagtggagttctttcaggggtttcgggtctgcccgggactacaaaatgggatcctgggttggctggagtttcccagactaggctggagagaggtcggctgttggctcgcgggagagcccagaggaaccccttgggcgatggcagtcaagaccggcggctgcgtttgcctggaagaaaagcctaaatacattagcgagctggtaaagcttttaaggccttcttgggagcgagtggctggctaatgagaggttaattttgtttcgaagggaaggctgcactggtttcctgagataaatggacaggaagcgcattacctccgcgcgctggcaagcggctcccaaatgctttttgcacctgccgttttgagcggtgagagcagcggcggagcccgcagggattgcgggggcccgttgtctacgagcgggtgatgagccccccgcaagccccgggctctctccctccgcgagtgcattgctcacgccaagctttgggactcttctctcacacccaggtcctgcgtgttccgaagttcaggggccccctgatcccgctgagccccctccaggagcgaaagggttaagaatgatgtaagtacaggcacttgatttctcaagtcgcccgcttggccctcttccaagttgtactttccttattttctctcctttcctttccttactgttctaacgctttttaataaactttcactcttgctctgaaaaaaaaaatgatgtaagtacaaaccacgagctgcttgacgctgagctgttggactccgggctatttcagccgctgctttgggtacacagtggccggggagcagccggggagcccttactctagaaaggattgcacaaatcgcaagcttaggtgatctgttaagcagtcagagattctcctgttagatttctggaaatggagacatattaactggagaacagttaaaaacatcacgtataggctcaggaaatgaaactgcatcttgtttagaatccattagtgt

SEQ ID NO: 10644 - DNA, 6000 bp, Homo sapiens
aaaatgacttctttgaagtttttatatttctttctaaaattactattaccgattttgcctattttcaagcctaacatttgttgaatataaacggggtagaggtgaagaattcttgagctagtggagtgtttgcggtatagacatggaatacaatgatatttggaagtttttaagtcatacatttcagattacttggtgctttattaaatctgtattacatatctttctaatataatatattttaataaaagctctcatggaacctaggtaaatagattagacagatggataaacagatatggatataaataaatattttcagaaatcccacagatcaattgagtacaaaaatttgatctgactcattattcagtagtataatatactagggcaaacatgctatgtcatatgaagttgtaaacatttattaagcaggattattaattcttccttcattcaacacatatttatcaagggcttccaattttcaggctcacacattatgtcagacctaaagctatttatattaagtatgccagtataaaacaggaagttatcacataagcactttattattcaagaagatgaaataaatgcactactgtaattttggaatgtaagtaatgccagcagtcatcattttaaggaatcacactggcattggagaatgtttaaagggccattcagtggacataatctcccttcctactttctcatgttcataaatcactcagattagcagagttgaattgcatatgttgatctcggtggaaattaagggtacatgtgtcaaaatactcccttaggaatacagaaagcaatttgttttaaaatgagattttttgtttttgaatgaaaggtgaatgattgtaaaataaaataagcaaactgtgatgctgatactaaggatgatttgactcctgacatttttagcatatgatagtttctctgtcacataggagctcagagttaccttgactacaagtctaattatagatggaaaggaataaagtatgactctttttgttcagctcttttaatgaaattttccttgtgatagcaaagattcctaaattatttgataaaattcaattttgaatcatagaattggtaccccaaatgaactgtattggtgagctgattaatatgtctcagaaaatcacgtgtgtaaaggcaaacacatttatatgtgtatcaaattaacacataatgtatgtgtaattgaattagtgtattgtgtgtgtatgtatatgtgcatgtgtgtacacacatacatatatgtatactcttacacatatatgcataatttttctcaaaagttaattcagtacatggtaagataattcacttttgaggaaataacctgcgaccttagcttatgtttttatttttattttctcaaatatgctatttaaaataataaagtgtgatcataagttgtagaggacaaagagttacattattcagaaagttactgattttcctttatttgctatacttaagtacatgtgtttttcaaacatgtaaccttgtaccttggtacacactatttctaatatagtaattgctgcctttgtctccaatattagtatataattattctaaacttatgccacctttttatttcatattcttctccataattacgatctataattttcttttgttttttgttacttactgctttttggtgataataatgaatttaatttagtaagagtaaattattgtcctgatttagccgacattgcacaatttaattccttgttctcagattaattacctttcacttgtttgaaatgaaatttttacttttagtacaattttttttcaaatgtatgttaaaaacaaatccttccaaatatacatgtaacaccaaaattatctttgaggaaatatatattaacaagatattttatattagttattttgaagctttgcagtattagttgcttcttaaatctctaatggatttttctgaaagcttgaactatgtgtttatctgaatggatggacagatggacagatagaaggatatagatagaatatacatagatatttacctgtctttatacagataagacatgttatgaaacatttctagctacacatctgtatgcatatctatgtatattcatttgaatagctttatatagctttactacatgcacactactctattgaagaaatccttttgattggtcattcttaaacaatactagcattttgtttctacctacgtaagagcaagtcttacagtacagcttttcttaaattatgccctggaacacacagcaacacaaaggagcccggtcagattcatttagggaatagaacctactgtatccacgccccccaccccaccatacagtcatgagcacattgtgtattaaaggatcaggcagtacaacattgtttaacttgtatagcccaacattttcatttgttcatatggtaagatttttgtttgtttgcttttttttttcttttcttttcttttttttgagacggagtctcagtctgtcacctaggctggagtgcagtggcgtgagatctcagctcactgcaacctctgcccctgtgttcaagcaattctcctgcctcagcctcttgagtagttgggattacaggcagctgccactgcgcccagctaatttttgcatttttagtagagacgaggtttcaccatcttggccaggctggtcttgaactcctgacctcatgatccacccacctcagcctcccaaagtgctgggattacaggcgtgagccatcgtgcccggcaggccatatggtaagtttttctcaactcttctgtaagcatttcaaggaccaaagttttgtggtaataattgtggaaatactactctagtaggaagagtaaaaaaagttctagaattccctctctaagtattttataaaaacatataatagctcacagaataaacaatttccatttatgcaacagagaacacactggcccaagggaccaacaatatttagaccagcagtgatagttacttcattgtgtgtagctttttagtaaggaaaaaaatcaggatactggcttcttacatatgctgttgtgggtgggtataccttctccagtgaaaacatgggtattggcattcccaaaaagagaaaatatggaaggacccatccattgatgagttgcaagtttcatgaattattatatgaatttaaaatgtttttcctttcattaatttgagatgcttaaatgattattttgcctttcctctctgcaagatgattaaaggtttttaaagctagagccacatctaaaattcctttttcctttttgctcagttgatctacatatacctccttttttttaaagcaggaaagagaaggataatatggcgggaggctccagtttattatttttgcaacagccattccttttatagcacatactgaccaactccaaggctgttaaaatgtaattcttaggaatggtgttttgacaccatgaagacatgtgtagtgaacagatgtttgtttggctttgcacttcactatttgcttatatttcacgggagaggcaattacactgacaggtatcagattcagagagtaagaagccaaatgatttctaaagcataaacagagcttcccatggcaggggcttattcctgtggtctctcaagggctctatattttcaaagcttagagaaatcaaatccctgtttgaaaaatatttttatttttttccttcccttgctgatgtcatactgttgctatggagagaaagtgagtgctgcatgacattgctggaaaaatcaacactgatgtatttctgtacagcaaataacctacctcatagcttttttttattagtgtaggcttgctaaaaattgtcaatactaatactaaaatggacatgttcctttgcccaaacaactttgctatgtaaaagtcttgtgaaggtgtacttaaatggttccttcctaataatgctaaagagaatgaaatatataataacccatgtgaagtaaggaagcagaatacatattttgtaaactattagatattttttctatcattgggaacttttttcttggaaatatccactgttttaaaatctatttttaacattgagtcattcaactgtacagcactacttccgtcacatctcaacccttaaaaaagattagtgctgatttcattttgagtcattcctgaggcattcttttcaaccctgctataaaagcctagttgccaagtcagacatcagggatacactttgaatgtcttagtggggacacatgattctagattcatctggctgtaaggaaggaggcagttaaccaaaaacaaggtccaggacttttgatgttaagaggaaaagccatttttaaagacttataataaataatatatgataattatattgaaggtttctgatttttaccattgttaaggaaataataaagattttccacgagaacaataacttttcccagtctatgagttttagcaaataggaggggactaaagaataaaaagattcaagagagaaaagaaagtaccatattccctcatctactaaaatgccattttcatcagtggtatttagtagtgttcatggtgtgcctgcaaactgacactccattgttaagtggaaatatgcctttgacaatgtgcttttgatgttgaaaactgtgatgggttttaatgaaagctataaaataaatgcacaatatttctacctttgaatccattgctggcagatctaagggcttcatttttcttgcattaagcatgtgttttatgtgaatagttgatttgttatatcttttttttgcctgcagtggcacgtctagtgatgaaatgtgcaacttatacattatgtattacatggaagccaagcatgcagtttctttcatgacctgtacccagaatgtagctccagatatgttcagaaccataccaccagaggccaacattccaattcccgtgaagtctgatatggttatgatgcatgaacatcataaaggtaataattgatgtttaatataaagtaatatatgattttgtattttatatttttgtatgtatcttgtttgatgatatttaaaatcatctttattcccttcttctaccagtcacatgtacacacatatttcttattttctcatttttctctttcatatcctatctcccctccctgacatgtacccatcagaacagttaaagaggaaaatctcagccagggatgaaacagattcattttgggaccaatcccataaatgtagaccttttttcacttaattcatgttttctcatttcctcatctaactccttccctaaccagtaatgacttacacagtttatgaatttatgcaccatgttctaaagatcactacagtttgccagggaaaatggttatcatctccagccatactttaaattatccatttaatgggcttcttcaggcaaagaacaattattgatttgtgaagcattgctagtcttgactttttttatctaattctcagaattgttatttaacatatatatagttcctctgcaaaatggtcatattgactgtcactttttaacttaaaattgcaaagtctactccttgttttatcgcatgaagtatgctgagacttgattgagttttgcaagttcagtcttaacacgctagagcagcttcttatttctttctagtggaaattttatgagagaagttagcatagcattctggccatttattaagattctactatatttatagaatatgccttaaagtgttcttaaatgttcttaaaacagtgctaaatttaatttaagaaaacaaatatgagtcattttgtcaatgcattttgaaaattctgtatcatttatatattattgaaagggtagttgacctagttattaagtcagatgtcttgtaattggtaggttgtgctggggggtggggggtggggagcttatgaattagagcatttctgtcttataaattcttaatacggt

SEQ ID NO: 10645 - DNA, 6000 bp, Homo sapiens; identical to SEQ ID NO: 2359

SEQ ID NO: 10646 - DNA, 6000 bp, Homo sapiens
gcaagtatagtgattacaagactgaaaactttctcttcccataaaggtgctggaaatggaaacctgcaaggacctagacacatgcagaaaggcagagtggtcagtaatgaagcttttggttttactgtatttatgatttttgggaatatgatttgacctaaatccttactagttgagtatgtatcgtggtccttatgggaacattgctgtaatttgaaaacaatcacgtttttctatggctttgataacagttaaaactttaaattttgtatgcccatagtccagtgaggtcaccttaattcagcatcttggaagctttgctgtccagttacgcgtacaatatttaatttaaaaatcactacagagagtatgttttgacactttgaagtagtttaaccgtttggttatggtcagaaagaacttacccagtgacgtttgatatgtagctttaaaattctctagaatgttatgagttgttttacttacactctcctggttaattatagattataaaaagtcctaatgcgtaattggtttcatattgctttaaagagacttaattgcttggtttttttcccctaatggataggaaactagcagagttgttcacatcatggattttcaacgagggaaaaacttgagataccagctattacagctggtagaaccatttggagtcatttcaaatcatctgattctaaataaaattaatgaggtatgaattgaaatattggtattattcatttattcatgccactaatatatgttctgcaagaattaaatgattttgtattagaaaaataaaactcaaggtaatcttaagtttatcaaatgcagaatgtagtagaggaaaaggccagtagttgatgaatataatagggtactaatggattattagtaactataaattatgatccttaggtagtaattgtcattatactactataaaagttgtaaaaggaaaattctgtggaaagccatttcagatctataccaaaatgatggtttcaagtcattatttttagtccaattggcatagtaaatgataaagtaatgcagtagaaaattaatctgaggtggcctttgtaataaaatagcaaattggcaacactgttttttggggtttttttgtttctttgttttgggagtcggagtctcgctctgtcacccaggctggagtgcagtggcgcgatctcagctcactgcaaccttcgcctcctgtgttcaagcgattctcctacctcagcctcccaagtagctgggattacagccgcccactatcatgctcagctgatttttgtatttttagtagagatggggtttcaccatgttggccaggctggtctcgaagtcctgacctcaggtgatccacccgccttggcctcccaaagtgctgggattacaggcgtcggccattacacccggccaacatttttgttcgtttgtttttgttttgttttgtgtttgagtgtcactctgtcacctgggctggagtgcagtgaggttcactgcagcctccacctcccaggttcaagccattctcctgcctcagcctcctcccaagtagctgggactacagacgtccaccattacgcccagctaatttttgtatttttagtagagacggggtttcaccatgttggtcggccaggatggtcttgatctttcaacctcgtgatccgcctgcctcggcctcccgaagtgttgggattacaggcatgagatactgggcccagcctcttttgttttgtattttgattcttgaaagtattttctacttaatgattaaatatatctgaaaagatttggggcattgttattttttaggaaaaaaaatctttagttcaatgtgagaaagctgattggaaaaaacagagaaataactttttgtataatttcaggcatttattgaaatggcaaccacagaggatgctcaggccgcagtggattattacacaaccacaccagcgttagtatttggcaagccagtgagagttcatttatcccagaagtataaaagaataaaggtaatgtttatttttttcaagctgtatatcagtttaacaaatgattttaatagttattaactgtggttatttcaaattattgctaaggccaggtgtggtggctcacgcctgtaatcccagcaccttgggaggccaaggtcagaaggattatgtgaggcccaggagttccaggcaagcctgggcaacatagcaagacctcgtctctataaaaataaaacaattggtaaagactaggatgtttttaactgttaactaataattattgcacatttgtccttttgttgttgttatttattaaagaaacctgaaggaaagccagatcagaagtttgatcaaaagcaagagcttggacgtgtgatacatctcagcaatttgccgcattctggctattctgatagtgctgttctcaagcttgctgagccttatgggaaaataaagaattacatattgatgaggatgaaaagtcaggtaatatacataaggaagttttagagaagataatttattaaaatccttaagatttttcaatatggagctgggcgtcattcctcaacctgtaatcccagcagtttgggaggccaaggcaggcaaatcacctgaggtcaggagttcgagaccagcctggccagcatggtgaaatcgtatctctattaaaaatacaaaaattatccaggcgtgatgtgcctgtaatcccagctacttgggaggctgaggcaggagaattgcttaactggcagggggcggaggttgcagtgagctgagattgcaccactgcactccagcctgggcagcagagcgagactcccaactcaaaaaaaaaaatttgcttttttttttttttttttttttttttttaaagtatatccctatttttagtgatgaaatctggaggactagttgtttgcttttcttttcttttttttttttttgagacagggtctcaaaaattaatatttcatacttttttttcttgtatttaaaaaatatagagttagccagtcgcagtggctcacgcctgtaatcccagcactttgggaggcggaggcaggcagatcacgaggtcaggagattgagatcatcctggctaacacagtgaaaccccctctctcctaaaaatacaaaaaaattagctgggcgtggtggcgtgcgcctgttgtcccagctgttggggaggctgaggcaggagaatggcatgaacccgggaggcggagcttgcaatgactcgagattgtgccactgcacccatcctgggtgacagagcaagactccatctcaaaaaaaaaaatttagagttaggctggatgcattggctcatgcctgtaaatccctagacattgggaggctgaggccagagttgcccaggagtttgagaccgccctgacaacatattgaggccacatctgtacaaaaaaaaattttttttaaccaggcaaagtggcatgctcgtacagttttagctacgggagtctgaagtcaggtggaacacttaacccaggagtccaaggtttgtagtgggctatgattgtgccactgtacttcagcataggcagtggagtgagaccctgtctcaaaaaggaaataaggatgaggagaacatcttttttgtttttctttttttgttttaaacacttctgtaattcagcattgcaagtttgtgttcttccagacttttatttttcttacactattttaatatcttaagcttattacttttttttttttttttttttttgagacagagtctcgctctgtcaccccggctgtagtgcagtggtgcaatctcagcttactgcaagttctgcctccccggttcatggcattctcctgcctcagcttccccagtagctgggaccacaggcacccgccaccacgcctggctaatttttttttttttttttttgtatttttactagagacgggtttcaccatccacaggatggtctcgatcccctgaccttgtgatccgcccgtctcggcctcccaaagtgctgggattacaggctgagccaccgcgcccagccagcttattacttttttgcagagtgtatatagatggcttagtatttggcactaaagtgattcttggggattttgtaaatctgacaggttggttttttggtttttggttttttctgagatggagtcttgctctgtcgcccagtctagagtgcagtggtgccatcttggcttgctataaactccgcctcctgggttcaagcagttctcctatgtcagccttccaagtagctggtactacagtaggcacactccaccaggcccagctgatttttgcatttgtagtagagatggggtttcaccatactggtcaggctgttctcggaattcctgacctcaggtgagccacccgccttggcctcccaaagtgttgggattacaggtgtgagccactgcgcccagccctgatattcagtgaatttttaactctgtgctaaagattaaaatttttagccgggtgtggttgctgtcacctgtaatcccagcactttgtgaggccaaagcaggaggattgcctgagtccaggagcccgagaccagtctaggcaacatggcgaaactgcacctctacaaaaaatacaaaaattagccaggcattggtggtgcatgcctgtagacctagctactggggggctaaggtgggaggatcagttgggcccagtacatcaacgcttcagcaagccaggattgcgccactgcattccagcctgggtgacacagtgagaccctgtctcaaaaaagaaaaaaagtaatgaaaattttctaaccagtaggtagaatacataataaggttttatacaattttgtaaaatataatgtgctttgtggtttcttttctttctttttaaggcttttattgagatggagacaagagaagatgcaatggcaatggttgaccattgtttgaaaaaagccctttggtttcaggggagatgtgtgaaggttgacctgtctgagaaatataaaaaactggttctgagggtatgtagtatttgatttgtcatcatttaacagcttgtttttacatatttaaagccacaacattcttttaaacatttttgtatgctaaaaatacaggattattgaaacctattgaaataagttattgaaagagaacaacctttttttctggtctttaatggcagaagtttttaaacgagtcttccctaaaggacaccttcattgctcttatctgtttaagtttttcatagcgttctgctaccagaatgttttattttccacttctctgttggtatggtcatgatgaatgtctgtaggcagcttaggttctcaaataaggttacgggaattgaataagctgagttgattatagggattgtctccaattattaattcactggataattgtgtattctgcaaatgtgttaacttctgcaaaacttttgtcttttagattccaaacagaggcattgatttactgaaaaaagataaatcccggtaatttcattttgtttttcatatgtgtgagtatattcaactttactttttcagacaacaaattaattgtggtgtgtccttttgatttcagaaaaagatcttactctccagatggcaaagaatctccaagtgataagaaatccaaaactgatggttcccagaagactgagagttcaaccgaaggtaaagaacaagaagagaagtccggtgaagatggtgagaaagacacaaaggatgaccagacagagcaggaacctaatatgcttcttgaatctgaagatgagctacttgtagatgaagaagaagcagcagcactgctagaaagtggcagttcagtgggagacgagaccgatcttgctaatttaggtgatgtggcttctgatgggaaaaaggaaccatcagataaagctgtgaaaaaagatggaagtgcttcagcagcagcaaagaaaaagcttaaaaaggtaaagaaagatacattgatttgttttaatagaacatta

SEQ ID NO: 10647 - DNA, 6000 bp, Homo sapiens
caggctagagtgtagtggcgtgctcactgcaacctccacctcctgggttcaagcagttctcctgactcagcctcccaagtagctgagactacaggcgcccgctatcgctcccagctaatttttgtatttttagtagagaagagtttcgccatgttggccaggctggttgtgaactcctgacctagtgagccacctgcctcggcctcccaaagtgctgggattacaggcgtgagccacggcgcccggccatctctgttatttcattgtaatgttttaacgggtaccccctgtaaattagtgtatgaaagggcttttgtctgttgtaaagcactttacaaatgcaaaagtttgttggaaattgtatttgaatgccccacatctgtgtaaccaatcctctctatatgaggatgttgtgtatgtttcagttttattttgaaattttccagaaatggaatcttttaactgattttagggaaaccctttaatctctctaggctgcctttctttatctatgaaatgaaatagtaagttctttttagctctgcgatttaaaagctttaattttaaatgagagagtggttagtgatcttcatgaagtttgataggtggcaatacatttaactgattttgctctttatgtgtagatcatggaagggaagtggttgctgtgtatgttactggtgcttggaactgctattgttgaggctcatgatggacatgatgatgatgtgattgatattgaggatgaccttgacgatgtcattgaagaggtagaagactcaaaaccagataccactgctcctccttcatctcccaaggtttgaaatggtctttgaatctattccttttacgtcttgagatgataaaattatgaagatacccgggtgcagggaaatgtagtctcaactactcaggaggcctaggacaggagtgtgagtccagccttggcaacacagggagatatcatctctaataaaatataaaagaaaaacatggtgaagataaatttggaacgttttcaaagggaaagcaaaattcgtgaaaatacttattgatctctctggcagcctttgtcttgctagaggccaattatatgggttgaatttgaaggccagctatgaaatttttgtgacagttgaaagcaaaccaggagaatagattctagataaaaaggcatgttgctgaaaatttaaatttttaattcatttatgtatttaacacaggttacttacaaagctccagttccaacaggggaagtatattttgctgattcttttgacagaggaactctgtcagggtaagtgttttccagagaaatatatgttagaggcagacatgtaaataagatgggatagtagattcctttttggatagcatcttttatagtgaaatgtctaactttattttattttatttatttattttttgagacagaatttcgctcttttgcctgggctggagtgcaatggcgtgataccggctcattgccacctccgtctcctgggttcaagtgattctcctgcctcagcttcccaagtagctgggattataggcatgcgccaccatgctggctaatttgtgtgtgtgtgttgttatttttttagtagagatggggttttgacatgttggccaggctggtcttgaactcctgacctcaggtggtccacttgccttagcctcccaaattgttggcattacaggcatgagccaccgcacctggcctgaaatttctagctttaatatcttcagtgttaacatccatgcaggaaaatagtcttttggaatttgtggtttttacttccacttctttccctcccccactctaccctatattttgttctttgattgaggaaaaaaattttctcttgatgttaaaacatcagtggaattatctcataggtttggtactttttcatataggtttgtgagttgaagataatgtattatcattagttgtgtgacagatttaaaggttggaagtagagtggttaaataggctaagagcagaataggtcctactttaatgagtatttacataattttccctcacaagtcaactgtcattttaagactgattttgggatttgttatttacaggtggattttatccaaagccaagaaagacgataccgatgatgaaattgccaaatatgatggtgagaatcccatttggtttagatataatagcagatagaggtttgacatgttgtctccatggcatttcctaagactagtttaaaaggacatagtaggctttaagatttttccagccaggtgcggtggctcacgcctgtaatcccagcactttcggaagccaaggcgggcagatcacgaggtcaggagatcgagaccatcctggctaacacagtgaaaccccgtctctactgaaaatacaaaaaattagctgggcgtggcagcgtgcatctgtagtcccagctgctggggaggctgaggcaggagaatggtgtgaacccgggaggccaagcttgcagtgagccgagaacgcgccactgcactccagcctgggtgacagagcgagactccgtctcaaaaaaaaaaaaaaaaaaaagatttttccatggaagttttgccacctttgtgtgttgcctaattttttttttttttttttttttatttaaggttcaggggtgcatgtgtagccttatatttaataggattagatctgtttaatcacctgtgctactgaatgttggaaatttctagacagtagtataatacactacagttttaaaaagccatatctgaataatatttgccaaataaagtgtgtttatttattatttatttacttttttgagacggagtctcattcttgccacccaggcttctggaatagagtggcgtgatcttggctcaccgcaacctctgtttcttgggttcaagcgattctcctgcctcagcctaccgagtagttgggattacaggtgcccatcaccacgcccggctaatttttgtgtttttattagagatggggtttcaccatgttggccaggctggtctcgaactcctgaccttgagtgatccgcctgccctcagcctccctaagtgctgggattataggtgtgagcgaccacggctgccccagtataatatatttatgcaactaggaggtgttttttttggcatttaaaggaccttcagaggtagagttaagcagtggaacttttttgtgttgtcttgtaggaaagtgggaggtagaggaaatgaaggagtcaaagcttccaggtgataaaggacttgtgttgatgtctcgggccaagcatcatgccatctctgctaaactgaacaagcccttcctgtttgacaccaagcctctcattgttcagtaagtgaaatgcttgttggataaaagctttctgcaaagggtaatcttagaagacattatgtaacttttactctatgttaaaaaattatgagattatataagtggtggtagggatttttgggtgaatttaaacaccttgtaattaatagtttttcctggctaatgcattattttgaaagaaactggttacttattttcctgactctaaataacttgtagattttgcagaacaaatttaccggaaatctgcattaatagtttttgtaattaattaattacaaaactagtaattaatagtttttcctgcctaatgcattattttgaaagaaactggttactcattttcctgactctaaataacttgtagattttgcagaacaaatttactggaaatctgcattaatgttcaatttaattttatttatttttgtggcatttgataactattcaaaaacaatagaagatggaatcctttgtaagggtaaacatttgacctatgataaaacgtgactaagatgagggagagaggaaatacattaagagagtttcgatctttcaaaatgccatacagttttctgcttttctctctgatattaggtatgaggttaatttccaaaatggaatagaatgtggtggtgcctatgtgaaactgctttctaaaacaccagaactcaacctggtatgtaattcccatttctggaatgtggctggacacccactattaccttgtaagaattttgtaattgggccgggtgcagtggctcacgcctgtaatcctagctcccagcactttgggaagccaaggcaggcggatcacgaggtcaggagattgagactatctggctaacatggtgaaaccccatctctactaaaaatacaaaaaattagccaggcgtggtggcaggcgcctgtagtcccagccacttgggaggctgaggcaggagaatggcatgaacctgggaggcggaacttgcagtgagccgagattgcgccactgcactccagcctgggcgacagagcgagactccatctcaaaaaaaaaaaaaagagaattttgtaataattgtgaaaataaaggcttcctcccctgctgtttaactcttttgatgagttgggaaaattgactttgacgctaacgtgctttttatttgaagtgtaaattacaaagttgttaccaactgtttttatctgaatttctggttttgcttctgtgtaagttttagttttggcaagcttatttctttgttttatgaggaagcaataactgtctagatgtgtgcattacttttttttagacacttaaacgttattttaaatttactgatgattgctggttattcctttttactaaacaaacttgtagttagcttttcctttaactgtcactaatatatttggaattttataagaggaattatcatacacttttgaaacgttgcttttgaacactttgagtacagtgacttcaaataatccttttttgtttttgaaggatcagttccatgacaagaccccttatacgattatgtttggtccagataaatgtggagaggactataaactgcacttcatcttccgacacaaaaaccccaaaacgggtatctatgaagaaaaacatgctaagaggccagatgcagatctgaagacctattttactgataagaaaacacatctttacacactaagtaagaaaaagcattagtttgggggcttatggtattacatatatatcatccatttaatttaaagattgtatatctggccgggcactgtggctcacgcctgtaatcccagcactttgggaggccgagatgggcagatcacctgagatcaggaattcgagaacagtctggccaaaatgttgaaacttcacctctactaaaaatacaaatattagctaggcatggtggtgcacgcctgtaaccgaagctagttgggaggctgaggcaggagaattgcttgaacctgggagggagccaagatcattgtgccacagcattccagcctgggcgaaagtgagactcaatctcaaaaaaaaaaaaaaaggctgggcgcggtggctcacacctgtaatcccagcactttgggaggccgaggcgggtggatcacaaggtcaggagatcgagaccatcctggctaacatggtgaaaccccgtctctactaaaaatacaaaaatattagccgggcgtggtggtgggcacctgtagtcgcagctacttgggaggctgaggcaggagaatggcacgaacccgggaggcagagcttgcagtgagccgagatcgcgccactgcactccagcctaggagacagagcaagactccatctcaaaaaaaaaaaaaaaagattgtatatctggagagtaccccagcctccaaacaagaagaatctcagcctggtatggttgctcatgcgtgtaatcccagcactttgggaggctgaggcgggcggatcacttgagatcaggcattcgagactagcatggccaacatggtaaaaccccgtctctactaaaaatacaaaaattagctgggcgtggtgttgagtagctggtgtaatcctagctactcgggaggctgaggcagcagaattacgttaacccaggaggcagaggttgcagttgagtcaagattgtatcactgcactccagcctggg

SEQ ID NO: 10648 - DNA, 6000 bp, Homo sapiens
tttggggccattaccttaacctgtatccattccttcatgaattttaacttgtataaggtggcttgttctaaaaacctaagtgggtaaatataagaaatgaatggtaataaagcagttagtatcatacccgtctttatccatgctacattttttatttttctcagtcttatttttctactttcaaaaagataatgtatcatataatagggatcattataaagcaacttttcatactttaaaattgaaaattaccagctagtaagttcagaacaaaattaccagctagtaagttcagaacaaaattaccagctagtaatgcagaataaatgataaaagttttactctcaccattttttacctgttgataaaatgatggatttagagtaggcaatgatcagcagtcactactaaaaccattaagtaaaaggctgatggggaactttatactgagtggatcagactgaatgatcattcacaaatggagagataactagacattatgtgccttatcataatatgcagtaagaagtacacaacattgactactagacgttcccacccagaacattgcacctgaattccatcaagtctctagctccaaatgccagtttacaagaaatacagaggataaaggaataacatgggaatgcaatcaacaaaatccaggacgtgggaaatgccacaggataggggttgatggcaaggaaaaaaggaaaaacaaggaagaaagcctaaagattaatgaacacttacatcagccaaatgattgtgttaaccttacttggattcttacttgaaaaccaactttgaaacaataggggaaatttgaacactatttcctgactttaaggaactgttttagattatttcatgtgttataatactattggggttatgtttttaaaaagtgttatcttttagaaataaagtataaaagtatttgtagctgaagtgataaaatatctgagatttgctttaaaaataatcggggaatgtagatgaagcaagattagccatgtgttaatctttgttgacatggtgggggttcattgtacttttctcaatacttttgaatatatatggaagttttcactgtaaaagttttttaaaaatcacatctcaggccaggcgtggtggcttacgcctgtaatcccagcactttgggaggccgaggcgggcggatcatgaggtcagtagttagagaccagcctgaccaacatggtaaaaccctgtttctactaaaaatacaaaaattagctggatgtggtggagtgcacctgtaatcccagctactcaggaggctgaggcaggagaatcacttgaacctaggaggtggaagttgcagtgagccaagattgcgccattgcactccagcctgggtgacagagcgagactccatctcaaaaaaagtcacatctcaaaagttgtagaatgcatgtaatttaatttctgtgattttctctaatccagtagttcttaacccataccccatggacaggcttgaaggagttcctaaatattctgcatttgggtcaactccttgcctttatgtgtactttccaggtgaagaatccttgggcaatatgccattttgagaatatagagaaagcaaatcctagaagcacatctctctctagctcctcatcacaaattaggaatcattttagcacagttttgcaaatttttcattcctaggggcctgaacaaagcaaggacaacaaaaatatttgactcttctaataggttaatgcagtttgttggcctcataatttcttacattttttaaaagcacttttaatagaatattttaataattattcctttcatacttactttggcagaacttcattaaacattattttctaatttctatattccttaactaaaattaaaacaaacttagatttgtttttaaaactcttaatacaggcttgttgcataaaataataataaaacatatattttaccactaggattaagtttgcagcagtagaaaaatattaaaccatggtatacaaaaaaactagtcatttaacctttctcaaaacagatggtataataaatgtataaaaaggcaagctgttatcagctaaaggctcacaaattgattacacagtgaaactgaaacttgcatcctgttgggaacatacatattggtttagttgactggcatgagggaaaaggctgatttaacaaatagataaatgtaaaaaaacaaagtcattcctattctgatagatccctttcagatttaaaagttactaacgattttgatgttgtggctgttttaaacatagttcaaagaactttgactaattcagcttttttttgtactgtgctttgtttatttttatagatatttgggctttgacttatattctcattggtgagctcactgccattttcttcctaattcttctttaaagaacttgggctggaaattctgtagtcaccaaccttagctgataagtatttctgctattgttagcttagtgttccatctgcccccttactgatgccatggctgtgacatctcagttggggaaaacagctgcttcatgagatctctagccttaacagttgtcccagtgaaaatgagcaggggggtttcattgcaaagacaactggcataaatgtatgaatgaatgccagattagtagcatgttagtcaaaagaggaattgagatcaaattgaaagaaaagctgaatatgatagatgaagtctacagaaagtatcacacatactgactgaaaatatttctctgcagatggaatctgcctgtgtttcaattcacgaagctctgaagtctgtcatcgattatcagactcatttccgtttaagagaagctcaaggccgaagccgagcagaggatctaaatacaagagtggcctattggtcagtaggagaagccctcattcttctggtggttagcatagggcaggtatttcttttgaaaagctttttctcagataaaagaaccaccacaactcgtgttggatcataactacgttttgagaattgatgcaccattgccactgtaatattgctgtcctctaattaattttaggtactgaagaacttaatattggcaacatttttaaatccttactcatacacttgttgggagggatgtacaatgcatattcccaaactgtggaaaggacacctttttttatttgtaaaggtggaaaaactttggaactcattttgggctattcatgttaaatattcaacaccaatgatctactctgttcgcagttgtttatatctactcttcgcacactaaactttggtattttgattccttttaaccatttaagactacttttcttataggtagttgatattttaaaaactttagatttaatgtctacatgtgttagggaggaagaaaattgccttttaattgttaataagaaaaccaaatgtgatgaactgtagcccaagccctattctgcactgttcagttttatggaggaaaaataaatctaccataggaatgttagttaatattgatatatcatggtaaaattgatttctcactagcttagaaaatgtcagacttttgtttttggggtttataatttaaaccagctatgctattttttcataaaggcatttgtagtacacagaaaacagtagtttcagtagtgtaaaagagtttatacaggccttaaatatcagactttgtaacaggtagaaatattacagaataatttaagacactacaatgggggcaaatgaaataggaaaatttttagtgagttacacgtactcattacattttcagtgcttttacaaggaaaaaaggtgatatgtttaattttaaaattttaattggctagctcttgcccttatatgactttaatgtctgtgagtcattcccagcttaaattaacaattgttagtattagtctcacacataagtgccatacattttatcctcatggatgtgatgcactgaaaagttagttgctctccttttttcttttttttgtcgtgcatattttatttctgtagtttctggttagctaccctaaagtgatttaaaaatttagaatgctttgtgtttcctatttggtaatcttcattgacttttctttagttaatgagtattaaatagtgcatattctgtagactatagggtttacattgtgttgcatcttataacttgtatagattgagctgattgaaataagattttgttccaagtattatctgatagaatacaagatgattcaaaattatatagatatttaaagcttttctgctgttttttttttttttaattgcaactgcttttctgccgtgcctctcttccctacccaaaagtgatgagttctgaacaagacaagactgtcatattgtagagactttggtatgtgataccatagaatactgattggatagccatcctagtcacttaccaatactgactagaagttaactcttaattctaagctatcttaaaatgcatatatatacttcttgcatggaagagcaaaacaaattcaagttgtcatgcctgataatttcagatgccaccgtatagcaaagggtgaacatgttttcaaccctttaactttttacggtgtttgaagaccagctactccttaatatttatcaatggattaagaagtttaagattttgcagatttatcaatttgggtttttgtactgaagttgtcttgcggctttgcaagtgtccctttatatttaaatttgaaagttgtaagcactgatgttaatgtgattgatcagcatgggcatatgtaaaatgtccttttctggttgcctctctatgctattgtgttcagatacttacaccataattaaacagtaagttatagacttgctgagtttggcatagatagtgcactcatttaatctgtgcctctcaaaacttcagaatattagcatattaccacaaataatttttggtgaaactattgagatattaaaatttttgaaatcactactgttacctgttatagaaaatagtgttggcttagtctagtctctgtgtaactggttacattttgatggttgtctatactcaactggatatgtgtatgtaaattagaaaatacatacctatccagacataaatgctaagtaacatttttttcttcctccaactacataatttgtagctcatcatttttccttaatcctttcctaacttgttgcagcagtttgaatttcccagatatttatgtttgaacataatggctcagaatacatatttgaacatcatagttgtatatatttttaaagtagaataaataatggaaagcaacttgatatacaagtttatactaaaatttcaactgtgtgaagatacattttaaggcattactttgctaataatctacacattcttttttctattaaataaacaaatggtttgtggttcacagctttcatccaagcttggtgataatcaattttgaaaatacagtggactgaaaagcaaatttattctttcgaagatttcatttaaatctctgtactatgcatttttgtttcagtttgtaaatgtgtaacatttatagttaaataggacaaagcaggccctatgactattgttttcaaaaaattaatatataaataattcagaggggtttttcatttacttttgaaaagaaatttctttaacaggattgcacctatcaatttcttgtagaataaaaaaaaatctttcaacaaactgactttacttgtttctgtcaggatttaaatctttctaaagctccttataaacttaaagcctagagtacagttctgtaatgagagtgattatttatttggtattttattaaaatatctgagggactgtccaagaaagaaggtgaaagagaaataccacgtctgtactgcctaatttgtaaccttctctttgcattccttactgaaagtttgtgtaggtgaaaagcagttaaatcatcagttgctctaaagaggtcttaatttttaagtaaattacctttagtttgtat

SEQ ID NO: 10649 - DNA, 6000 bp, Homo sapiens
gtgagatttaagctaagttgccgaaccttttcaggtctcagttttctcacatccaaagagaggataaaaatagtccttaactcatagatctgttgtggagatgtgtcagaaatgtttggtacataacaagtatccaataaatgctacttaattttaaattatctctcaaatatgtcccttctctccaataggatccatccatccgtccaagtaaatattttttgagtgcctgctcctgcctaccatcatgctagtggcagtctagctcatggcagcaaatctagggccagcactattcctacagcctcccatctggcttctccatcttcagtttctccagagactacatagcctctgggctccacattttaatatcattgttaacattttcctcctcctcacccctccccactcccagtgcccagtcaccagtgcccatcagttctccctctgcagtgacatataagctatactaaataagtacggacaggatgttcaacacaggctcccctcctcctaacacagctacttacggccactgcatgtccagccctcaacatctctgcttggccacccctatgttcagagatcgactaggactccattggctcagcatacagttgtactcacacctaaggtttagtacagcgacatattcaggatatacagctggatcgtaagggaaaaagacactagcagagtctggaggaatctgggtggagactgactgactcccaagaggggtcatcagagtgcattcttaccccagctacaaagaggcagccacatgtgagtgatgtttctttccagggaagttcattagagactcagcacccaaagttttaattggaggctggtcacataggtaccctttgcctagcatgcaccagaatttcacacttccagaaggaaagcagatgttcagcataaaccagattgtttgtacaaacagtccaggcatagcgagccactcttatcagttagggaaagatttacaacagtgcagagaactgtttcccagctaagttcccagacaccagccacaggctgaccttacaagcaggccttttctaaggataacaattccaggcctgctatgttaactcttctttgaacactcttgtttctctcccattcctgtctttaactttctcttcaaatatcttccaggatttttttccctatatctcagaactgactcagtcatgcctctgctcagagaccatcgatggctctcagcctgggctgagcattgacctgggaacccaaaaagtggatttgtggcccagccctatcactaactcactatatgacctcaggctaatgacattccttgcttaaccctcagtgtccccatctctgaaatggacaaggatattggtatcagcgaagggctttgggaatgaaggagggggtactctgtgctttgccaacaggtgtgcagcaatgacaacaagaccttcgactcttcctgccacttctttgccacaaagtgcaccctggagggcaccaagaagggccacaagctccacctggactacatcgggccttgcaaatgtgagtgtccttgggcccttccagactcctgtcttggggagagagctctgagctggcactgatgctgtctctgccacccccatgctgggtgatcttgggcaaatctctctccctttctgagtctcggcatccccatttataaaatgaggtaattgtctatgagttggctcctctcaactctgagttcagggcactttctggggaaggactgagcgattatggaaggtcaacatcagggaagatttctggagtctctcactagcatctgagacaactgcatttcatttctctaatgaggaagaatttcttctctcaggctaagttgaatctttcttgcttcaacactgtaaagcaaaaatgatgtttgacctgggcctacaaaatattttgaaaatatctgattttgaatgctttaaaataagggcatgcctgtcggtttgctttgggccctgttacttggtactgtcatatcttcacccttttactccattacattcctatctgccctccgaagagagaggataagcaccctcttctggaaacctgggagtcagttgtctggggagggatgccagggtgtggtctgatctttggttagtgaccccagctgcaaactcagtggggccaagtgccttgttcagtatcctccctatcatgggagacccccaagaccacacctgctccccctccaaggcaacatccacactgtgggtcttgtgtattctggcacccgatggcaatgaggagagccactcacctacctcaggtgtacagggtgcagaaaagtatgtagggggtgggaaacaaagttctcctcgtgggaccccaggtatgaaattgagaaggtacagagtagaaaaggagggttgggggaagaagcatgggtaggaagtccctgggcagcaagactagagagcctgtcttaaggagtctttatgaagtggctttgctttccctgaggcatgttgcccactcacttcaactcctaaggtttttatcaccagatattctctcccagaccccagctgatgatgaaggtagcctcacagaggggactttccctggttcaatgatgagggaagaacagacccctaagcccccaggtgaccacactgccctggatgctggatgaggctctgacattgtggccttgagcaagtcccttctctccatgctgacctctaataagtccagtacaaagtgtgaacctgggtcaggcgcggtggctcacgcctgtaatcccagcactttgggaggccgagtagggaggatcacttgagctcaggagttcgagaccagtctgggcaacgtggcaaaaccttgtctctggaaaatatacaaaaattagctgggtatggtggcatgtgcctgtagtcccagctactcaggaggctgaggagggaggattggttgagtccaggaggctgaggctgcagtgagccgtgattgtgccactgcactccagcctgggcaacagagtgagaccctgtctaaaaaaaaaaaaaagaagaaaaaaagaaaaaagaaaagaaaaggaaaagaaaagtgtggacttggatgaaatcttcaggtccaacatttgggattctaagttccaaagaccaggttggaatcatttctaagaaggttctggtggttacacattcctgagtcctctactccccactccctgccaagctgggcctgtggatagatgtgatccctcagcctcccagcttcaaacacctgccagtggttgacgtgaacaacatgggctcagtctcagctaggatcacacccaaagcccagcacccagtaaggtgcaggagccatccatttccctgagcagagcagattaggctgaggaaagcagcagccatgcctttgcacaatgcatttctagggcattcttcccacacataatctcctctgctcattgtcctgtgaagaaactgtggcctggagaggttgagccactgtgccaaggccaccaatgcaggtggtatgtgggtgggtgggggcctggggtggggagcacggcccaggcagggtctgtgctgaccgcccttgtgtttggaacctagacatccccccttgcctggactctgagctgaccgaattccccctgcgcatgcgggactggctcaagaacgtcctggtcaccctgtatgagagggatgaggacaacaaccttctgactgagaagcagaagctgcgggtaagtggtctctctggccttgctggccccgtgctggtgaagatccagtcccattcctagaactgggcccccagctgcagggcggcatcctgctccggagcgtgcatttacccctgagcaccaggacacgtacttctcttcctgcctttggaggctgtggtgcacattaacatcttagaggctctgagaagtcctgcagcagagacctgctccctttgcttaacctaacgttaaacaaaagagacacaaacagccctattcctttttcctttggagtctgtggatcttaagctttaatgagcatattaactaccccaagaagctgataaaatgcagattccttggccccatctcaggccactgaaacagtgtctctagaaagcaaggcccaggaagctgcattctaaatactccccaggtgatttatgtttattttatttttttgaggcaaagtctcactctgttgccaggctggagtgcagtggtgcgatctcggttcactgcaacctccacctcctgggttcaagtgattcccctgcctcagcctcctgagtagctgggactgcaggcatgctaccacacctggctaatttttgtatttttagtagagatggagtttcactgtgttggccaggctggtctcaaaactcctggcctcaggtgatctgcctgcctcagcctcccaaagcgctgggattacaggtgtgagtgtgtgcccggccttcgccaggtgattttgatgtgggtagctatatggagaattctttgaggtcatcccaggcttctatttttgtgaatgagatgctagtacccatctatgacacctccctcccctcgctgtgagctttggtctggctagtctctgcctgctctggccttctgggaggggtgggagggcccgactggtccagacaatctccatggacctcttgtcacacacagtctctactccctcaggtgaagaagatccatgagaatgagaagcgcctggaggcaggagaccaccccgtggagctgctggcccgggacttcgagaagaactataacatgtacatcttccctgtacactggcagttcggccagctggaccagcaccccattgacgggtaagaccccagaccctagagtgaacagagctcaaggctggcaggtgcactagctatggccagaaagcctctcagcagcctatactgctccaagccctggcatccacagtttgcctggggattggagcagaaggatgaggcatctggagaaaagatgtggacctgggacaaagaaaccgataagacactctcatgctgaggtgaaagtcagtaggagctcaaaatagctccataatcctgcaagtactaggcgtggatatctggataatgaaggagtgtgaattaagaaggagtaccaggctccaaggggtggcaggggacaaggttgggtcagccacacgccccctgtccttcagcagaacatccaggggcagagcagccacctggcactgtctaagccccctcctaaggctcagccccaatagggcccaactgaccctggaagttatccaaaaaagcctgtctattttgcaagcccccagtttgagggctcttgtcccttgtccaaacgagttatgaggccctgtgcaactgcactgccgaacaggcaggcagctggccagttagcaaatgcttatggagtgtgcattttgtgccctgcactattctaggcaggggattgaacagcagtcagagctggcatggtccttgccctcatggacttatactctgttcataacctgtcactaccttctgaacttctcttgtggtgatgaagtgagagcccctgctcagcctcagatggagcaagctacacctgcaccttcccagagtggttttttcttcgtccttgggttgtggaagcagagcatcacacagaggggaaaggaagggctgccctactcacatactcagggaacttcctctctaggatgttcacccctcgctctttgtccagcctgtgtgcctggagtctgccaaccctgccagtgatcctgagggctggggtctcctgggctctgggaatctcccggccacttctctcccaggcttttgccatggctgggatccaactgagtcactcattatggcagggaggggaaaagtcaaaggggaacatctggagctcaggcaaagcaatttgatcccactgcaacagagggcctggagggaggctttcagatggggtgcaagaacagc

SEQ ID NO: 10650 - DNA, 6000 bp, Homo sapiens
agtggggggggaggggcctggacacaccccttcccccccagactcctccccgtcagggtcagctcagccatggactttggacctggataagaagagagaagctgcactttggtggatctgatttgggattctcagttttgaaaatggagtgctgaatggggatttgatgatctcctggagagcaactgagacaagagaagaaaggtaaggctcctgtctcatttcccacttaatgtcttgctgtgcctgtgcagaaggtgttgagctggcgagttcgcggaggctactattcaggaaatcttatccagatgagtacactggaagctacacctctccattactctgtccaggtatagacttgttcccaacttccccttacccaagctggatgagtgccttgtaagggattgtgagcaatggcagttgtgaggttaggccaaggagaacatgataataattgaagacttctgaagggaggttggattagattacctttaaaggcccttccaacactgagataataggattccaagtcagtctgggttaagactggaatggattacctaggcagaggcagctgctctgttttggggagctaactgaaaaggactgctggtggggggagaaggcgggaatggtctagataacctcctaagttgtctcccttcctacttctataaggggagcttagcccatgaaagctcgggaaaagagcagaggaacagaacacaggtttgggggtcaggaaggagtacttgtgttctagctttgactttttgagtcagtgtacaaccctacacaggccatgttctcttcacctacaaaatgggggaaaactgactttccaggtcccttacaagttgttacgaggagcaaatgaaacaaggattttgaaaagtatccagggccgtgtacacaggaaacaataacatcgatgttgctctacgtgccttaaaagcacagaaacaactctgagtcaggagttctgttttcttcttgaaatagtgtgctggcaacagcctaagaagatgtccttagtgaaaagcctgcccctgaatgtgtttcatcatcttgttggtaaacagtacttgggatcatcaagttgtagaacaggtgaatagatccaaggagaacttggattgaaggagtcttgcagatactgcattggcccttatggctctccagtccaatttcagtgtgcccctttgaggtagctgattaaagagggggtggaaggatgcttaagccttgagggcaggtgtctggctaggcacttttcttggagtgagtggtggtctttaccttcctgtgccatatgctagttatctctcccgctccttaagatgacgtttttttccagacatctcttcgccctttgtattttctcaggctgtattccctataaaagcagccctgtttgtctttatcttctcacttcctgtctgctccctccttcaattccaatttacctgtgccaagatgcctgcttttcccagggacaacacacagcagaaaggaggggtagagcacagtgttgggaattttgagagacagtagggtatggtggcctgggcaaagggcaggaggcctggcttctggcatgtctctgcctctccctagctcagtaacacctaggcctcacatgttccttgaggatgggtgacagtgaggtcatctgcaaactgaaaatcctgtacttatgccttactttccatgttaaatttttttcttccatccccttccccagtctttccttttttgccacaggagttttcctcactccctccagcggcttgagaggtgggcagtggcctgggtggagctgctgctcccgagctgtactttctcctctggtctggtgcctggggcagcccctttgaggccaggctgctcctttataaggtgtgggtctcaagatgggtgtaccaccttccccagcttcacccagcaaatttctgttgccagtctttgcttagacacaggggtcacagtgatccctcggggatacgtgatgccacggtgcctcctcagccatctctggtatcccaggtaccagggagttgcgtatttgcgtaatgcttctatcacgtgatccagtcaatctgttttgtctgttttccctcaccactttgttgtgaggagaacagagcagggattcttttcccagtttgaggggaagctacggaagccctgagtgggaagggtttgcctaagggtagagcggtaggcactgaaatcacctcccagtgctgtgctgtttccacagcatctgacctgaccaggccatctgggttctgctgcaaacctccagggagagaagctctgtgccctgccagacagcctctctggtagaacgtttcctccttagagtgagcaagcattcctctccctgaccttcccaccctcctgccctgcacctgacccttccatgagacagtcccttcaagacaaccattggctttttcacatgggcaccaggatgccaaggcatagcactcagcaggtgtcaggctacttagccaggagcagtgatagacttaaccagactgtgtgtgcattttttttttgagacagagtcttgctctgtcgccaggctggagtgcagtggtgcgatctcggctcactgaaacctccacctcctgggttcaagctattcccctgcctcagcctcccaagtagctgggactacaggcacacgccaccacgcccggctaattttttgtattttagtagagatgaggtttcaccatgttggccaggatggtctcaatctcctgaccttgtgatctgtctgccttagcttcccaaagtgctgggattataggcatgagccacggtgcccggccgtgtgtgtattttaactcaattaattatttatatccttctttattccaaaaagaattgtaggtggctaaccaaaagttacatttcacagacattgtttagtgattattatgttaatctttcctctttgacctggatgagatgaatttctgggtctccattgtggggtgagggagaggggcaagcagagatattaggaggcagggagaagggaaacaaaacactgatttaaaaaatttgcttttactttttttttttgagatggaatctcactctgtcacccaggctggagtgcagtggcatggtctctgctcactgcaacctccgcttcccaggttcaagcaattctcctgcctcagcctcccgagtagctgggactacaggtgcatgccaccacacttggctaatttttgtatttttagtagagacgatgtttcactatgttggccaggctggtctcaaactcctgacctcgtgatccgcctgcgttggtctcctaaagtgctgggattacaggcgtgagccactgcgcccagcctgcttttacttttactgatgttttcaagccaacatatgttttaatttaagggcatgaattctttccaaattgtaaaaagtgtcagggatcttgggcatggtttatgggagggcagtttcctggaacagttttcacttccttttcatcttttcagttctcttttgtcagtggtggagtgggcaggggagagtattgttcctctgcctaatcttgtgactgtttatcctcctggataatctggtctaatcttgtgactgtttatcctcctgttttttccttttgcacataatccaatcccaggcccacccccagaatcctggccccttgtttctatccttcttactccagtcactgctccccatgtaacctctatcaagagctcagagcctcttttccccaggtcagtttggcactcatttaccctggtttcttgcctctcagaccaagtgcttgcttttgcctccatgaagcccattctgattccctaaccaggccctttctttttgggatggtctcttgcagtccgggaatttctccttttggatcttcctgtgagccttgggatttcagccaagggtggtagagatggggtgtgcgttacagtgcacgaacagccgccatcctgtttccccttcacctgccttagatggagaagtatcagggtcagtggtgggaatctgatcttcccccacctttcagcaccccctgatgtctgtcctttctcctggaaggtgattttggctcctcatgtcttggatctacaaaccagtgtttcccagccttttcacttttaggaaacacaattgttttttcctttacgccttgacacctagtgtgagtgtgcagagcccccaggcccctgactcctccattaggcaaacatagggcagaggtgacagacactggcctctgactggcatatccgcctgggttcgaggctcctgccacagtgcgcgcagtcagctaaagtggaagccacgggcttcccgcacatcgcacactgcacacggcggcctcggtgggcctgcccttctcccactccacctccaggtctgggctctggccacttaagcggaggcttcacggcagcgcctgagaggagacagagccctctcaaagcactggcgctggaggatgtgtgcgggggtgttggggggcgcacaggagtgcccggtctaaaacctggctatgctccccaccaggtctggtggcttgcagcacgtttgcacttaccctgagcctcaaactagttatctgtagaatggggatgataacgctcactccgcagagctgctgaggcttgaaggacaggccgagggagggtttggcccgtgaggcccctcaccatgcctggtgaccccttagcagttttgatttaggtcctcgcctccacgcaggggcctgcgggtgcgcgcggccctttgtttctctagaaccctgcacgattcgtggtttcatgtagaaacaagttagtgagcagtcagtcagtaaccacaggccgcagagttccgggctgctccgtgctctggaacacgggggaggggttgatgtcaggggcgtgggtcctgatcacatggcagcagcccttcttggggaagtcagctacccagcagcctgtagtcctcggctacccaccctcaccgcctggggtcccatggtgagacagctgggtgggcatcaggcttctgcagagggccaggccggagggagctgggcgagggagtggggctggctcctggcttgcaccggcctcgtggaatccaggcctcagacctgatcgctggcgaaactggctctgtgcgctggagcccctggtcttctgcgtctgtcctcctcccggccagactttactcctggctcagcgacaggtatttgctatggaagagctgtccctccctcccctcggtgggcctgggtccacctccacctcctcttcaggtccgcaccttcctcccctttaaaacaccagccgggcgcagacccgttctaggcttttccatggtgcttccgccaaagcttgtgaccgagtccttcccgcctagggctggtgggcctcccctgctggtaggtctctcttcgctttctttactcagaactgaagctctcattccccacccaccaaggaaaaacaaaagggaagaagccacagctggccccggcttgctttggcacaggtgtttccccccggccccccgtcgggcaccctggttcctgttctgtccctgccccacgcgaccctggggctcccacccgggctcctcagcctcccctgggttggggtggggggactggctcccagcccttggcctagggtttggtgaacgcctttcctggactgcgggcccacttcaggcgcggctccaggctgggcagctgcgctggagggccgagggcaggggtggggtcgggcgtccaccctcagggttgcgccagggagccggaaagccgactcccgaagttggggtcctgggaaaacttgggtcctgggttgactgagaagcggcggggaaaggaggcgggccaggaggagggggcctggcggacgccggccggggggcggggcgcggcggggctgtcggtcacgcccctcagtccgccccgccccgccccgcctgccg

SEQ ID NO: 10651 - DNA, 6000 bp, Homo sapiens
agcttctatcgtagtaccattcagcttccacgatttactgagggccttttgtgtgtaaagcactatagcaggtctaagggaaatgagactgcacctgaccttatagccttataaggagagagggggaaatttacatacataaacacatatacaaataagtatatcactggtatataatatcaggactaaggaaatgggatttagctattggtaagcaaccactgggttcatatggagtccctgtcaacttattttgtctctttcctaggatcagtttatgtttgtacattctagcatctgcagggttttgacatgtcatttccagttaaggactcgctatgagttgctcatgttacctaatatttaagtagcaaggggattccattattagttgctttacaaatgattcacctagacattcagacacaaacctaggcttacttgttttcttttctcatcaaagcagctggaaaagaaatgaaaagcagcaacagcaagggggagtttaaggattttatgcagacagataagaaaatatagccagctcaaggggtaataaaatattataaaataaatagcaattgtttggcatttgtagagatccaagtgacactactaagtggcattcatatcacactcatatactaaagaaggttcctgtccccctagttttatgtctttgctatatatataattattggtaagttctgtttgccctggaataaagacgttgggaaagatcatgttgttaatagtagctatcacttacagagcagaaacaatgggctatacagaaattattacatttaatccttatgccaaccatgtaataactgctattatccccattttacatatgaggaaattgaggatcagaattcctactaagatagtacattttagagtcaagctttaaaccaaaatctatttggtaccaaagcctgcactcttaaccactattgctatactgctgaggagagactgataccaccaattcattcactataaattctcccaagaactgcaggttgggaatggttatagtttactctgaaacctctagaattttaaaatagtctcaactcatttctgtttaaatagatctcaccaaaaaattctaggtggtactggttggcctggtgaaaacagcttagccatactgacctcatcttagccggtcaatgatggatgaataatgctgtcatataggccatttcctctctcctgtgtgcacaccactgagtccaattggtcagaaaccttccgactttgtggaagtggtttgtggtcaaacccagcagttcaaacagtaaattttattgaaatgtcttgccttgacagtccagttttaatagttaacccaaactcaaatgaagttgtctcttcttccttgaacccatatggctctcattaaacctttaagattatgttcttattacaaagggaatgtaaatcatgctggatctctagatcttatgttttatcaatatcttgaaacttaattcaaaccaccctttataaaagagaagggaaaacacaatttcagacttaatagccttgtagttacatgttaatttttaatccccaaatttgagttgcctttgataacacttatccctactatgaatggtcatataactaattattattaaaaaggtttcagaaccagtgttctaaggaagttgtaaggataagataatttcagatgataaaaaaaaactgatgaaaaggattaaactttctaataaagttactagagataaaacaggtatagcaatatctcaccaaagcatagctctcacccccaagcccacccccccaaataaaagatgataatggccaatcactttcaataaaacttttaaaaaataaaaaaacctctttagtgcagttagctttttaggccttatggtaagcaacacattgtaaggaaacacattaaaaaaaaaaagaatgatctcattggtgatatatgcacttttcatgtcccgtaaccagttacttcctagtatgccatttgccttcagccttcagttctgtctgtgatgaactgggatacaattgctgtattaagaatgtccttcccttcctgtccaagttattccaattccaagtggtctctagacttctcttctgttagggggagacagatttgtacatacatgtatatgtgcactcacacaggaatgtagctaacctccatttctaaacgcattgctttaaagaagaagaaaaactgtcatacatcagcttttagaaaatttgtttatttccaaatatctatagagatgctacaagggcttgcactcttataagattttaaggcatgttcattctacccagaatacacctggcattttatatgacaaaagaatggtcattctaggtgcctcctgttttccagaaacctagtgttctggctaatcttagagcttcttcactcttcattcatcatagatgctccaaattactgggatttttaataaaagaatttaggataaagagtgaaagtggcagaatttggattattcttcaggctttcagtggaattcttagactcttaagttataactattgttttaggcattttaccccacatacaaatgctcttgtgaagagtagcaatattgtttattttctttagaatggaacattttaaatttttagcctcctttttaaaaatgtagagcatcttttaaatcttaaatatatttcagccagttccaaaagttggactgtttaagtatttttagtagataacactcaaaatatcagaagtgatgtgaaaatcaagaatttctaaagtgctgtgtatgtattatatcttagtaagttcattgcctcattctcattactttctgtgaatgctaaactgattcttttagtctttcacctgtatcatccacagttccttccatttaatgttgcccaattctggttctgccttatccatgaaactagatatgacctagtatacccattgtatattaggtgcatataaacttactaaatgacaggcagtaactactctggtaatacccaccttcaaacaagaacaaatccttcttccaaaagaaacaagttcttaaatgccaacctacatctttggcctgtgttttttactcccatgatctatttattgcaattttcttatttaaatatagaataagcttaaatatagagcaattttgtatatctttcctatagcaaccaaaaaaaaaaaaaagacaaatgagtggtcagaaagaatagaaatcacatctgtattcccctcagaaactagacatagaaaagttatatttgaaccatttctaggtctatgaaccactcctttccttccctccctttcaagtttcaagagtcacttgagtggacaaaagaaaacaaaggatggtctccctttagccatagtacagggaaggaaaggaggactatgaggtcatctacaaaatggtgatgataataatagtgcctactcatgagcttggtgtgatgattaaaggaaacgatgcctgacaatggtgtaagtactcaatagatatcactgagactgtcaaagaggctggctcagaacgttgaagcaaagagttggaacctaccatctgtttgtattataaattatgttgacagcatcttaaatgatttgggaaacatttatttggaggagtatccagtaaactactaagctgaatctatacctactaaacattaaccaaagattttcctgattgtgttatccctaccattttgtcaaaatcttcttgaggctttacaatgcattctgtatcgtagggcagaagggcattccaagaagtcgaaatttcagaaatgtatgacctgtgagtcttcctgcaaatgtggttgtaacttttagtctgggcaaattcttactagtctttgtacactagagtttctatacaaatacacatatgtgcttcttgtagggcaaggatgtctcaaggctcaacctcattttcatatcattagttattaagatcactgcagcagcttatatagtttcattgcatcaatttcccaaacagtactttaggcttgatacctacccagtacctgccaatgttacagaatagttttagttattataatagttgttcttttcatcagtaacaaaaggatatacagttcatctgtctgtactcacattttgctgaaaacaatataaaagagcctgaaaagcacatagttccttttttcttttgtaatcctagcattaatgtgtgcagctgtccatgtgaaataccaaaaattaattgaacatgaaaaatatttttaaactaaagatacaaggaaacaaacacttattatatacattttttatgacagacatttacacccaacagttttatgaaggaggtcctattattacagttttatagatgaagttactgtggcccagataatttaagtaacttgcccaaagttatacggctagtatataggagaattgggatttgtacccaggtttgtttgattccagtatgcacaccagttctttcccctacacagtactgtcttattaattttacctttggaaaaatacaaaaggatatatattctgtggaattatagctaaagagcatattaaaagtagaacaaaagaaaactaatttgaaggtgaaaaaccattcagtggaaataactaatcacaatgcctgctgccagtttggtagattcaggtattaaaacatgaaacccctgtacactggagtcaacaagttctttgtgaacagttattgatttgactgggtaggggtgggtaagggggttttgaaatctttgagtcagttgaatattgtgaactcttctttccctgaagaagccgaggcagttgttgaaaccaaaatggagaacaaacccacctcctcagaattgcagaagatgcaagagaaacagaaactgatcaaagagccaggctcgggagtgcctgttgttctcattacaacccttctggttattccggtggttgtcctgctggccattgccatatttattcggtggaaaaaatcaagggcctttggaggcaagtaaaatgagccccgtgaacttggaacctgcctttgaaagagtgtttggcctaattatcctcaggagtttgattgggatttttttcactgtatttgtttttttgtttttaatgctctctaccatttttgacattattgtctatgttccaaatattgcccctagttaatatcacagtacaaaatagtatctggagactctgaaatttggatagttagattaaaatataacctttaatactatcttttagcaattggcttaagtccaattaatgagtccatacgaaattgtaggtagtagagtcagtataaattagctgaaggatcagaggaggagatacctgctgttaggaagaggcccagtcctcaaagtacctgggtcagtttttcaggttgtgtttttctcccattaggctcctagctacatgaccatgggcaagttacttaatctctccagaccagttttctcataaaaaagtggggataaaatagttaccttacaaggttgtacaaagatgaaataatgtacataagcatttatcaggatacctggaacctaggaagtactcaataccaccaatggttatgatgaataatcattggtaataaagtaacaaaaggcataagaagttataaaaaacacttgtcttaaaccttagttttcaagaaaaattaattctataacaaaccatttgatagtttttgaatagtcataatttagctcatcagccttccataactgaacaaggcagagtccaataccagagttagtattttatgaaatcattatcacaatataggatccaagagctgagtttattttaggacatctaaataaataaacaacccaattcatgtttcttaccgctcagtagcagtcccttggctgggtccccaggtcctagagcaagtctatagctgtgtgtgggaagaaatccatggatcagggagaggggga

SEQ ID NO: 10652 - DNA, 6000 bp, Homo sapiens
tttgggttcaagagattctgctgcctcagccttccaagtagctgggactacaggcgtgtgccaccacgcccggctaaattttgtattttttgtagagatggggtttcgccatgttggctaggctggtttcaaactcctggtctcaaatgatccatccatctcagcctcccaaagtgttgggattataggcatgagccaccatgctcggcctaaaagattctattttaactaattgttcacatttatagtatatagtttctagaaaagtagatataaacatggatgttttattcagagtgctataaagtagcatacaatgaatacttcagtttggtccacagtaaaaattaataagccttgctgatctcaaggttagttactactcttgatctttattaactctatatcttttccctgtcaaatatcttaagtatgttgacaagttaatccagtttttccaagaatgtgcatagcgtatttgagggcaggatcaagcctcaaggattcagagaaatggttttaaattaaatcaatgtgatttagtgaatgggcaggtgtttgtacagcctatgatactgcatagacattaatatcctagagtttgaatggttcagatgaaaatatttcagctttatttttgttaattctactaatttactttgctgcaggagtggagtcaacatatcaatggagcaagtcacagtcgtcgatgccagcttcttcttgaaatgtaggagtttgaaatacctttaaaacatccttatcgtgaatcagaatcagccattattggtttttgggagttcatcatttacttgtaatatccacaatgttaatatcacatagtggtactgtatggacaatactatttacaagtaaaatgtttagatctggaaatttcatattgaatattagatgcagtaataatattttgttatttaacatttctaggatacatatatattggtcattatacaaattggtgatttttactagacatagtgaaagatagtatttgatatgtagagtggattaaacagtagcatttttaataatacatgctctaaaaatgtaaaagatacggaaaagagggtaggttattaaaagattctaattcattgtccagcaaaatccttggtgatgaattttttttttttttttgcttttgagatctttggttttgagttcaggctgctaccatgaaatggaattcctaaagaaactccctgcttaagcagcacacagtgcccattgttcactggagttggaattttcacatatgcctaactctgttggggctattctttctttctaatgtcacaactcaactgtgctcttggtattaatattggagaaggaaaatctgtgctctgttcttgtttctatgtaacccacatttctaattctttgtgcggcacttcctccttacaatttaacaaatagaggaaaaacttaatttcaacattatctgcatttgcaagcaatacaaaacaagtttattctcgtggattattttgaagttctgaaatttttcttttgaaatatctattggaaatgctttaaaactatgtttctaacacttagactctcagataactttactaataaatgatctctattttagaggccaaacaaggctgttttgtgaaaaggacagttttattttaaagttaattttctggtctttttaaagctacccagaatggaatcctgacaatgatacaggacacacaatgtaagttaaattttttaagctaccatttgtaaaggagatcaatgtaaggaattcaggtttcactttcaacatttcataaacaaagtattttcagaatttctttactgaaaatgagactttgataaaattcactttggttaacaatttttagaatatatattatgtagtaatttgtattcttttattgttaatgtagactttgacctagttacttcacagatactctgaaagattgaagtggttgtggtcatatattggggtgctttaacatttaatcttaattctttccaatggacctctttattatgatttatattttatgtcttcactttactaggggtgatccattcatgttgcagcagtctacaaatccagcaccaggaattctgggacctccacctccctcatttcatcttgggggaccagcagttggaccaagaggaaatctgggtaattatataaaattcatgttacttttccctacagagccgttactgaaaatttttctttttatttatttatttgagatggggttttgctcttatcgcccaggctggagtgcaatggcacgatctcgactcactgcaacctctgcctcctgggtgcaagcagttctcctgcttcagcctaccgagtagctgggattacaggtgcccaccaccacgcccagctaattttcgtatttttagtagagacggggtttcaccgcgttggccagactagtctcgaactcttggcctcaggtggactacccgcctcagcctccaaagtgctaggattgcaggtgcgagccactgtgccaggccgcaaattttacttatttattttagacagattctcactccgtcactcaggctagagtgtaacggtgcaatctctgctcactgcaacccctgcctcccgggttaaagctattctcatgcttcagcctctcctgagtaactgggattacaagtatgtgccaccacacccagctaatttttatatttttggtagaggcaggggtttcgcggtgttgcccaggctggtctcaaacacctggcctcaaatgatctgctcagcctcccaaagtgctgggattacaggtttgagtcaccacacccggccccattctgaaaattaaaggcaatgattataggtgaaagaaggctcattcaaatattacacagaaaaaacattgcatgaaaagtgatggtaatcatatatttgtaagagcttttcatttgtgtttggaagatgcacgtttttcagtaaaattgcttctttaagcaagtatagtgattacaagactgaaaactttctcttcccataaaggtgctggaaatggaaacctgcaaggacctagacacatgcagaaaggcagagtggtcagtaatgaagcttttggttttactgtatttatgatttttgggaatatgatttgacctaaatccttactagttgagtatgtatcgtggtccttatgggaacattgctgtaatttgaaaacaatcacgtttttctatggctttgataacagttaaaactttaaattttgtatgcccatagtccagtgaggtcaccttaattcagcatcttggaagctttgctgtccagttacgcgtacaatatttaatttaaaaatcactacagagagtatgttttgacactttgaagtagtttaaccgtttggttatggtcagaaagaacttacccagtgacgtttgatatgtagctttaaaattctctagaatgttatgagttgttttacttacactctcctggttaattatagattataaaaagtcctaatgcgtaattggtttcatattgctttaaagagacttaattgcttggtttttttcccctaatggataggaaactagcagagttgttcacatcatggattttcaacgagggaaaaacttgagataccagctattacagctggtagaaccatttggagtcatttcaaatcatctgattctaaataaaattaatgaggtatgaattgaaatattggtattattcatttattcatgccactaatatatgttctgcaagaattaaatgattttgtattagaaaaataaaactcaaggtaatcttaagtttatcaaatgcagaatgtagtagaggaaaaggccagtagttgatgaatataatagggtactaatggattattagtaactataaattatgatccttaggtagtaattgtcattatactactataaaagttgtaaaaggaaaattctgtggaaagccatttcagatctataccaaaatgatggtttcaagtcattatttttagtccaattggcatagtaaatgataaagtaatgcagtagaaaattaatctgaggtggcctttgtaataaaatagcaaattggcaacactgttttttggggtttttttgtttctttgttttgggagtcggagtctcgctctgtcacccaggctggagtgcagtggcgcgatctcagctcactgcaaccttcgcctcctgtgttcaagcgattctcctacctcagcctcccaagtagctgggattacagccgcccactatcatgctcagctgatttttgtatttttagtagagatggggtttcaccatgttggccaggctggtctcgaagtcctgacctcaggtgatccacccgccttggcctcccaaagtgctgggattacaggcgtcggccattacacccggccaacatttttgttcgtttgtttttgttttgttttgtgtttgagtgtcactctgtcacctgggctggagtgcagtgaggttcactgcagcctccacctcccaggttcaagccattctcctgcctcagcctcctcccaagtagctgggactacagacgtccaccattacgcccagctaatttttgtatttttagtagagacggggtttcaccatgttggtcggccaggatggtcttgatctttcaacctcgtgatccgcctgcctcggcctcccgaagtgttgggattacaggcatgagatactgggcccagcctcttttgttttgtattttgattcttgaaagtattttctacttaatgattaaatatatctgaaaagatttggggcattgttattttttaggaaaaaaaatctttagttcaatgtgagaaagctgattggaaaaaacagagaaataactttttgtataatttcaggcatttattgaaatggcaaccacagaggatgctcaggccgcagtggattattacacaaccacaccagcgttagtatttggcaagccagtgagagttcatttatcccagaagtataaaagaataaaggtaatgtttatttttttcaagctgtatatcagtttaacaaatgattttaatagttattaactgtggttatttcaaattattgctaaggccaggtgtggtggctcacgcctgtaatcccagcaccttgggaggccaaggtcagaaggattatgtgaggcccaggagttccaggcaagcctgggcaacatagcaagacctcgtctctataaaaataaaacaattggtaaagactaggatgtttttaactgttaactaataattattgcacatttgtccttttgttgttgttatttattaaagaaacctgaaggaaagccagatcagaagtttgatcaaaagcaagagcttggacgtgtgatacatctcagcaatttgccgcattctggctattctgatagtgctgttctcaagcttgctgagccttatgggaaaataaagaattacatattgatgaggatgaaaagtcaggtaatatacataaggaagttttagagaagataatttattaaaatccttaagatttttcaatatggagctgggcgtcattcctcaacctgtaatcccagcagtttgggaggccaaggcaggcaaatcacctgaggtcaggagttcgagaccagcctggccagcatggtgaaatcgtatctctattaaaaatacaaaaattatccaggcgtgatgtgcctgtaatcccagctacttgggaggctgaggcaggagaattgcttaactggcagggggcggaggttgcagtgagctgagattgcaccactgcactccagcctgggcagcagagcgagactcccaactcaaaaaaaaaaatttgcttttttttttttttttttttttttttttaaagtatatccctatttttagtgatgaaatctggaggactagttgtttgcttttcttttcttttttttttttttgagacagggtctcaaaaattaatatttcatacttttttttcttg

SEQ ID NO: 10653 - DNA, 6000 bp, Homo sapiens
gcctcagcctcccaaagtgctgggattgcaggcgtgagccaccacacctggcctcttttctttagacatgatctctgtgttgcccaggtgggagtacagtggtacggtcacggctcactgcagcttccactttctggggtcaagcgatcctctcccgccttagcttctcaagtagctgggactgcaggtatgcacgcctggctaatttttatgggttttttgtttgtttgttgagacagagtctcgttttgtcacccaggctggagtgcagtggcacgatctcgtctcattgcaacctctgcctcccgggttcaaacgattctcgtgcctcagcatcccaagtagctgggactacaagcgtgcaccactgcactcgtgcctcaccctccaagtagctgggactacaagcgcgcactactacaaaaaattcttgtatttttagtagagatgggatttcaccatgttggccaggatggtctcaaaattctgatgtcaagtgatctaccagcctcagcctcccaaagtgctgggattacaggcgtgtgccaccgtgcctggctgtgcatgttttttctttttttttgagacggagcttcgctcttgtcgcccaggctggagtgtagtggcgtgatcttggctcaccacaacctctgcctcccggtttcaagtgattctcctgcctcagcctcctgagtagctgggattacaggcatgtgccaccacgcccagctaattttgtatttttagtagagatggggtttctccatgttggtcaggctggtctcaaactcccgacctcaggtgatctgcccaccttggcctcccaaagtgctaggattacaggcatgagccactacacctggcttaatttttgtattttttggtagagacagggtgtcgtcatattggtcaggccggtcttgaactcctgtcctcaggtgatccacccgccttggcctcccaaagtgctgggattacaggtgtgagccaccgcacctggccttgtgtatttttttttttttactagagactgggtttcaccttgttgcccaggctggtgtggcctcaagtgatcctcctgccttggcctcccaaagtgctgagattacaggcatgagccactctgtctagctatagatatatattttcatttctcttgggtatatatacctaaaagtggaattgctgggtcatgtggtaactaactttttgagaaactgccaaactgttttccaaatgagcagtaccattttactttcccaccagcagtgtatgagggtttcagtttctctgcgttctttccagcatttgtttttatgagtcttttttattagagccaacttggtactaagtggtatcgttttgatttgccatttccctgatggctaatgatgttaagcatcttttcgtgtgcttattgtatgttcatattgtatatttttacattcgtatgtcttctttggagaaatgtctattaaaatcatttgcccatttttaaattgggttgtctttatattattgagttgtaaagagttattttactaggcccttagcagatatatgatttacaagtattttctaagaggaattattttaaattttgagattaaaaacaaatttttttagaatactctgttctgatccacaaagtggtactatactgtgaccagtgttgtcataactggctttttcttttgtatttaagggatgaagatgcccctgctaagattccagatgaagaggccacaaaacccgaaggctggttagatgatgagcctgagtacgtacctgatccagacgcagagaaacctgaggattggtaagaacttcagttaactttttttaattacctggtttttttgtttgtttttttttttgagatggagtctcactctgtctcccaggctggagttcagtggcgcagtttcggctcactgcaactttcacctcctgggttcaagtgattctcctccatcagccttgcgagtagctgggattacaggtgtgtgccaccacacccggcaaatttttgtattttttgtatttttagtagagacggactttcaccgtgttggccaggctggtctcaaagtcctgacctcaagtgatctgtctgccttggcctcccaaagtgctgggattacaggcgtgagccaccacacccagcataagttacctgtttttattgaagtcaatcttaatacttaaatatagccaagttccctaatttcagggtagaatttgacaattttaattatattttcttcttttttaaaaaataaatttttcctgaaaaactgttattactggaaatacaggagaagctggtctgggatactgtgaaaacatttcagcaggatcttggcagccctgggccagccagctgttcatagtcctgcatcacagaacctgtttataatttgttgtttgtacctccgtagggatgaagacatggatggagaatgggaggctcctcagattgccaaccctagatgtgagtcagctcctggatgtggtgtctggcagcgacctgtgattgacaaccccaattataaaggcaaatggaagcctcctatgattgacaatcccagttaccaggtttgtgcctcttgatggttgagttgctttcattaatctgtttgtattcagatagaagttttatctagagtaaggctgccaggttggtcattatattcaagctgttgaattaaaagcagaaagtagacttcctaagttgaaagagagcttaatgggttaggtattgcaaagataaacctagaaactggagtgaataactttctttaactttatttatttatttatttatttatttatttttgagatggagtttcgctcttctacccaggctggagggcagtggtgtgatgtcgcctcactgcaacctctgccttccggtttcaagcgattctcttgcctcagactcccgagtagctgggattacaggtgcctgccaccacgcctggctaatttttatatttttagcagagatggtgtttcaccatgttggccaggctggtctcgaactcctgacctcgcgatccgcccacctcaacctcctaaagtgctgggattacaggcgtgagccactgcatctggtcaactttctttttttgagactgagtctcactctagtggccaggctggagtgcaatggctcagtctcggcacactgccacctccacctcctgggttcaagcaattctcctgactcagcctcccgagtagctgggagcacaggtgtgctcacaggtgtgctcacctcacctggctgattttttgtatttttagtagagacggggcttcgccatgttggccaggctggtctcgaactcctgacctcaggtgatccacctgccttcgcctttcgaagtcctggggtttcaggcgggagccactgtgcccagccaagaataactttcatagttgctttgtaactatatttaaaaacaaaagagaaatggaaaactgttgatttgggtaccctgctcttgggtgctagggttgcttcagccataggatccacagctgagtctggacaatctgtgatgtggtgggtagaggactgtggtttgagtcagcatcttgactacatcaagtcagctcactgcttggcctcaatgcttgcaactataaaaagactgaggcccaaaagagatggtaaggatacaagtagtaaggttgtgaggctttaggcctcatgcaaaaatgtacaccctcagacctttgttccttttatctttctagccaagtaaaattatttataatctctacaaagagtggcaattaaaattatttataatcattaatttctactttatttatatacaaatactaatatatgtatatacatatacagaaacaggagaagctggtctgatactgtgaaaacatttcagcaggatcttggcatagtatatgtatatatacatatactaatatatgtttttctgtttgtaaattttttatttttttcctcatagtcgttaaagatgttatgtgaatgtatttttaattgtgtagtcaaacaataagataaaagttttactttaaaaaagttgccctttaggctgggcgtagtggctcacgcctataatcccagcacttgagaggctgaggtgggtggatcacctgaggtcagccattcgagaccagcctggccaacatagtgaaacaccatctctactaaaagcacaaaaattggcctggtatggtggcacacacctgtagtcccagctgcttaggcacgaggctgaggcacaaggatcacttgaacacaggaggcagaagttacagtgaaaaagaagttgccctttagttgttctcctgttggtggccatttaggtggattgtcacttttgctttcagagtcactgctgctgtaataatccttgtacatgtctgggtgtatgttgtgagtatttctctaggtagttatctagaagtgaattgctggttgatgatcatgtgcgttttattttaaatcaccactgaagaagtacgtactgacttatgctcccactctcattagcagttgctaagagtggaggctgttgaatgggccaggaacttgaggggttggtttggaccaaggtcatgggtgacagtagaaattggaagtagttggaatcctgcagtcttagaggcagagtgcgtaaaataatctgtagcatttgttatttattttcctgttgcttatttcaagtttcatgaagttggcatttctctccattgttcatgcaaaatttctcttacggtagattcaccataaacttttgttgatcattatctgaaatgattttctgaaacatttttttttctagggaatctggaaacccaggaaaataccaaatccagatttctttgaagatctggaacctttcagaatgactccttttagtgctattggtttggagctgtggtccatgacctctgacattttttttgacaactttatcatttgtgctgatcgaagaatagttgatgattgggccaatgatggatggggcctgaagaaagctgctgatggggctgctgaggttcgtgtttgctgcttgtgcatttgtgtctgttattgtaaggagctgttattttgtgaaagtctgtgttaaggttttttttcttcatttggcaatattggcataaaaagtataaccatatgcctgcaaaagacacaatattgggttttggggcatgatttcattagtctaatgtagtggctttagagtctgtttgtgttcagggttttttttttattatttgtctgggtatatatttcgaaatttgtcatttaggctatattttaatacactcttatatgttgaatctcggtttacactacatacagaattttcaaacaactggtcatgtggccgatttaagaattggagagccagggatactgagataagaaattcactggatcctgaggttaagggagccttttgcaggtgatgtagaagccagcttttgcacctatgagagtgaaatcatcttgattataaggagagcaagaggatggaggctttctctaatttcttttttacattttatgagcattttctctgaaaaagaaggtcctgcgtagtgccatgccataactgaactgcagaaaaacagcacggcctatgtttggtgtcaaaagctggaactttcaatcagccctgtcttgtttttcagccaggcgttgtggggcagatgatcgaggcagctgaagagcgcccgtggctgtgggtagtctatattctaactgtagcccttcctgtgttcctggttatcctcttctgctgttctggaaaggtaggaagtttttttttttagaatcaattttagagacatcactctagtgattattaaaaataactaagatatgttgcctgaggttttctttgtagtggctcagtaatgaccaagccatgtttggtgttgacttcagaaaccttacttactgttcctcagtggccgtttattgtgcccagatgg

SEQ ID NO: 10654 - DNA, 6000 bp, Homo sapiens
gcatttgactttcctctaataaaccttgggtgagagatgttaagaccgggtgttaaaatatatgaattccagaaatgctccctttagcatttctttccatctcatttttaaggcctattgaactttcttccttaaaagattcccttaaagaaaatcatttatactctgtagtacccagtgtcaaccctctactctctaatccacacctccaatttaattggatttggagtgctgccaatgtctaacttcattgcttttcagttttaccaatattaggactgttggttaatacggtccttgtcattggaagagctccattacaggttgaacggccatttgccaagggagttgtagaaagaattgctgtgataaatgagaggccccttctgatatttgggattatataaaaaagaaactttaacagaatgtggtttattcggttggttagaacagtctttactgagcttcaattttggttggtaggcgcatttaacatttgagtagctattgaatactaggtgccagtggtacagaagtggtcgaaacagatagggtcactgccatcattcatgattcccctctcaccctgcttttcttaactggtatctgctcattcatcagaactgtgccttaagagcagtaagtaggatccatgaaggaagacttcctttggaaaattattttaagctgaactttaaaggatgagctataaacaccttggtaagggaggagggggaatagcctgtggtagtagtgaacactgagaatttcagggccatagagagaggtccaatatggttgggaataaggagccagagcaagggggtcagcaggggcaggccagatagtgtcttgctgaccatgttaaggatttgtttttcctgaaagtgtaggaagccatcagagggttataagcagttcagtgatatgacgagaatattcttggtagctgcattaataataacttgtgcaggtagagaagtgatggtaagatgttgcagagcggatgtggaaggctgattaggaggttattatggtggtctagacaagaaatgatagtggcttagagtagagtgatagcagtggggtaaatgaaaagtgaaaggattggagagaaggtagtaggtagaatcaacaggacttggtaatgatttggctatagtgggtcagggaggggaggccaaggatgacccttaggcttacttaccttcatggattagcaccaggggacagaaaagaagatagcaggaattgtgataaaaagtataagccgacattttctttgtttgaatttaataaacatttcctggatttttgtgtatgcagactcagtgattagtgctaaggatactactacaatggctaacaaattagcatctgttatgtgtagacagtatgttaagcatttcaggtatgttctcaggaaagcccgatatgaaattgttatagctcttactccttttttactgatgaaactgaggtttagataggctaagaaccaagggcataaaacgtagaagtagctaaatcagtaacgcagtcccaagttaaattcttaaccactttattatactacctcccagagactgactttgatctcagagagcttacacagacatatatagtcataaaatgttaaatgtgacaataaaggtacacactaggtatagtgctggcaggagacagaaggatcatcaggggacatttagctgaggagctgatgttagaggtgagtctgcaagataagtagccgttgctctacaaggcggcagaggagagaagaaggggccccaggcagatatgttcatgacagttccagcaggcctgaaattagcctgagctatattgctaacatttgtgcatggcattgaaaatacactgaataataatagttttgtgactatagttatatttattaatagtcacaaaactattattattagctttaatatgaagctattataatagctttgtgactgtgagtccaagggctttgggggcagtttgtaccagtttgtcaacattatttattggtaacaatgagattgatgatttgctcctggtcttcatgagaccacacccccaacccagagctctgttgttgagactagctgcgtagcaggaatatgcctatgtgaccagcaaaatatttaaaaatgcaatcaggactctattttgggttgcttggttccagggtgttttctttgcacacttgggtggttccagatctgagagagtatatgtctggccacacacctaacaaagggaagccgaaggagcccacacctgaccttttcagatctcttgctgtgaggcagcctttggctgtaatgttttatattcttttccttttggggctcttttcagtcccaagttaaattcttagccactttattatactacctcccagagactgactctgacctcagagagcttacatagacatatatagtcgtataatgttataaactgtagatttataacataacctacagtaataaactgtagatttgcaaacactgtcattttgatccgtgtgattctttagcaaaccctgttgaactgcactgtcagtgcagatgtaaagcaaagacttgttcagagaatttctggtagtctggtattttaggaacatagaacgagtaagggtgtgaataaaagaggttctgaagctacctgggaggaagaacatgtgaatagtataccattgttaagaggtttagatttgtctgcaggccacaggtaattatcaaaaagtttttaagtgattgctcaatggggaatgaggaaagatggggagatgggcaccccttcttcccaggagacattcggcatcattttaggagaagggcagctacctgcatctagtagttagagaccaggtatgctgtttaacgtgtcacagtgcacaggaccatacagcctcctacaacacagaattattcagttcaaaatgggaataatgcgaggttgagaaaccctgagttcgagggagaagatattgggtagtgggaagaccttttaggaagttgtggcaatagtcctgtctggattgtggtttcggaatgcgatgaatttgagaggggcaaaaagattgagagatttgtgtgatcatatggatagatagggacagttagtttgggatgatcctcagtttcaatagtaggtgattggacaggtttaaagggatactgttaagtgagattacttgttttaagtttgatggaagagaagtggggtgatgataagttctggtgctattcggtttgtatgtatgtgtttgattattcagaatacaatggtcaaatacgtataattcagtatagcaaaatgaagttattttcacctggagaaaaagttactgactttttggtgaggatggggattggtaaatccccaattgataagacacttttatatcaaaacattttatctgtatattaacatttacatatttttacagtttcataagtgcataattattttcattagattatcaaaatgatatgtaacatagttcattagtcatcttctctcaagtgagaaaaggtcacacagatccttcttttaaatccaaagtttgacctagaatgtcaggatgctaaccaagagagttcaaggttgaaaataacaatcttgtgctccccaatcacatggtggtttgggaacccttcattcaacccaatgtgtatacgttcactctgttcacctctctgcactccctctttcttcctactcagttctttctcatgtaaggaagcctttctctttaatcctttcccccttttgtctcttacaatacttatccagttaccgcaggaaaaatctctccctcctctgtacaacccaaatggctggaattgtaactgattaagcataagccgtggaaagtagttccacagttctgttcagactcatatcacctacctccaggcttccattcagtatgtttgccattaagtactggctttctagataaacagacttgttgtccttcatgttattttgtttttgctttaatcacaagagtttcaacaatattttatttaatcagttacgtgtctctcctcaaaacaaggttgtaaatgattatatacttttagaatagcccactccgttactcaacttatagtgtagttcaaaacaaaatgtatatcaaattccatataactgactataaaagaacttaataaatgtaatctatttgtaatttggcagtaaaatgagcttaagttctatgatagaagtatgaatggggtgtaatcctaaggattggcctaccttgttacttcactgtgtgtgtgcttggatgatgctaataggaaagtgggttagaaaattttcagaaggaaaatattgcaggcagtaagcttagaggttaagaatatgactttggagttcaagttctgcctttcccacttaatttagatgaacagtcttgaatagttcgcttatttaacatcagtttttcagtctgtcaaatggaaggaaaaaagtatattgtagggttgctgggagaattaagtgatctaatagatctccattaattagcacagttgtctggctagttcaaagtgaataaaagttggagaatacttgttcagtttctgtaaagtttagttgaagtaaaatctcccaagttccatccactggtgaaaatttaaaaagatagtaaaagtcctttgcccatcaccttattgccattttaataggaaatctgattaaatctgattaatttttcacacttttcacagtgatttttcttttttaatctcttacaggtgattactggtggtcactatgatgtagattgtcgattagaagatcctgatggtaaagtgttatacaaagagatgaagaaacagtatgatagttttaccttcacagcctccaaaaatgggacatacaaattttgcttcagcaatgaattttctactttcacacataaaactgtatattttgattttcaagttggagaagacccacctttgtttcctagtgagaaccgagtcagtgctcttacccaggtaaataaaaaaatcagcaatataatgttggtatatttaaaaggaggaaaaaagcataatttaatatcatgcactaactgatgagcatggaattttgagactgacagtctttaaaatctatcttaattcttacatgtaggcatttcacagagaacttcagacttttgtagtgaaaaataatgttgaaagattttatgaacttttaattgtaaagagaaagaagcattaaaataaggaggaagatcactaaggtagaaacatcagtggtaaaagaaggttgggaaggctgagcagtgttccaatcttctgaagcattttctttaatccctgaaggaatgttgctgtcatactcaggaggctggtgtaactggaagcaaaatgatgcctaaattagtagataaataataccatatcatagcctttataccattacttagtgttactcaagctgctgtaacagtaacttgtgctgtaactttaggtgaaatattgaagattaatggtaagtcatctcacaaaaatagttacaaaagctaaattcagatttattttggagacatagagaaagcgtaaaaaatttaaacccagtgaacaactattgcttaggtgatgaggactgttttatttctagttcaaatacagcaaaatccaaaatgcttcaaaatccaaaacttttttttagctccaacctgatgacacaagtggaagattgttacatctgatctcatgacacatcattgaaaatatcatatacagttgccttaaggctgcatgtataaggcatatatgaaacataaatgaatttcatgtctagacctgggttccatcacaaagatatctcattatgtatatgtagacattccaaaatcagaaaaaatctgaaattcaaagcacttctggtcccaaacattttggataagggatactcaacctgtatgggcttagatcgtatctaaaagttactcaattaggc

SEQ ID NO: 10655 - DNA, 6000 bp, Homo sapiens
ataaatgtattacaaaagcagattttatatcactaccataaatggaaaaaactctgtgtacctttgtcataaatagaaggaaactgtaaaaacaaacacataaaaaaaacaaaacaacttgattcagttccagctggatataacttcctgtggaagctctgagctggaggcttattctctttttgttaaaaaaggagatagatgagtataaaggaggtgtttaagacatcttggcaccaaactgagactttcttctcatataagcagaattgaaagaatattaaatggaaccaacctcctcatgtttttcactatcatttaacttgtaccatctaacattatcttgcacatatcaggaattcagaaggaaatctccataaggaagtctcaccctcactgaactctcaatctctcctccccatagggttcccagcaccatgagggcctggatcttctttctcctttgcctggccgggagggccttggcagcccctgtaagtacctaaatatcatgtcttcttgttttcattcctaccgctagcaccaggggttctgagcctgccagccctggatgctgaaagggaacagggacttccccatttcaagttagtggtcttttttttttcttaagttaggaagctcgggataaaaactgggatgaggaccattgggtggaggtatcagagaagagagagttccatgtaatgttagataaacttcttagtagtcagagcctcccagcaatgaactaggattgctttagaaggaaatgacctctttgtcatatgaggaattcaagcaggcaggagacaggatgtgggggatttctggtaggggtggtattagaagagattcaagctatagagagaggaatgtgttggcttctgaaacagtgagggttgtttggttgtaagcaacagttcaatctgactaaattggggaaggaggggaagatacagaggtagattataatattaaaggccttggggaggactggaaaagggcagctctaggctttgggagttaagaactaatggacagtctctgagatattgctgtctgaatgaatcaactccagcaattttcacatcttgagagaatgtgccaagaaggtttttataaattcaaaaaatgagagccaatctggctgagcttgggtcctgagccagcttcttggccaggtgagagtggggccccttgattgacagacagttcctcgaagcattgcatgcagggacaggagtagttatccacagctcatctggaagccttcacaaggagaggaggaagaaacagggcaggcaaaaagtgcaatttctttcaacctgtgatcccctcatcctctgtttactaagaagtgggagtgatggcagaccctggcaatcttgatcaggctggtagatggaggcaaaagtttctcaaagttggcattaagttttgaagcagctccagccagctaagggcctcaaagttgtgtgttttcttgcttcctcctactccaagttgaaatggcaagaaaaattgcctaataatactactaataatatcacactgtgaggaagatgatgacatctgttaaaattcacagtgtcatcccctctggatgtcaattttcctatctgtaaagtgaaagaattggtctggatcagtgattttcagactttataagaattcaaagcagcagaaatacttttccaagctaaatcttaggtagacacctaggatataaaatatataaaatgggagctgcttgagtgttccacggtgctcacatgactggcttcttctttgttctgtccctcaccatggcagtccatgaggcacaactttggggatctccagtaagctgctctccaagctcccctagcctgtatccgaggccacaggcactttggaggtgaagctggccttattcctgacccctctgaacgctactttctctttccaacagcagcaagaagccctgcctgatgagacagaggtggtggaagaaactgtggcagaggtgactgaggtatgtgggcagtgaccgcagccccttagcccctctctacctgtatctgtgccctgagaaattagggcggatgctgtgggtctcaatgctagagtggggcattcgtctccctgtacacacatagcatagatgcaaaccctgagtatatcccacatcctgacacactcctgaatgcttcccaaaccttcaacggaaccctacgtttggggaccaggaccttaaaatttttgttttttaagctatgcaacagttgttcttccatgattacccacagtttttgcaaacgtaaaacagaggaggccgggtgcggtggctcatgcctgtaatccctgtaatcctttgggaggccgaggcaggcaattcacgaggtcaggagttcaagaccagtgtggccaacatggtgaaaccctgtctctactaaaaatacaaaaaattagctgggcgtggtggcgggtgcctgtaatcccagctactcgggaggctgaggtaggagaatcgcttgaacccgggaggtggaggttgcagttagccaagatctcgccactgtactctaccctgggcgacagcatgagactccatctcaaaaacaaacaaacaaacaagcacacacacacacacacacacacacacacacacacacacacagaggaaaggggagatgcttgggtgtggctggcaggggtggaggcttgacaccctcttgtgaacatagatctcagtcaatttagaaagtttactttgccaaggttaagaatgtgcctgtgacacagcctcaggaagttctgagacatgtgtccaaggtggtcgggagtacagtttgctttcatacattttagggagacacgagacttcaatcaacatgtctaaattgtgcattggttgagttcgctaaggcaagacaacttgagaagtgagggcttccaggttagaagtagataagagacaaatggttgcattcctttgagtccttgatcagccttcccctgaatacacaatttaatctggctcagtgaatctgcatttttacataaacaataggggagaggaagcaatcagataagcgtttgtctcaggtgagcctcagagggatgactgcatagaataggaggcaggtttgtcctatgcagttctcagcttgacttttccccttagcttagtgattttggggtccaaggtatattttcctttcacactctctttccctaacacccctggtgacctctaaggcagctcaacagaatcccaggcatactgcaaaacacagcaggcctatagattaaatctggattcccaaccctgcgtttgtgctttctgtgacctggaacccttcagctacccttatgggtctgggatgggagtggggccatttcacccattcttctccctcaattccaggtatctgtgggagctaatcctgtccaggtggaagtaggagaatttgatgatggtgcagaggaaaccgaagaggaggtggtggcggaaagtatgtcccttccctgtaacttggcacatccaagctgcccttggctgcctgggcctggggcacgaggacagcctacatgaggctccttccagcagaaatgcagggtggggtcctcagtgggctatgaaggaaacacggctttgacttaacaagtgggaaactgtggcactcagtcccctgggatctgggcaagatcggtttccaggccatccatgtgtgtggtaggaaggagagttctccagctggaaatgggcttctcccctcatagctctttgccctgagtccaaagctgagtttcccagtcccacggaggtcgctgatcacatctggtcaccgaaatctcccattgcttctgtatcagcccgtgccccacagagaagtagaactgagagaagagatcaggaacttgcacactcataagctcattctatttcacacagtccaaggaaacgaggtcctgaggaaatgcaacctgacataatccgtaccatgctatccatgcgttagtgccctgggagagaaatgacctaggggctctggctccagccctaggtgcaaagcatttgtactcaaggggttaagagcaaggactttggaagcggtccaaccaagctttgaacctaggcttctccacgccagcttgcttagcatctcggagcctcagtttctcatctctcatatggggctgatgaagatggcagacccttgtcccagggctgccgggaagttttcagacaagctgagtaggcatccgctaaaggattattaaaacacccaaaataaagcattgcgaggaaaaggccacattaagctctcatcctgaggggatagctaatggtatttgatctagctgggcacagggtttctgttgaacagagggacatctactgagtcatgttccttcccgcctccacgcccacctcatccggtgtttaccaggctctattgtccagcatggactttgaggctcttctcccttttcctttactgccacttaagtctgttttgttgggcctcagctccctggctcagtgtcaacagctgactttctaagccattctagaaagcttattctggaatccagaaatgccccactgtgattgttcaatggagacccaggaacacaatggttgcttcaatcttcaggaaagccatatggtatctagtgtttctgggtcccagactgagcctccagccccccagaagtgcctgacctctatctcaagctaaacctctaatccccaggctgaaccagctgctgccctaaatgttgactgtgaggctcagtgcaagagcaggcaggactcagggctgtccaaagcccagagtgggggccacagtcaaggactgtcagccctgagatctgtccaggtaggatgggggtggatgtgctagtccaggtgatgctaactcccttgtctttctgccctacagatccctgccagaaccaccactgcaaacacggcaaggtgtgcgagctggatgagaacaacacccccatgtgcgtgtgccaggaccccaccagctgcccagcccccattggcgagtttgagaaggtgagggctgagagacaggggcagggggaagggattgggcacttcggaatacaggatgtctgctcaggaaactgttggcttggtggttctatggggcagtgccagtctcagaagtccccttgctagacctagtcccagcaggaaagaggggatgagtcagagtgctctgcctggcactggatcttttcagcaaccagcaagactttaaacagcaccatcaggttccaagccctgtgccagactcttagagctaagagtataacagcatcagcaaagaatcaggtccaaaaatacgggttctggggccaaactgaaggttgacttcaaacctcatctccatcacttattaggtgtgagatttaagctaagttgccgaaccttttcaggtctcagttttctcacatccaaagagaggataaaaatagtccttaactcatagatctgttgtggagatgtgtcagaaatgtttggtacataacaagtatccaataaatgctacttaattttaaattatctctcaaatatgtcccttctctccaataggatccatccatccgtccaagtaaatattttttgagtgcctgctcctgcctaccatcatgctagtggcagtctagctcatggcagcaaatctagggccagcactattcctacagcctcccatctggcttctccatcttcagtttctccagagactacatagcctctgggctccacattttaatatcattgttaacattttcctcctcctcacccctccccactcccagtgcccagtcaccagtgcccatcagttctccctctgcagtgacatataagctatactaaataagtacggacaggatgttcaacacaggctcccctcctcctaacacagctacttacggccactgcatgtccagccctcaacatctctgcttggccacccctatgttcagagatcgact

SEQ ID NO: 10656 - DNA, 6000 bp, Homo sapiens
ctgaacccctcaggactctgcagagagttcctaccatcaagagggctctcaccaaatgcagcccctcaactttggacttctcagcctccagagctgtaagaaataaattccctttccttataaattacccagtttcagatattccttgtttttaatttttaatttttttttttttttgagacagagtctcactctgtcgcctaggctggagtgcagtggcgcgatctcagctcactgcaaccaccgcccccccgggttcaagcgattctcctgcctcagcctctggggtagctgggattacaggcacctgccaccacgcctggctaatttttatatttttagtagggatggggtttcaccatcttggtcaggttggtcttcaactcctgacctcatgacccacccgcctcagcctcccaaagtgctgagattacaagcgtgagccactgcacccgaccccagtttcagatattctgtcataagcaatagaaacagactaagtatctttgacatggagtggatactggaagccatgtgacttctgtgggatcatctcgaaagaaagtgtaaaatgagaagacacaagggcccaggaaagagccctagggaactccgcatttgtacagcaagtggtgggtaaagagagaaaagggagaagcctgctaggatgctgaggaggagcagccagaggagggggaaccccagagagcgtgctggcgtgggagtcaagagaagtgtgtcagaagaagggagcggttgacaatgtcagaagctgccaagaggcacaataagattgagggaacaagtgagtgtggttgtttctttatgggccagaattttaaataccaggatgaagggcacctaacaaatagcaaatacacaaactaacttttgtacctaccagacttcagactaaaatcggtacaaagaatactcgccagggtaaggagaagcccaggaaattacaagagatatctagtttctgaaatgaattacaatgatcatctgaacaaatagtgtgaaaaaatatacacctgaaaaaatgtgtgaaaatggccaacaaaacattgaaaatcagggttactggggaagacttttactgccagttattaaaatttactatcagctgtattgactggaacagctgccagaataggtaattcaacagccaggatgggaagccctgatacataagtttggtggggactgtaggtagcccctctggctaccttctttctagttgaataggttacatatctaactcccttgcaattaggttcacctactcaggtgcccttgagttagacttgaaaggcagaagacagcagaggccattttactgctgcttctgatggagatgcgaggcttccataggaaagaggggtccactggtataaagagcccgacaaccatgttctccagatgttcagtccctcttggccaccccacaccaaatgacagtccgcgagactctgcccatggagactccacctgctggtcctctaggtggagtaactgataacaaaaatctctagcttactcctaagtgtttattctgaaggcagtatgtacagcaagaccagacttttggcccagctagcggtgactactgcaatgtcaaaagagcacataaacagacttaaaaagcaaatgacaaactgggaaaattgctgtaacataggtaacaaagggctgatattctataaagagttcttgcaaatgaataagacaaagatgaatccaagtgggcaaaagatatgctgtaggcaatctgcaaaagtgatgcataaaaacaggttcaacattactagcaattagtggaataaaacttaaaacaacaatgcaaaaccatcgttctatcatattaacaaagatgacaaaaaatggtgtgacagtgcagggtgtggagaaaagttggtgtcaaagctgtgccatctttctgtgtatctttcatatcaaacaaacgccttcaacaatgagcacacctttcgacacgagttcccagactttatcctaaaaaaaaaaaaaatgacgtgcacacagatttagctacaagtaattttgcaaaagtgaaaagttgaaaacaacccaaatgtacaaaaataggggagataattatggtacatttgtataatagtatgccacttggtcattaaaaatgccatagaagtatatttttcataaacttatttctagctgctggttttacaggtggtttttgcttttttattttatcatttatattttcctgtaattattgcatattttttaataattttttaaaaccggcaattatatggtgaaaaggagagaagggcattagtaaattctgaagcaactgaaattaaattgtaattgctcattaataaataaacatcattacatactaacatttaccttaaataaactagatttcatttttctactatgggaggaaagacctaaaatacaaattgactcgaattatagaaaataaagttacaattcaggaatatctgtctttggactgtgaaatttgtacctgttatgtatgtgtgtgtgtgtgtgcctgtgtgtgtgtgcgtgtgtataaaaaatatttggaaagatatccactagtttaaaagtggttcctttcagcagggtgggatgagagggggacaggagacaaatttttatttacacaactctgtatgacttgttataacaagcacgaaaaatcgaaggtcacttaagtaaaaatggttataattatgaaaatacttagaaatatgtaaagtctctatggtatgattagaaatcataatgcaaaatctgtatactgtgcttatacctatgttcatatatttccatgtgagagaagcccgaaggggaatactctgcggtgaaagtagcttttcaagttcattcattggttcatttattccacaaatgtgtgctgagctgctaccatgggccagccaactgttgcagccaccgggatatagcaatcaaaaatcaaatgtgcctccactcagggaacttaaattctagtagtgggagacagacaatacatggtaaacccggcgagtatttcaggaagtggtgagcgtcctgggaaaagtggagcaggccaagggagactagcagtgctctgggtcaggggcaggtttaaacaggttggtcaggaaaggcctcactgaggtgacatgggaggaaagatttgaaagagctgaagggttcagtcctggaaatgcctggaaggggtgttttacaaatagacaacagccggtgcagaggccaatgcagctaacagaggaaggggagagcaggtcagacagctaggcaggccagtgggttgtccggctctgcagccattgtaaggactttggcgttttatttcaagtaaactgaggagccgctgtgcagtttggagcacagaaacgacaggatccctgtggctgctgtacggaaacccagcgactgggagggtagggagggcagggagacctaggtgttcaggtgagggatgaaggggggtgtggacatgttgaggtgttgcatcctagacacagattgaaggtagggtcaacaggatttctagtcagattgtgtagagggggtgagagagtgaagctggctcttctggttctggcctgagtaaatggagccgccattaatgcccatgggaaagacaggtgggcggagaaggtttgaaggtgggggaagaaagggtcttattttcttcttccttgcaataatatatcccaagcaatataattaagcaatatgtatttttccctttaaggaaattccaaaaattatatcgttccaaataaaaaaatcatctccagagtcctgacgcagcaaccattacattcccagtaatggaaatgttaagtcagtccgtgctctggagaaatcccacgacagaacacaggccaggagaccgggcctagattccggttttcgaaccgtgggggcaaacacggaggctgcaaatccatccccagtccggcaagattctcgaacatgtcgggagagggctgcataggaacttcaaaaacgagtagcggctcccctggattcagcgtgagggggaaaccgcggggcaggttcgaaactcaggagtccgacgtctgaaggagcgggaggctgcttccgaggagcccggggcacgacgggaagggccgcgccggccaggcagccctcctcccggcagcctcgggcaggccgttcacgcgccggcgacggcgggcccggccgcaggtaccaacagcacctgtcagagggcagcgcgggcgcaccctgcaagggccctgcctcgtcaagagaggcagcgagaaacagcagcgatgaacgaaacaaaaccttcctccaccacggctacacagagctcgcgtccgaggaagcgggaacacacaggccccggtgctttccgaaaggcttctcgccaggacccgcgaccagcgtggggcggagggggggggtcaccctttttgagaaaccaggtcaagcaggccgtcgctgggcgacctttgggcggagggagagggcagggctgcaccgcacaggttccgcccctacttcagcgtcctcgcccctcccaagctccgcccagcaccccaagggccaacccccccgcgacgcatgcgtgcttcttcccgcgcggctccacctgccgcgcgcttccgctgctggccagtctcttctgcccctccccctcctgtacggccgctactctgcgcccggcttccttctcacaacctggttctgcccacacctgttcttcagccctgtgaacagtggctgtagaacagtctcaggccctgcagacccacctccctcgctcccgtggtggcggtggtgacgggctggggacgttgggtagaaaaatgggcgggatgtggaacgctgcgttgccggggcccacttccggaggacgggcggaagtggctgcggtggatggtgggaggggggaaggagtgcgaggggagggccgggccgctgggggtcgagggggtggggcctgggccagcgctggggatcgggcctggggcctggattgcgacccgcggcgggccgcggctcctagccgagacggggcgggcgggaaccaggtaacgacccggcgcagttagagcgagggtcgtccgcagggcggacgggtgggggtcagagtccaggaagggtcgcagtgtcaccctcttctcttgtgaacacggggcacggggttccggggagaagggtgggaggagttaaattcttggagggggtggaggtcatgtggacgccacgcccctacaggaaggaaaggagagagagagtgtgtgtggatggatgtgtgttgagagagagaatggatgtgtgtgtgtttacgaataaacttggaggggagggggcaacaggggtgggttttcgggctgagaaatgggaacactgtggggctgctgcaagcaggacttgggccttaaacattccaggagagtgttctcgggagtagccccgggaaggactttaacagaggttgggaattacatctctggcacagttttgcaagcagagggggagcttagttaaaggagcaaagaatgcaagtggaagatgccagcatctcggtctggaaaggatttattaactagttgaagagggctggtggattaaaacactcagcaccctaagaagcttgggagattcgattattatgttgcgctttagacaggagggcaggagaaagggcgttcttttctcgatttcttagaagagtctccggttacttttctgtggtgagaacgggtacgatccatcttttatcctgaatcatgtatgtttgtacatacatataatatgtttatattatatgtgtttatatatgtaaacactattgatgaggtgactgtgttctggcgtgtgatacgtgagttaagtaggtgctttgtataaccttgcggagtgtttaacgaaggtgttttgatgatagagcctagtatggactcttaggtggggagtggaaactagaaggttttaggactctatttgggt

SEQ ID NO: 10657 - DNA, 6000 bp, Homo sapiens
aatggattattagtaactataaattatgatccttaggtagtaattgtcattatactactataaaagttgtaaaaggaaaattctgtggaaagccatttcagatctataccaaaatgatggtttcaagtcattatttttagtccaattggcatagtaaatgataaagtaatgcagtagaaaattaatctgaggtggcctttgtaataaaatagcaaattggcaacactgttttttggggtttttttgtttctttgttttgggagtcggagtctcgctctgtcacccaggctggagtgcagtggcgcgatctcagctcactgcaaccttcgcctcctgtgttcaagcgattctcctacctcagcctcccaagtagctgggattacagccgcccactatcatgctcagctgatttttgtatttttagtagagatggggtttcaccatgttggccaggctggtctcgaagtcctgacctcaggtgatccacccgccttggcctcccaaagtgctgggattacaggcgtcggccattacacccggccaacatttttgttcgtttgtttttgttttgttttgtgtttgagtgtcactctgtcacctgggctggagtgcagtgaggttcactgcagcctccacctcccaggttcaagccattctcctgcctcagcctcctcccaagtagctgggactacagacgtccaccattacgcccagctaatttttgtatttttagtagagacggggtttcaccatgttggtcggccaggatggtcttgatctttcaacctcgtgatccgcctgcctcggcctcccgaagtgttgggattacaggcatgagatactgggcccagcctcttttgttttgtattttgattcttgaaagtattttctacttaatgattaaatatatctgaaaagatttggggcattgttattttttaggaaaaaaaatctttagttcaatgtgagaaagctgattggaaaaaacagagaaataactttttgtataatttcaggcatttattgaaatggcaaccacagaggatgctcaggccgcagtggattattacacaaccacaccagcgttagtatttggcaagccagtgagagttcatttatcccagaagtataaaagaataaaggtaatgtttatttttttcaagctgtatatcagtttaacaaatgattttaatagttattaactgtggttatttcaaattattgctaaggccaggtgtggtggctcacgcctgtaatcccagcaccttgggaggccaaggtcagaaggattatgtgaggcccaggagttccaggcaagcctgggcaacatagcaagacctcgtctctataaaaataaaacaattggtaaagactaggatgtttttaactgttaactaataattattgcacatttgtccttttgttgttgttatttattaaagaaacctgaaggaaagccagatcagaagtttgatcaaaagcaagagcttggacgtgtgatacatctcagcaatttgccgcattctggctattctgatagtgctgttctcaagcttgctgagccttatgggaaaataaagaattacatattgatgaggatgaaaagtcaggtaatatacataaggaagttttagagaagataatttattaaaatccttaagatttttcaatatggagctgggcgtcattcctcaacctgtaatcccagcagtttgggaggccaaggcaggcaaatcacctgaggtcaggagttcgagaccagcctggccagcatggtgaaatcgtatctctattaaaaatacaaaaattatccaggcgtgatgtgcctgtaatcccagctacttgggaggctgaggcaggagaattgcttaactggcagggggcggaggttgcagtgagctgagattgcaccactgcactccagcctgggcagcagagcgagactcccaactcaaaaaaaaaaatttgcttttttttttttttttttttttttttttaaagtatatccctatttttagtgatgaaatctggaggactagttgtttgcttttcttttcttttttttttttttgagacagggtctcaaaaattaatatttcatacttttttttcttgtatttaaaaaatatagagttagccagtcgcagtggctcacgcctgtaatcccagcactttgggaggcggaggcaggcagatcacgaggtcaggagattgagatcatcctggctaacacagtgaaaccccctctctcctaaaaatacaaaaaaattagctgggcgtggtggcgtgcgcctgttgtcccagctgttggggaggctgaggcaggagaatggcatgaacccgggaggcggagcttgcaatgactcgagattgtgccactgcacccatcctgggtgacagagcaagactccatctcaaaaaaaaaaatttagagttaggctggatgcattggctcatgcctgtaaatccctagacattgggaggctgaggccagagttgcccaggagtttgagaccgccctgacaacatattgaggccacatctgtacaaaaaaaaattttttttaaccaggcaaagtggcatgctcgtacagttttagctacgggagtctgaagtcaggtggaacacttaacccaggagtccaaggtttgtagtgggctatgattgtgccactgtacttcagcataggcagtggagtgagaccctgtctcaaaaaggaaataaggatgaggagaacatcttttttgtttttctttttttgttttaaacacttctgtaattcagcattgcaagtttgtgttcttccagacttttatttttcttacactattttaatatcttaagcttattacttttttttttttttttttttttgagacagagtctcgctctgtcaccccggctgtagtgcagtggtgcaatctcagcttactgcaagttctgcctccccggttcatggcattctcctgcctcagcttccccagtagctgggaccacaggcacccgccaccacgcctggctaatttttttttttttttttttgtatttttactagagacgggtttcaccatccacaggatggtctcgatcccctgaccttgtgatccgcccgtctcggcctcccaaagtgctgggattacaggctgagccaccgcgcccagccagcttattacttttttgcagagtgtatatagatggcttagtatttggcactaaagtgattcttggggattttgtaaatctgacaggttggttttttggtttttggttttttctgagatggagtcttgctctgtcgcccagtctagagtgcagtggtgccatcttggcttgctataaactccgcctcctgggttcaagcagttctcctatgtcagccttccaagtagctggtactacagtaggcacactccaccaggcccagctgatttttgcatttgtagtagagatggggtttcaccatactggtcaggctgttctcggaattcctgacctcaggtgagccacccgccttggcctcccaaagtgttgggattacaggtgtgagccactgcgcccagccctgatattcagtgaatttttaactctgtgctaaagattaaaatttttagccgggtgtggttgctgtcacctgtaatcccagcactttgtgaggccaaagcaggaggattgcctgagtccaggagcccgagaccagtctaggcaacatggcgaaactgcacctctacaaaaaatacaaaaattagccaggcattggtggtgcatgcctgtagacctagctactggggggctaaggtgggaggatcagttgggcccagtacatcaacgcttcagcaagccaggattgcgccactgcattccagcctgggtgacacagtgagaccctgtctcaaaaaagaaaaaaagtaatgaaaattttctaaccagtaggtagaatacataataaggttttatacaattttgtaaaatataatgtgctttgtggtttcttttctttctttttaaggcttttattgagatggagacaagagaagatgcaatggcaatggttgaccattgtttgaaaaaagccctttggtttcaggggagatgtgtgaaggttgacctgtctgagaaatataaaaaactggttctgagggtatgtagtatttgatttgtcatcatttaacagcttgtttttacatatttaaagccacaacattcttttaaacatttttgtatgctaaaaatacaggattattgaaacctattgaaataagttattgaaagagaacaacctttttttctggtctttaatggcagaagtttttaaacgagtcttccctaaaggacaccttcattgctcttatctgtttaagtttttcatagcgttctgctaccagaatgttttattttccacttctctgttggtatggtcatgatgaatgtctgtaggcagcttaggttctcaaataaggttacgggaattgaataagctgagttgattatagggattgtctccaattattaattcactggataattgtgtattctgcaaatgtgttaacttctgcaaaacttttgtcttttagattccaaacagaggcattgatttactgaaaaaagataaatcccggtaatttcattttgtttttcatatgtgtgagtatattcaactttactttttcagacaacaaattaattgtggtgtgtccttttgatttcagaaaaagatcttactctccagatggcaaagaatctccaagtgataagaaatccaaaactgatggttcccagaagactgagagttcaaccgaaggtaaagaacaagaagagaagtccggtgaagatggtgagaaagacacaaaggatgaccagacagagcaggaacctaatatgcttcttgaatctgaagatgagctacttgtagatgaagaagaagcagcagcactgctagaaagtggcagttcagtgggagacgagaccgatcttgctaatttaggtgatgtggcttctgatgggaaaaaggaaccatcagataaagctgtgaaaaaagatggaagtgcttcagcagcagcaaagaaaaagcttaaaaaggtaaagaaagatacattgatttgttttaatagaacattagatcagatcagtatttcaagttatttacctaagcaggatcagatagaattatatgatttaaatcagaaaataaatcagatatgaaccagaatataaacatttaaatctaaactctgcaataaataattaaataagacattttattatagttggcaaaaaacatcagctcaaagaggaaacttttcagtaaaaatgagggagaaagactcaaaatatatgtgcttctgtattgtagtggtgtagtggtagcatataggtaggcagccttatagtgtagctttgaaaaaaaaaatacaggacgtgagtttgcagtaagttaactgacccaacatagttaaaacttttgccactcattcaaaaattattgaataatttttcctatttgagaaatgttggcctggtcagataccttagtatcctttaaaacaattttatttgaacaagtaagtcatttagaagccatgtataaagtgaatataaatataaaaatacacacatgctataaagaagagtaaacaaaggacccacattgagctgactgcctagcttaaggagtagggcattaaaatgcctttgaggcaaactttttatgttaaatggctcataaaatgtcggagtcaggcgggcccagtggctcacgcctgtaatcccagcactttgggaggcccagcagatcagttgaggccaggagttcaagaccaacatggtgaaaccccgtctctactaaaaatatgaaaattagccgggcgtggtggcacatacctgtagcagctacttggaaggctgagacaggagaattgcttgaatctgggaggcagaagttgcagttagccaagatcacatcactgtactccagcctgggtgacaagagcaagactgtctcaa

SEQ ID NO: 10658 - DNA, 6000 bp, Homo sapiens
gagttccaaaccagcctgacaacatagtcagaccctgtctctacaaaatcttaagaattaactgagtatagtggcatgtgcctgtagtttcagctactcaggaggctgaggtatgaggattgcttgagcccaggaagtcgagactgtagtgagccatgatcttgccactgcactgtagcctgggtgacaaagtgagatgctgtctcaaaaaacaaaacaaaaaacccaaaaaacttcttttccacaggaactgaggttcgagataattttaagaatagaataggtgtttttggccaggcatggtggctcgtgcctataatcccagcactttgggtggccgaggtgggcggatcacctgaggtcaggagtttaagaccagcctggccaacatggtgaagccccatctctactaaaaatacaaaaattagccgggcatggtggagggtgcctgtaatcccagctactcaggaggctgaggcaggagaattgcttgaaccctggaagcggaggttgcagtgagccagattgtgacactgcactccagcctgggcgacaggaagactctgtctcaaaaaaaaaaaaaaaaaaattggtattttttgctggacatggtggctcatgcctgtaatcccagcacgatgggaggctgaggcgagcagatcacttgaggtcaggtgttcaagaccagcctggccaacatggtgaaacgtcatctctactgaaaatacaaaaattagccgggtggggtggtgggcgcctataatctcagatactcaggaggctgaggcaggagaatcacttgaacccgggaggcggaggtcacggtgagccaaggtcatgccattgcactccagcctgggcaacacagtgagactccgtcccccactccaaaaaaaaaggtgttttttttttttttttctacaaagagctttgctgatctaatttcttccttttttttgttgttgttgttgagaaatgttgaataatagaataagttatatttataattatacataaatccaataaaaatagtttttcagaagtatcttgtagttgaacttatttggatgctccaatacctggacaattgacaattgagttgaatcattttgatacagggttttttttggtttgtttgtttattgaagcttttcctgctagtttgagatcataaataggcatgcctctttctgaagaatataataaccttttttttttttgagatggagtttcactcttgttccccaggctggagtgcaattgtgtgatcttggctcaccacaacctctgcctcttgcattcaagcgattctcctgccttggcctcccaagtagctgggattacaggcatgtgccaccacgcctggctaatttttttttttttttttttagtagagatgggttttctccatgttggtcaggctggtctcaaactcccgacgtcaggtgatctgcccgcctcagcctcccaaactgctgggttataggcgtgagccaccgcgcctggactacctttttaatttttttgaggcggagtattgctctgtcacccaggtgggcgtgcagtggcgtgatcttggcctactgtgacgtctgcctcccgggttcaagcgattctcttgccacagcctcctgagtagctgggattacaggcttgtgccaccatgcccagctaatttttcttttttttattattattatttttttttttttccagctaatttttctgtttttagtagagaccgggtttcaccatgttggccaggctggtctcgaactcctgacctcaagtgatctgcccgcctcagctcctgaaagtgctgggattacaggtgtgagtcactgtacccagcctagaatataacaacctttttttcttttttttgtgacggagtcttgctttgtcatccaggctggagtgcagtggcgccatcttggctcactgcagcctccgcttcccaggttccagtgattctcccgtctcagcctccccagtagctgggattacaggcacacaccaccatgtccaactaatttttgtatttttagtagagccttgttggccaggctgatctcaaactcttggccatctgttgatccgcccacctcggcctcccaaagtgctaggattacaggcgtgagccactgagcccagcttaacctttttttgttatttccaaaagtaatacatatttaaggtatagaaattcagaagccataagtaagcaaaaagaaaacacttaaagcgagggagaggggttgaagacaagttggttaattggtacagaaataaggtagaaggaataaattctaatatttgatagtacagtagggaaattatagttagaacaatttatggtgtatttcagaagagctggaagagaattgtactgttcccaatacaaagaaaaagtaaatggagccaggtgcagtggctcaggcctataatccctgcgcttttgggaggctgaggtgggaggatcacttgaggccaggagttctagaccagcccgggcagcatagtgagaccttgttcctacaaaaaaataattattcaggcttggtagcatgtacctctagtcccaggtgctcgggaggctgtggtataaaaggatcccttgagtccaggattcgagattgcagtgagctatgattgggccactgcactccagcgtgggtcacagaatgagactctgtctctataaaatagaaagaaaaggtaaatgtttaaggttacagatatttcaattactgtgatttgtttgttttgttttgttttgttttgttctttttgtttttttgagatgggagtctctctctgttgcccaggctggagtgcagtggcctgatctcagctcactgcaacttctgcctcccgggttcaagcgattctcctgcctcagcctcctgaatagttgggactataggcatgcgccaccatgcccggccaatttttttgtatgtttagtagagttggggtttcaccatgttggtcaggctggtctcgaactcccaacctcaaatgatgggcctgcctcagcctcccagagtgctgggattataggcatgagccactgggcccgtccaatgactgtgatttggtcattacacattatatacatgtatcaaaatatcacacgtaccccgaaaatatgtacaagtacgatatgtcaataaaaacatacacaaagaagtcacttaaaattatcttaaacatcagcattgtgatatatatttgtcaatatgtgtatatacacatatacaactttacatgctatatctaacttttttatttttttatttatttttatttttttttttgagacggagtctcgctctgtctcccagactggagtgcagtggtgcgatctccgctcagtgcaaactccgcctcccgggttcacgccattctcctgcctcagcctcccgagtagctgggactacaggtgcccaccaccacgctgggctaattttttgtatttttggtagagacggggtttcaccgtgttagccaggatggtctcgatctcctgacctcgtgattcgcccgtctcggcctcccaaagtgctgggattacaggcgtgagccactgcgcccggcccttttttatttgagacagaaacactgcaatctccacctcccaggttcaagcgattcttgtgccttagcctcccaagtagttgggtttacaggtgtgcaccaacatgcccacctagtttttgtatttttagtagagacagggtttcaccatgttggccaggctggtctcgaactcctggcctcaagtgatccacctgcgttagcctcccaaagtgctgggattacaggcatgagccaccacacccgtttcttaacaacaaaagagtgtgaagttcttcctcacagaaatattcattttcattatcactgacacagcagcataggattccttgtttggatgtgctgtaactcagtctcctgtgtattagatatctaggtgtggaatctgggctttaatatacatcacacttaagatgcttttatggggcccatgtggctgggcacggtggctcacacctgtagtcttaacaccttgggaggctgaggttgggcagattgcctgagctcaggagtttgagaccagcctgggcaacattgcaaaaccccatctctacttaaaatacaaaaaattagctgggcatggtggcacggggccgtctgtagttccagctactgcggaggctgaggcaggagaatcgcttgaacctgggaggcgggcgttgcagttagccgagatcacaccactgcactccagcctgggagacaaagcgagactctgtctcaaaaaaataaaataaaattttaaaaaatgcttttatggatttaaaattgttttttcattctccatgggagttaaaaagtagaaagtagaatcatgagtggacatgcgttttaataaattggaggtttgtgtaatttcagtaacgtaataataccagctctattaaaaatgaagaaatggaccttttgtactgggaagtagttgtaagtccacgtatttgtcttctcactggtgtatatgtgtaagcccaataattgtgttagtttatgtagtttcttgttttttttgttttttttttttagtgtctataagtcaagtctttggtgttaaagattttaactatcatttgctgtaattcttagaaagccgagggactaatcatttatgtttcgtgcataaggaaatgggcgttagcttccccaagaccccaggagccaggcattgttcttaccccaaagcctcaggtcagacttctgctgcttcacgttagaagtcatgatcttttgtattatggtaaagggagcttggaaaattaagtacttttaattccatttaatgtttctttcagtcttgaatccagataatagttttgaaatactggttgaccaatctgtggtgaatagtggaaatctgctcaatgacatgactcctcctgtaaatccttcacgtgaaattgaggacccagaagaccggaagcccgaggattgggatgaaagaccaaaaatcccagatccagaagctgtcaagccagatgactggtgagtcttggggaactgtcttcaagtgtaagggagcatttcatatattccatgtggcttgaacaacgaaatgttggttgagtaagctctgataatttcagtaatccatgatgcagtctaatctgtagggaaaatatagagtactatagctggaaaggggccatagtgtaatcatctggattgactcaccattttacaagccacagaatgccacacttgataagagtttgtctgtggtgacactgttggtttgtggcagaatctcaggtcctttaacctggctactccagggcttctgtgaactcacatttaaagccaaagttctgaaatgctaaattttaatttgaaaaataacctttttcctatttaaacaacagtcaattctctgctgtgggttgggtggtagaatacaaagccacaaggacaccaccatctgcctacacagagcttgaagtccagttgtgaggcatgatgttggcatgtggtatcgtaagggttcatgagaaggtgccacaggagaccagagcaccaggtgtacctaaactaggcatggtttcttggagcaaggcaaatcagattgagacttggcagtgaggtgagaattaaggagttggtgaatatgggaaggggtgtttctgattgaagaatgtcgtatgcagaagtagaggagcagcaatgagcttgacatgcgagggagaaattacatggccttttatgtagggtgcacattgaagagtgaggagaaatgaagatagctggggctgtattcttgtatatggctgtctttgaacttgcaacttcacacagtgactccagaaatgtcagaaagtgaacaaagaaattcttaccctttgtaaaatatcctcctatgcttagcaattacattctagattatctttttcctccttgaaaggtaagata

SEQ ID NO: 10659 - DNA, 6000 bp, Homo sapiens
tcttctggaaacctgggagtcagttgtctggggagggatgccagggtgtggtctgatctttggttagtgaccccagctgcaaactcagtggggccaagtgccttgttcagtatcctccctatcatgggagacccccaagaccacacctgctccccctccaaggcaacatccacactgtgggtcttgtgtattctggcacccgatggcaatgaggagagccactcacctacctcaggtgtacagggtgcagaaaagtatgtagggggtgggaaacaaagttctcctcgtgggaccccaggtatgaaattgagaaggtacagagtagaaaaggagggttgggggaagaagcatgggtaggaagtccctgggcagcaagactagagagcctgtcttaaggagtctttatgaagtggctttgctttccctgaggcatgttgcccactcacttcaactcctaaggtttttatcaccagatattctctcccagaccccagctgatgatgaaggtagcctcacagaggggactttccctggttcaatgatgagggaagaacagacccctaagcccccaggtgaccacactgccctggatgctggatgaggctctgacattgtggccttgagcaagtcccttctctccatgctgacctctaataagtccagtacaaagtgtgaacctgggtcaggcgcggtggctcacgcctgtaatcccagcactttgggaggccgagtagggaggatcacttgagctcaggagttcgagaccagtctgggcaacgtggcaaaaccttgtctctggaaaatatacaaaaattagctgggtatggtggcatgtgcctgtagtcccagctactcaggaggctgaggagggaggattggttgagtccaggaggctgaggctgcagtgagccgtgattgtgccactgcactccagcctgggcaacagagtgagaccctgtctaaaaaaaaaaaaaagaagaaaaaaagaaaaaagaaaagaaaaggaaaagaaaagtgtggacttggatgaaatcttcaggtccaacatttgggattctaagttccaaagaccaggttggaatcatttctaagaaggttctggtggttacacattcctgagtcctctactccccactccctgccaagctgggcctgtggatagatgtgatccctcagcctcccagcttcaaacacctgccagtggttgacgtgaacaacatgggctcagtctcagctaggatcacacccaaagcccagcacccagtaaggtgcaggagccatccatttccctgagcagagcagattaggctgaggaaagcagcagccatgcctttgcacaatgcatttctagggcattcttcccacacataatctcctctgctcattgtcctgtgaagaaactgtggcctggagaggttgagccactgtgccaaggccaccaatgcaggtggtatgtgggtgggtgggggcctggggtggggagcacggcccaggcagggtctgtgctgaccgcccttgtgtttggaacctagacatccccccttgcctggactctgagctgaccgaattccccctgcgcatgcgggactggctcaagaacgtcctggtcaccctgtatgagagggatgaggacaacaaccttctgactgagaagcagaagctgcgggtaagtggtctctctggccttgctggccccgtgctggtgaagatccagtcccattcctagaactgggcccccagctgcagggcggcatcctgctccggagcgtgcatttacccctgagcaccaggacacgtacttctcttcctgcctttggaggctgtggtgcacattaacatcttagaggctctgagaagtcctgcagcagagacctgctccctttgcttaacctaacgttaaacaaaagagacacaaacagccctattcctttttcctttggagtctgtggatcttaagctttaatgagcatattaactaccccaagaagctgataaaatgcagattccttggccccatctcaggccactgaaacagtgtctctagaaagcaaggcccaggaagctgcattctaaatactccccaggtgatttatgtttattttatttttttgaggcaaagtctcactctgttgccaggctggagtgcagtggtgcgatctcggttcactgcaacctccacctcctgggttcaagtgattcccctgcctcagcctcctgagtagctgggactgcaggcatgctaccacacctggctaatttttgtatttttagtagagatggagtttcactgtgttggccaggctggtctcaaaactcctggcctcaggtgatctgcctgcctcagcctcccaaagcgctgggattacaggtgtgagtgtgtgcccggccttcgccaggtgattttgatgtgggtagctatatggagaattctttgaggtcatcccaggcttctatttttgtgaatgagatgctagtacccatctatgacacctccctcccctcgctgtgagctttggtctggctagtctctgcctgctctggccttctgggaggggtgggagggcccgactggtccagacaatctccatggacctcttgtcacacacagtctctactccctcaggtgaagaagatccatgagaatgagaagcgcctggaggcaggagaccaccccgtggagctgctggcccgggacttcgagaagaactataacatgtacatcttccctgtacactggcagttcggccagctggaccagcaccccattgacgggtaagaccccagaccctagagtgaacagagctcaaggctggcaggtgcactagctatggccagaaagcctctcagcagcctatactgctccaagccctggcatccacagtttgcctggggattggagcagaaggatgaggcatctggagaaaagatgtggacctgggacaaagaaaccgataagacactctcatgctgaggtgaaagtcagtaggagctcaaaatagctccataatcctgcaagtactaggcgtggatatctggataatgaaggagtgtgaattaagaaggagtaccaggctccaaggggtggcaggggacaaggttgggtcagccacacgccccctgtccttcagcagaacatccaggggcagagcagccacctggcactgtctaagccccctcctaaggctcagccccaatagggcccaactgaccctggaagttatccaaaaaagcctgtctattttgcaagcccccagtttgagggctcttgtcccttgtccaaacgagttatgaggccctgtgcaactgcactgccgaacaggcaggcagctggccagttagcaaatgcttatggagtgtgcattttgtgccctgcactattctaggcaggggattgaacagcagtcagagctggcatggtccttgccctcatggacttatactctgttcataacctgtcactaccttctgaacttctcttgtggtgatgaagtgagagcccctgctcagcctcagatggagcaagctacacctgcaccttcccagagtggttttttcttcgtccttgggttgtggaagcagagcatcacacagaggggaaaggaagggctgccctactcacatactcagggaacttcctctctaggatgttcacccctcgctctttgtccagcctgtgtgcctggagtctgccaaccctgccagtgatcctgagggctggggtctcctgggctctgggaatctcccggccacttctctcccaggcttttgccatggctgggatccaactgagtcactcattatggcagggaggggaaaagtcaaaggggaacatctggagctcaggcaaagcaatttgatcccactgcaacagagggcctggagggaggctttcagatggggtgcaagaacagcacatctgggaaaggggtccagcttgggcaaggggacccgcttcctcctcctcccatcccagggctgtaggtgaccttgcctgcatccctgcccctccctgggcctcagttttccaccagtacaatgaaggggaggagaatgttcctatcagttcaaacattgtgtgatttctttggtgagctgggtggggctgcgaggtctagaggttaagaagacaactggagtcacattgttccctggagatcctttgtggatctttagggacaagtagttgggggctctgggaaacaaagaaaaaaattatacacatgctctggagtctaaggccagcagggagaatagggagggaggacagtgggagagacatccaaagggcctccctctcagacattacaggatacacaagcaaagctctatgaagatggttagagctcccgttgaccctcactgccaatcccagtccctttccacattcctccccagaaggcagcactgtcaccagattggtgtgtcatttttagaccctttactaggcatttatagatgtataaatgtgtgtccatagacaatatacagtgctgtgtcatgctagattttgatctacccatagcagaagtgctgaattttgattttaagtttctgtgtccccagttctcagccaattaggaaacaatcaaatacaccaaacagacctttgtttttgagaccctgaaaccttagagctggaagggccgttagtaattatggccatctcctcctctttgctggaaggagaaactgaggttccgaatggtgcactgctgttctctgagtctcagagcagtcagtggcagagctaggggtagacctgggattctggctttttgtcctgctttaaatatcctttcctccatgctctggggcaggctaactccccggttgcctcccaaggctgggtgtggagcttttccatgcctcaggccctcccctgcctccttccctgcaggtacctctcccacaccgagctggctccactgcgtgctcccctcatccccatggagcattgcaccacccgctttttcgagacctgtgacctggacaatgacaagtacatcgccctggatgagtgggccggctgcttcggcatcaagcagagtgagtgtctgaacaaagaagcaaggggcatgggcagaaacactgctcccagggtgctgggttgtcatccccccactctccgctctcttggtctgtctgttgtctgtcctctctgcctgtctctgctctctctgcctatttgactcctgtctcttgggcgtcttcctgatccttctctgtccatccaactgtccctctctctttcccttcctcaagcgttagcactcacccgtgctaaacactattttgggaactggcaggcacacagagaggaaacaggaagtgtaacttggcagcgtgtgtaagagacagggacaggccagagacagagagagcgagattcctccgtcactgacttcctgggtgaccttgcatggccacctagacccctgcccctggggatgggtgggagtccactgactccttgggaagtgcgttatcatcgacacagccttatttttaaccgtgctcttttcttgctttgcagaggatatcgacaaggatcttgtgatctaaatccactccttccacagtaccggattctctctttaaccctccccttcgtgtttcccccaatgtttaaaatgtttggatggtttgttgttctgcctggagacaaggtgctaacatagatttaagtgaatacattaacggtgctaaaaatgaaaattctaacccaagacatgacattcttagctgtaacttaactattaaggccttttccacacgcattaatagtcccatttttctcttgccatttgtagctttgcccattgtcttattggcacatgggtggacacggatctgctgggctctgccttaaacacacattgcagcttcaacttttctctttagtgttctgtttgaaactaatacttaccgagtcagactttgtgttcatttcatttcagggtcttggctgcctgtgggcttccccaggtggcctggaggtgg

SEQ ID NO: 10660 - DNA, 6000 bp, Homo sapiens
gggaggagcactgcaaatttcactttggacacgtgagtcagaggtatctgtgaggggactgagttgggagggcaagcagggaattggacatgtgggcctggagcacagagaagggacttgagcatgcatatttgggtgttccctccaaaacttatgttgaaacttaatccccagagtggcagcatggagaggtggggcctttaagaggtgattggatcatgaaggctctattcccactaatgaatggattcatcatgggagaactggcggctttataagagaggaagagagacctgcgctagcaccttagcacgctcagtccccctgccatgtcatgccctgaacccctcaggactctgcagagagttcctaccatcaagagggctctcaccaaatgcagcccctcaactttggacttctcagcctccagagctgtaagaaataaattccctttccttataaattacccagtttcagatattccttgtttttaatttttaatttttttttttttttgagacagagtctcactctgtcgcctaggctggagtgcagtggcgcgatctcagctcactgcaaccaccgcccccccgggttcaagcgattctcctgcctcagcctctggggtagctgggattacaggcacctgccaccacgcctggctaatttttatatttttagtagggatggggtttcaccatcttggtcaggttggtcttcaactcctgacctcatgacccacccgcctcagcctcccaaagtgctgagattacaagcgtgagccactgcacccgaccccagtttcagatattctgtcataagcaatagaaacagactaagtatctttgacatggagtggatactggaagccatgtgacttctgtgggatcatctcgaaagaaagtgtaaaatgagaagacacaagggcccaggaaagagccctagggaactccgcatttgtacagcaagtggtgggtaaagagagaaaagggagaagcctgctaggatgctgaggaggagcagccagaggagggggaaccccagagagcgtgctggcgtgggagtcaagagaagtgtgtcagaagaagggagcggttgacaatgtcagaagctgccaagaggcacaataagattgagggaacaagtgagtgtggttgtttctttatgggccagaattttaaataccaggatgaagggcacctaacaaatagcaaatacacaaactaacttttgtacctaccagacttcagactaaaatcggtacaaagaatactcgccagggtaaggagaagcccaggaaattacaagagatatctagtttctgaaatgaattacaatgatcatctgaacaaatagtgtgaaaaaatatacacctgaaaaaatgtgtgaaaatggccaacaaaacattgaaaatcagggttactggggaagacttttactgccagttattaaaatttactatcagctgtattgactggaacagctgccagaataggtaattcaacagccaggatgggaagccctgatacataagtttggtggggactgtaggtagcccctctggctaccttctttctagttgaataggttacatatctaactcccttgcaattaggttcacctactcaggtgcccttgagttagacttgaaaggcagaagacagcagaggccattttactgctgcttctgatggagatgcgaggcttccataggaaagaggggtccactggtataaagagcccgacaaccatgttctccagatgttcagtccctcttggccaccccacaccaaatgacagtccgcgagactctgcccatggagactccacctgctggtcctctaggtggagtaactgataacaaaaatctctagcttactcctaagtgtttattctgaaggcagtatgtacagcaagaccagacttttggcccagctagcggtgactactgcaatgtcaaaagagcacataaacagacttaaaaagcaaatgacaaactgggaaaattgctgtaacataggtaacaaagggctgatattctataaagagttcttgcaaatgaataagacaaagatgaatccaagtgggcaaaagatatgctgtaggcaatctgcaaaagtgatgcataaaaacaggttcaacattactagcaattagtggaataaaacttaaaacaacaatgcaaaaccatcgttctatcatattaacaaagatgacaaaaaatggtgtgacagtgcagggtgtggagaaaagttggtgtcaaagctgtgccatctttctgtgtatctttcatatcaaacaaacgccttcaacaatgagcacacctttcgacacgagttcccagactttatcctaaaaaaaaaaaaaatgacgtgcacacagatttagctacaagtaattttgcaaaagtgaaaagttgaaaacaacccaaatgtacaaaaataggggagataattatggtacatttgtataatagtatgccacttggtcattaaaaatgccatagaagtatatttttcataaacttatttctagctgctggttttacaggtggtttttgcttttttattttatcatttatattttcctgtaattattgcatattttttaataattttttaaaaccggcaattatatggtgaaaaggagagaagggcattagtaaattctgaagcaactgaaattaaattgtaattgctcattaataaataaacatcattacatactaacatttaccttaaataaactagatttcatttttctactatgggaggaaagacctaaaatacaaattgactcgaattatagaaaataaagttacaattcaggaatatctgtctttggactgtgaaatttgtacctgttatgtatgtgtgtgtgtgtgtgcctgtgtgtgtgtgcgtgtgtataaaaaatatttggaaagatatccactagtttaaaagtggttcctttcagcagggtgggatgagagggggacaggagacaaatttttatttacacaactctgtatgacttgttataacaagcacgaaaaatcgaaggtcacttaagtaaaaatggttataattatgaaaatacttagaaatatgtaaagtctctatggtatgattagaaatcataatgcaaaatctgtatactgtgcttatacctatgttcatatatttccatgtgagagaagcccgaaggggaatactctgcggtgaaagtagcttttcaagttcattcattggttcatttattccacaaatgtgtgctgagctgctaccatgggccagccaactgttgcagccaccgggatatagcaatcaaaaatcaaatgtgcctccactcagggaacttaaattctagtagtgggagacagacaatacatggtaaacccggcgagtatttcaggaagtggtgagcgtcctgggaaaagtggagcaggccaagggagactagcagtgctctgggtcaggggcaggtttaaacaggttggtcaggaaaggcctcactgaggtgacatgggaggaaagatttgaaagagctgaagggttcagtcctggaaatgcctggaaggggtgttttacaaatagacaacagccggtgcagaggccaatgcagctaacagaggaaggggagagcaggtcagacagctaggcaggccagtgggttgtccggctctgcagccattgtaaggactttggcgttttatttcaagtaaactgaggagccgctgtgcagtttggagcacagaaacgacaggatccctgtggctgctgtacggaaacccagcgactgggagggtagggagggcagggagacctaggtgttcaggtgagggatgaaggggggtgtggacatgttgaggtgttgcatcctagacacagattgaaggtagggtcaacaggatttctagtcagattgtgtagagggggtgagagagtgaagctggctcttctggttctggcctgagtaaatggagccgccattaatgcccatgggaaagacaggtgggcggagaaggtttgaaggtgggggaagaaagggtcttattttcttcttccttgcaataatatatcccaagcaatataattaagcaatatgtatttttccctttaaggaaattccaaaaattatatcgttccaaataaaaaaatcatctccagagtcctgacgcagcaaccattacattcccagtaatggaaatgttaagtcagtccgtgctctggagaaatcccacgacagaacacaggccaggagaccgggcctagattccggttttcgaaccgtgggggcaaacacggaggctgcaaatccatccccagtccggcaagattctcgaacatgtcgggagagggctgcataggaacttcaaaaacgagtagcggctcccctggattcagcgtgagggggaaaccgcggggcaggttcgaaactcaggagtccgacgtctgaaggagcgggaggctgcttccgaggagcccggggcacgacgggaagggccgcgccggccaggcagccctcctcccggcagcctcgggcaggccgttcacgcgccggcgacggcgggcccggccgcaggtaccaacagcacctgtcagagggcagcgcgggcgcaccctgcaagggccctgcctcgtcaagagaggcagcgagaaacagcagcgatgaacgaaacaaaaccttcctccaccacggctacacagagctcgcgtccgaggaagcgggaacacacaggccccggtgctttccgaaaggcttctcgccaggacccgcgaccagcgtggggcggagggggggggtcaccctttttgagaaaccaggtcaagcaggccgtcgctgggcgacctttgggcggagggagagggcagggctgcaccgcacaggttccgcccctacttcagcgtcctcgcccctcccaagctccgcccagcaccccaagggccaacccccccgcgacgcatgcgtgcttcttcccgcgcggctccacctgccgcgcgcttccgctgctggccagtctcttctgcccctccccctcctgtacggccgctactctgcgcccggcttccttctcacaacctggttctgcccacacctgttcttcagccctgtgaacagtggctgtagaacagtctcaggccctgcagacccacctccctcgctcccgtggtggcggtggtgacgggctggggacgttgggtagaaaaatgggcgggatgtggaacgctgcgttgccggggcccacttccggaggacgggcggaagtggctgcggtggatggtgggaggggggaaggagtgcgaggggagggccgggccgctgggggtcgagggggtggggcctgggccagcgctggggatcgggcctggggcctggattgcgacccgcggcgggccgcggctcctagccgagacggggcgggcgggaaccaggtaacgacccggcgcagttagagcgagggtcgtccgcagggcggacgggtgggggtcagagtccaggaagggtcgcagtgtcaccctcttctcttgtgaacacggggcacggggttccggggagaagggtgggaggagttaaattcttggagggggtggaggtcatgtggacgccacgcccctacaggaaggaaaggagagagagagtgtgtgtggatggatgtgtgttgagagagagaatggatgtgtgtgtgtttacgaataaacttggaggggagggggcaacaggggtgggttttcgggctgagaaatgggaacactgtggggctgctgcaagcaggacttgggccttaaacattccaggagagtgttctcgggagtagccccgggaaggactttaacagaggttgggaattacatctctggcacagttttgcaagcagagggggagcttagttaaaggagcaaagaatgcaagtggaagatgccagcatctcggtctggaaaggatttattaactagttgaagagggctggtggattaaaacactcagcaccctaagaagcttgggagattcgattat

SEQ ID NO: 10661 - DNA, 6000 bp, Homo sapiens
ttgggtgttaccttttcctaaatttgttggctctactaaatatatcatggaattcattttagtttctgatcagcactaaactttaaattttaggtcccgtgtgaattcatagaatgaaaaggtccattaaacactggtgactccaattttttctgcgttatttcttgcctgtttataaggaaataatagcagaaatgtcagtatgaccaatattctcagaaagggtctctaaattctgaggaaaatagatagttacaagtgtctcaaatgagagtgatgtgaagggacttaaaaaatcttcgctactggagtcattaagctgttgggacatcatgaacacaatggaaccatgagaggacttcgagaaaagtttctgtttttatgtatgattatgcttttttccttcaaattttgctactttctagttcctgaagaaggctaataacttaaatggatctaaattaacaaaagagcagtttttacatattttgatgaaactatggattcaagagtaagatacactaccctagtgcaagaggtacttttagcctgtaaaaatgcttaggtcctagctagttttggtattctgtcaaaatactgagtacatttgagaactattttagaggccttttgtttaattctgtggtttaaatgtgtaaattggaccaactttaagaagtttaaacacatggattatctgaatttctagttttctagttgctttactatgttttttacgtatatgcattatattgaaaaaatctttactcactttagcagtggaccctctataaccgctatagaaatgaccttagagaaaatttctgtgatggaagtagataatgaaaaatttttaaacatttaatcctgctctctggtattgctgcataacttggaaaatctgttctttttacttagtggtattgttaaatagtctacatgatcaaaaattcttactgtgaagtaagaaacttaagttgaaaataatttgtcatggagtgtcattatttttaggtgacttaaagtgatggtggtgtttttatttctttataggtcattttaggtcatcaaattgcttttcttttcttttctttttttctttttttttttgagacggagtttcacttttgttgcccaggctgtaatgagtgcaatggtgcgatctcggctcaccgcaacctccgcctcccaggttcaagcaattctcctgcttcagccttccgagtagctgggattacaggcatgcgccaccacgcccagctaattttatatttttagagccagggtttctccatgttggtcaggctggtcttgaactcctgacctcaggtgattcactgccttggcctcccaaagtcctgggattacaggtgtgagccatcgcacccagtcatcagattgcttttctatgcaatctcaagctttctcagcttcctttcacttaaagaaaattacccactacagcactttggctgtcttgtcacttgagtttatattaagttatacttttttctgccattctgtaagtgcttcccaaattcttttttttctctctataaggtatctcagatacatcaaggtgaatgtagttttcctacagaaatgtctgaatttaaaaagtgcacgaatcctttattaatctgattttacaggagttacctcagtgtagagtccagggatatatatttttataaaactctttcacttagtccccaccgtaaaccaaccagtaatagatcagtagtacagattagtcattggatgagtttgggaggtatgtgattgattttttgatcttggccttccttttttcactttgaaagaccagacacacttttcccctaagtttgaacctttaaacaacgtggaggattggatataatttctgttcagctatgtaccctttctagctcctatgaaatagaagcatgcgtagtaggataacatttatttctctcccacaacttaagaatattttaagtaaaatctgaatatttttagttcagagaattgtaagtcgttaattggtatttgtttaattaatcctttttttttttttttttttttttttttttttttttgagaaggtttctcgctctgtgtcccaggctggagtacagtggcgtgatcttggctcactgcatcctctgcctttcgggttcaagcaattctcctgcctcagcatcccaggtagctgggattacaggcatacatcaccatgcccagctaatttttttgtatttttagtagagacgggtttcaccatgttagccaggctggtctctaactcctggcctcaggtgatccgcctgccccggcctcccaaagtgctgggattacaagtatgagccaccacgcccagccaaggcttctaaattttgtgaacttacctgtggctcctctgacttagagccatttttattttattttattttgttttatgtttttgagaaagggtcttttgctttgtagcccacgctgaagtgcgcttaggtgttcgcagctcattgcactctctaccacccaggctcaagtgacgcatgtaccaccaccacatctggcgtttttttcttgatagagatcgggtttcactgtgttgcccaggctggtctcaaactcctgggctcaagtaatctgcctgctttggcctcccagagtgctgggatcgtatgcgtgagccactgcacccggcccttacaagccattttaaaactggtccccaagaaggcagtggtccattactttccagttgaaactttagatatcccaaatagctgatgattagagagccagctggagagatcttgagttccttagctattagccattattttaaaaagataatctagctttgagagacctggaaatagtagtttatagcttccaacattttaaggaaggtaccattctatttggatgagttccattttagtttacaggattttatttttatttatttatttatttttgagacagtttcactcttgcccagactggagtgcaatggtgtgatcttggctcactgcaacctctgcctcccaggttcaagctattctcctgccttagcctcccaagtagctggaattacaggcacctgccaccatgcctggctaatttttgtatttttaataaagacagcgtttcaccatgttggccaggctggtcttgaactcctgacctcagttgatgctcccaccttggccttccaaagtgctgggactgcaggcctgagccaccgcacctggcctttcacaggattttagataattttactagagcataggaatgtacctaaactgttgtcaggtaaatataaaccagttttttttttttttttttttaggagctcatttataaaataccaatccgcagctttttgaaagcacgtatcttgtaatttggtaccttggtaccttactctaatttagttcagctctcagtgagacatccccctttaaaaacacatcgcctgaccatgttttatattccaaatataattgtattgggtagtgtgggtgttacagaaattacctcaatttgtgggagtttgtgaaacatcaataatagttgtaaagcaggaattgtaaaacaagactgctttataatcagtgtaataatagttctttttttttttttttttttagcacattccatgtgcctggcaagggtctgataagcagtttacctttattgactcatttgcttttcacaacaaccctatgagactcttgtcccagtgaatttaaataacacggaccaaagattcacatctttgtaatttgggagtgaacctaggcagtctaatagcagagcccactttttgtaacttctctttcttacattgcctaaaaagttaactcatttatatctgcatttttttcctaaagaaatttatttgaataaaataagagttacttcaatttaaagtaaaccataaaagagtaaatagtgaaagaatgtcatgtttcccaccctaaatttggaaagaggcactccttaaatttgcttattttggggaaatacaaagggagcataatattttgataaatgggattcgttttctagaaaagccattcctgttgaatcatgttagcattttatggtaatgctaatcatggtgtatttttcattcactgtgtatttagtaggtagtaaacctggaacatcctcaaaagctggatgtgattaaagttttagtttttgtttttgtttttgttttgttttgttttgttttgagacggagtctttgtcatccaggctggagtgcagtggcgcagtctcagctcactggaatctccgccttttgggttcaagagattctgctgcctcagccttccaagtagctgggactacaggcgtgtgccaccacgcccggctaaattttgtattttttgtagagatggggtttcgccatgttggctaggctggtttcaaactcctggtctcaaatgatccatccatctcagcctcccaaagtgttgggattataggcatgagccaccatgctcggcctaaaagattctattttaactaattgttcacatttatagtatatagtttctagaaaagtagatataaacatggatgttttattcagagtgctataaagtagcatacaatgaatacttcagtttggtccacagtaaaaattaataagccttgctgatctcaaggttagttactactcttgatctttattaactctatatcttttccctgtcaaatatcttaagtatgttgacaagttaatccagtttttccaagaatgtgcatagcgtatttgagggcaggatcaagcctcaaggattcagagaaatggttttaaattaaatcaatgtgatttagtgaatgggcaggtgtttgtacagcctatgatactgcatagacattaatatcctagagtttgaatggttcagatgaaaatatttcagctttatttttgttaattctactaatttactttgctgcaggagtggagtcaacatatcaatggagcaagtcacagtcgtcgatgccagcttcttcttgaaatgtaggagtttgaaatacctttaaaacatccttatcgtgaatcagaatcagccattattggtttttgggagttcatcatttacttgtaatatccacaatgttaatatcacatagtggtactgtatggacaatactatttacaagtaaaatgtttagatctggaaatttcatattgaatattagatgcagtaataatattttgttatttaacatttctaggatacatatatattggtcattatacaaattggtgatttttactagacatagtgaaagatagtatttgatatgtagagtggattaaacagtagcatttttaataatacatgctctaaaaatgtaaaagatacggaaaagagggtaggttattaaaagattctaattcattgtccagcaaaatccttggtgatgaattttttttttttttttgcttttgagatctttggttttgagttcaggctgctaccatgaaatggaattcctaaagaaactccctgcttaagcagcacacagtgcccattgttcactggagttggaattttcacatatgcctaactctgttggggctattctttctttctaatgtcacaactcaactgtgctcttggtattaatattggagaaggaaaatctgtgctctgttcttgtttctatgtaacccacatttctaattctttgtgcggcacttcctccttacaatttaacaaatagaggaaaaacttaatttcaacattatctgcatttgcaagcaatacaaaacaagtttattctcgtggattattttgaagttctgaaatttttcttttgaaatatctattggaaatgctttaaaactatgtttctaacacttagactctcagataactttactaataaatgatctctattttagaggccaaacaaggctgttttgtgaaaaggacagttttattttaaagttaattttctggtctttttaaagctacccag

SEQ ID NO: 10662 - DNA, 6000 bp, Homo sapiens
tgtcagagagagcattggcactacctcattactgtcacttgaagataaagcccaagtttcccataggcctacattgacaaatgcatggacatgtcctctatacttctaggtggggtggaagttttggccccaccatgtgttctccatagacactaaggtagagatgcccttgttatcacatggtgaaaggtcttggctctccactaaaacctcctctgacatcacctgatatggtttggatatttgtcctcttcaaatctcatgttgaattgtgatgcctaatgttggagttgaggctatcaggaggtgtttgggtcataagagtgcatccctcatgaatgacttggtgctattcttggggtagtgagtgagctcccactctgtgagttcacacaagatctagttgcttaaaagagtgtggtatctccttccttttcctcttgctctctctctaatcatgtgatatgctggttttcccttcgtgttcagccatgattggcagcttcctgaggccttcaccagaagcagatgccaacaccctgcttcctgtacagcatgcaggaccatgaggcaaataaacctcctttctttatagattacccagtctcagatattacttcatagcaacacaaaatgaactaatacagaaaattggtaccaaagactggggtgttcctataaagatatctgaagatgtggaagcagctttggagctgggtaacgggctgagattggaagaatctggaggtctcagaaaagacaggaagatgagggaaagtttggaacttcttagagacttgttaagtggttgtgacaaaaatgctgatagaactatggatagcaaaggccaagctgatgagttctcagatggaaattaggaatttattgggaactggagcaaaggtcactcttgttatgccttagcaaagaacttggctgcattgtgtcaatgtcctggggatttatggagggttgaacttaagtatgattacctaggatatccagtggaagaaatttctttcttctttttttttttttttttttttaaggcggagtctcgctctctagcaggctggagtgcagtggcacaatctcggctcactgcaagctccatctcccgggttcatgacattcttctgtctcagcctcccgagtagctgggactacaggtgcctgccaccacggctggctaattttttttttttgtatttttttagtagagacagagtttcaccgtgttagccaggatggtctcgatctcctgacctcgtgatccacccacctcggcttcccaaagtgctgggattacaggcataagccactgcgcccagccaggtggaagaaatttctaagcagtgaagcattcaagatgtgtcatggctgcttctaacaacctatgattagatatgggagcaaataaatgacttaaagttggaacttatatttaaaagtgaagtggagtgtaaaaatttggacaagtcacaacctggccacgtagtaacagaaggaaaaagcattttcaggaaatagattcaagagggctacagagaaaccacttgccatggagattagcatgactaaaagggaggcaagtgctaatacctaagataatggggaaaaggcctctaagccatttcagaaatcttccaggtagtccctcccatcacagatccagagacctaggaggagagaatgagtttgaggaccaggcccaaggccctgctggcatgtgaagccttgggacactgctcccaggatcctgactgccttggctccagctggtacaggtacaggccacaggtacagctctggccactgcgctggagagtgcaggccaccataaaccttgatggtttccacatggtgttaagcctgtaggcgcacagaatgcaagtgtgaaggaggcttggcagcttccacctagatttcagaggatgtatcagaaagcctggatgcctaggcagaagcctgccatagggtggagctcctgtaaagaacttctactagagcaattcccaggagaaatgtggagctggagctctcccaccgagttttcaccagcatactttctaatggagctgtgggaagggggccgctatcctctagatccgagaataatatgagaatgccaccagcagcttgcaccctgagcctggagaagctgcaggcattcaattccaagccatgatatcagccatgggtgttgcaccctacaaaggcatggaggtggggctgctcaatgccttaggagtctgctctgtgcaccagtatgccctggatgcaggacatggggtcaataattattttggagctttaagatttaatgtctgccctgtgtggtttcagatttgtgtggggcctgttcctttcttttggctgttttctcccttttagaatggaaatgtttacccaatgcaatgcctgtaccaccattgtatcttttttttttttttaaatcttacaggctcttaggtagaaggaacttgccttgagtctcagatgggacttgggacttttgattgagttggtgctggaacaagttaagactttgggagaactattggtaaggaatgattggattatgcaatgtgagaaggacatgagatttggagggctggggtggaatgatatggtttggatatttggctcctccgaatctcttgttgaaaagtgatctccaatgttggaggtgaacctagttgtgggtgtttgtgtcatgggggcggattcctcatgaatggcttggtgcttggtaatgagtgagttaccactctatgagttcacatgatatatattttttaagagtgtggcacctcctccctctctctcttgttttctctctctcttaccatgagctatgctggctccccctttgctatcagttgtgattggaagcttccagaggccctcaccaaaggcagatgctggcactatgcttcttacgtagcctggagaaccgtgagccaaataaacctcttttctttatagattacccgcctcaggtattcctttatagcaatgcaaaatggactaatgcaccaccccagcagagagggggaggtggcaccgtgttattttctgcacagtccaggctgtccacatggtctcctctgataccacaactgtggagcttgctagcagttgggggaatgaaagtctcagtttcattttttggcctgatctgataccaccagaagtattgggattcctcattaacagctttgcaagagcgttaatctagattccccactcaacttttgctggtgtggggccacagtttttttctgtggtgattacctggagtaaatgattatctaggagctttttgtcttgctaggctgcctatttcctggtcctttgtctagagaaagcatgcttttttttttgagctttttgcatcagtacccaataatgtttctggttgttggcttcttctggtccaagtctggaatagataaggcaaaaacccagagatttcaccactgtgtcagtcttcaaaatttataacactttaaagtattttgcacttccaaatgttgacaatgttctctaaatctgctaacctttagaatgtttccaagtttaaagtttgcttcacttttagactaagagaatattcatgtatcttatgttgctctatcttttgtaataaagtaattactacattgaactgttaaaatatataaactgcttgttaaaaataaaatagctccatgttttgtctatatcttaattatcaagtaaacaaggatttaggctttctgattatgaagacatactggattaaataatccttattcacattaatgtccttaactattcttagtacttaaaatataaacattatggccattcctttaaaaaaaaactagtgatagcttattctgatcacatttcttagtcaaactaagatgtagctatgggattctgattatgaattggactgaaattgaaagagaggtttattaataggtaggttattctcaaattattttttaaatatatctttgcataagatttacatttttcttttgactatggattatataaagattctcagtacgtgtctctgatattgcgattcaatatccatatgatttttgttgtaatatgacaatgtttggtcttgataagaaaaaagcatggatgaaaatttaacataggaataaaagatctagtggacaccgattcaattaggaatactgagttttggaagtcagagttataagttcaatacttaggtcattatgttatataacaacaagggaaaatgtcacaaatatctttattctaacagttaaagtatcagaaaatgatgaagttgttcataccacattaaaggaattttacatgtgttcagaaattttccaaaaatgtcatctgtaagtacctgataactatatatacatgtgcatatgtacgtgtgtgtgtataatatcatttaaaaaaaaacacccaagctatcctagaataaggtgaatcatatcagtcaaactaccttattttaaaactttgacattcagttgcaaatatttaataataaaaatatataagctgataaatcgttttaaataaaatgatgtaaggagaggttaagtagatcttaaagtttctaattcaattgtaatatgtttgtaatcattactaaaagaaaatactggattacacactctccaatgagatttgaaatgttctgggtcttaaaaggacataaaattgaaaatgattgcatttaacaaattgcagacggatatagattgcattttgaaaatcaacgaatggatctaaaatttacattggccacatgatgtcgctgtacaccacaaagtcttgtcaatagaagggagctactgatcactaaaagtgaaggaggaagctccattttgtcaccgcctgagagaagacagaaacggtaaagagataaatgattggaaatattagataaaatggcatgattttgaagtaagaggagagcataagaaaggtgtagtccttttgcaatggtgttttctaggagagggggcctgggagcccgggatctgcttctttggcttctgctcctcgcagcctgggaggtggggagcggccagctccactactcgatcccggaggaagccaaacacggcaccttcgttggccgcgttgctcaggacctgggactggagctggcggagctggtgcctcgcctgttccgggtggcgtccaaaacacacagggaccttctggaggtaaatctgcagaatggcattttgtttgtgaattctcggatcgatcgcgaggagctgtgccagtggagcgcggagtgcagcatccacctggagttgatcgccgacaggccgctgcaggttttccatgtggaggtgaaggtgaaagacattaacgataatccacccgtcttcaggggcagagaacaaataatatttattcctgaatctagactcctgaattcgcgttttccgatagaaggagctgctgatgcagacattggtgctaacgctcttctaacgtacacgctcagcccgagtgattatttctctttggatgtagaggcaagtgatgaactgagtaaatctctttggcttgaattgagaaaatatttggatagagaagaaacaccagaacttcacttattactgactgccactgatgggggcaaaccggagctgcaaggtacagttgagctgctgatcaccgtcctcgacgttaatgataacgccccactgtttgaccaggccgtatacagagtccacttgttagagactacagcaaatggaacattagtgaccacattaaatgcctctgatgctgacgaaggtgtaaatggtgaagtcgtcttttcctttgacagtggtatttctcgtgacattcaagaaaaattcaaagttgattccagctcaggagaaattaggttaattgataaactggattatgaagaaacaaaatcctacgaaattcaagtaaaggcagttgataaaggaagtcctccgatgtcaaatcact

SEQ ID NO: 10663 - DNA, 6000 bp, Homo sapiens
ggtgtgcgccaccacactcggctaattttttgtattttagtagaaacggagtttcatcatgtttccctggctggtctcctgagctcaggcagtctaccagcctcccaacgtgctaggattacaggcgtgagccaccccaccctgcccaacgactcacttagcttcaacctgtcagactcaggcttctcctaccttagccttcttagtatctgggacaacaggtgtgtgctaccatacctggctaaatttttctttttttgattttttgtagagacaggataatttttttttttttttgtatagacagggtcaggctatgtttatgttggccaggctgggaaataaggtcttaatagaggaagttgaagattcctgggggaatagcatgtagagcagctatagagggagagggtgctgattactagctaaaagacttagaaatttttgcaaacatggactcatgatagtttttgggtgatgagtcttcttgtaggatagcttgaaagaggaggaggaaactagaggccctggtaatataaggtaacattaagtatcctgatgtcagtaatggagaagagtgaaagactatgattgattgggtgactgtgtgggcagaggatgtgaggagaaaaggacatcttgtgtgtgtgtgcgcacacatttttagttgtgtatcttctacttgttttctcccccaccttgtacctgtactttctcaagcccaaaaatgaaaatttacctgctaccaaccacatcatcttgtgcatctgtgtagctcagtttttatttctttagatctgtggtcctccgtggaaagagagccactaccccaagacacatctaatataatacacagggcgcttacgtggttagaaaagaagagataagccgggtgcggtggctcactcctgtaatcccagcactttggaaggccgaggcgggcagatcacgacgtcaagagattgagactatcctggccaacacggtgaaaccctgtctctattaaaaataacaaaaattagctggatgtggtggtgcacacctgtcatcccacctacttgggaggctgaggtaggagaatcacttgaacccaggaggcggaggttgcagtgagccaagatagtgccaatgcatcccagcctggcgatagagcaagactcatctcaggaaaaaaaaaaaaaaggagcttgttttggccaggtgcagtggctcacgcctgtaatcccagcactttgggaggctgaggcaggtggatcacctgaggtcaggagttcgagaccagcctggccaacatggcgaaaccctgtctatactaaaagtacaaaaattagccgggcatggtggtgggtgcctgtaatcacagctactcaagaggctgaggtgggagaattacttgaacctgggaggcggcggttgcagtgagctgagatggtgccactgcactccagcctgggcgacagagggagaatccatcacaaaataaataaataaaatatataaattttaaaaagtagcttgttcttagtttaatattctttttgagttctaaaacgctaatttgaaaacatgtctattgatgatatttgagcaaccgtatccatattaagccttaatatgagaggaattatcttctgtgttaatttttttttttgagacgaactcttgctctgtcacgcaggctagagtgtagtggcgtgctcactgcaacctccacctcctgggttcaagcagttctcctgactcagcctcccaagtagctgagactacaggcgcccgctatcgctcccagctaatttttgtatttttagtagagaagagtttcgccatgttggccaggctggttgtgaactcctgacctagtgagccacctgcctcggcctcccaaagtgctgggattacaggcgtgagccacggcgcccggccatctctgttatttcattgtaatgttttaacgggtaccccctgtaaattagtgtatgaaagggcttttgtctgttgtaaagcactttacaaatgcaaaagtttgttggaaattgtatttgaatgccccacatctgtgtaaccaatcctctctatatgaggatgttgtgtatgtttcagttttattttgaaattttccagaaatggaatcttttaactgattttagggaaaccctttaatctctctaggctgcctttctttatctatgaaatgaaatagtaagttctttttagctctgcgatttaaaagctttaattttaaatgagagagtggttagtgatcttcatgaagtttgataggtggcaatacatttaactgattttgctctttatgtgtagatcatggaagggaagtggttgctgtgtatgttactggtgcttggaactgctattgttgaggctcatgatggacatgatgatgatgtgattgatattgaggatgaccttgacgatgtcattgaagaggtagaagactcaaaaccagataccactgctcctccttcatctcccaaggtttgaaatggtctttgaatctattccttttacgtcttgagatgataaaattatgaagatacccgggtgcagggaaatgtagtctcaactactcaggaggcctaggacaggagtgtgagtccagccttggcaacacagggagatatcatctctaataaaatataaaagaaaaacatggtgaagataaatttggaacgttttcaaagggaaagcaaaattcgtgaaaatacttattgatctctctggcagcctttgtcttgctagaggccaattatatgggttgaatttgaaggccagctatgaaatttttgtgacagttgaaagcaaaccaggagaatagattctagataaaaaggcatgttgctgaaaatttaaatttttaattcatttatgtatttaacacaggttacttacaaagctccagttccaacaggggaagtatattttgctgattcttttgacagaggaactctgtcagggtaagtgttttccagagaaatatatgttagaggcagacatgtaaataagatgggatagtagattcctttttggatagcatcttttatagtgaaatgtctaactttattttattttatttatttattttttgagacagaatttcgctcttttgcctgggctggagtgcaatggcgtgataccggctcattgccacctccgtctcctgggttcaagtgattctcctgcctcagcttcccaagtagctgggattataggcatgcgccaccatgctggctaatttgtgtgtgtgtgttgttatttttttagtagagatggggttttgacatgttggccaggctggtcttgaactcctgacctcaggtggtccacttgccttagcctcccaaattgttggcattacaggcatgagccaccgcacctggcctgaaatttctagctttaatatcttcagtgttaacatccatgcaggaaaatagtcttttggaatttgtggtttttacttccacttctttccctcccccactctaccctatattttgttctttgattgaggaaaaaaattttctcttgatgttaaaacatcagtggaattatctcataggtttggtactttttcatataggtttgtgagttgaagataatgtattatcattagttgtgtgacagatttaaaggttggaagtagagtggttaaataggctaagagcagaataggtcctactttaatgagtatttacataattttccctcacaagtcaactgtcattttaagactgattttgggatttgttatttacaggtggattttatccaaagccaagaaagacgataccgatgatgaaattgccaaatatgatggtgagaatcccatttggtttagatataatagcagatagaggtttgacatgttgtctccatggcatttcctaagactagtttaaaaggacatagtaggctttaagatttttccagccaggtgcggtggctcacgcctgtaatcccagcactttcggaagccaaggcgggcagatcacgaggtcaggagatcgagaccatcctggctaacacagtgaaaccccgtctctactgaaaatacaaaaaattagctgggcgtggcagcgtgcatctgtagtcccagctgctggggaggctgaggcaggagaatggtgtgaacccgggaggccaagcttgcagtgagccgagaacgcgccactgcactccagcctgggtgacagagcgagactccgtctcaaaaaaaaaaaaaaaaaaaagatttttccatggaagttttgccacctttgtgtgttgcctaattttttttttttttttttttttatttaaggttcaggggtgcatgtgtagccttatatttaataggattagatctgtttaatcacctgtgctactgaatgttggaaatttctagacagtagtataatacactacagttttaaaaagccatatctgaataatatttgccaaataaagtgtgtttatttattatttatttacttttttgagacggagtctcattcttgccacccaggcttctggaatagagtggcgtgatcttggctcaccgcaacctctgtttcttgggttcaagcgattctcctgcctcagcctaccgagtagttgggattacaggtgcccatcaccacgcccggctaatttttgtgtttttattagagatggggtttcaccatgttggccaggctggtctcgaactcctgaccttgagtgatccgcctgccctcagcctccctaagtgctgggattataggtgtgagcgaccacggctgccccagtataatatatttatgcaactaggaggtgttttttttggcatttaaaggaccttcagaggtagagttaagcagtggaacttttttgtgttgtcttgtaggaaagtgggaggtagaggaaatgaaggagtcaaagcttccaggtgataaaggacttgtgttgatgtctcgggccaagcatcatgccatctctgctaaactgaacaagcccttcctgtttgacaccaagcctctcattgttcagtaagtgaaatgcttgttggataaaagctttctgcaaagggtaatcttagaagacattatgtaacttttactctatgttaaaaaattatgagattatataagtggtggtagggatttttgggtgaatttaaacaccttgtaattaatagtttttcctggctaatgcattattttgaaagaaactggttacttattttcctgactctaaataacttgtagattttgcagaacaaatttaccggaaatctgcattaatagtttttgtaattaattaattacaaaactagtaattaatagtttttcctgcctaatgcattattttgaaagaaactggttactcattttcctgactctaaataacttgtagattttgcagaacaaatttactggaaatctgcattaatgttcaatttaattttatttatttttgtggcatttgataactattcaaaaacaatagaagatggaatcctttgtaagggtaaacatttgacctatgataaaacgtgactaagatgagggagagaggaaatacattaagagagtttcgatctttcaaaatgccatacagttttctgcttttctctctgatattaggtatgaggttaatttccaaaatggaatagaatgtggtggtgcctatgtgaaactgctttctaaaacaccagaactcaacctggtatgtaattcccatttctggaatgtggctggacacccactattaccttgtaagaattttgtaattgggccgggtgcagtggctcacgcctgtaatcctagctcccagcactttgggaagccaaggcaggcggatcacgaggtcaggagattgagactatctggctaacatggtgaaaccccatctctactaaaaatacaaaaaattagccaggcgtggtggcaggcgcctgtagtcccagccacttgggaggctgaggcaggagaatggcatgaacctgggaggcggaacttgcagtga

SEQ ID NO: 10664 - DNA, 6000 bp, Homo sapiens
aaggaagggactcgatgtacggaacaggaggcagtggcggctgggagggggctaaaactgtctgcatttgatggccaccatgccaagggaaatatgccttctcttcctcccctggccctgggcattttccttcccaggaactcaggccagttcaaggcccaactgagccccattcaggtgaccacctgggagcgggtagctgccaagggaaatagtgtgcagaggtagagacataccagtggtggggtagggttgcacgggttctcaccctagccctgccacccagtcactcactcactgctgttagccgttggcagttttctcctttcctctaggccttggtcttctcatctgtactattgggcagaaatatgtgacttgagcccccagtggggtgctggattatgaaaacaccctgaaaatgataaatgtatgcatcatcacagactaaagaaatacaaaggagggagtttttgtttaatattggtcatttatatgaagggaatttaaattttcgccaggcacgctacacctaggtttgattggcaaaggatcacagctgtgagttctgaatgctggggtttgatactgtgttctgaccttgctggggtgactgttatactccattagctttgcaggatggacacagggctctttggtcagtggtagtttagagagcctcagagaggtatctcgtggggaggcagggagatggctgtgcatctggaatagttcagccgcttcccttccctcccatctcatcatctgggggaaaagtgctcttggactggtggtgtagcaccgggtgctgggcaggacccagattttgtgtttgtgtttacagttttcttccaaaacttttaaggtgtattccaagattttgcgttctgttcttaacagtctctctgcatttctcccccactcccacttgtctgagcgtaattcctattaggctcaccccaactccatgagtgagaacgcttgcctatttggagagggcctgaattgttgcatgactttggacaagtgcttcctccctctcaacctcagattccccattaggacagtgggactaagaacccttccatgcctgtctgcctacttcccagcattgtcagaaggctctaggagacagtgttatgtgacagtgctttagaaactatgaagcagcactataagacttagagttatttttctcttctggctgcaacagcagggatgggggtggcagggagggtgagtgtgcagctggaaaaggaattcaggaagatgaggaggcaggacagacagaagagccgcccagcgaaaccttcccctggtcacagaggggagcgcggttactctgctcatatgaaggacgcagactcagggaaatgtctgtcttcctgtctttctaatctgaagcttactacatttccagtcctagctgggctatttcttcaataacatgacttccctgtcattatagctcagacagggtaactttttgttttgttttgttttagctgctatttcactttgatccttcaacctcaaactatctcagacaagtccttccttgatgttttcttttctgttccatttgtcccaagccacatgcaggagttatttatcttgcgtcttccaaaaggggaagcaagaagggagatttttccacttaagcctggggaacaagtgaacaactgtgtgaggggaggaacattccacaagctgcctcaaaagggaagactagactcctctggaagttggggttattgtgaagcaataccaaacccccaggtcctttacatttctgttagttttacttcattcactctgtgcaatagggggtgaggttttgtgtctctttaagcccaagaaaggaccattatgaagtgggctcttcctctgcctgtttctgcttcccaaatgctatagtacaagtgaagacatatgatcccagaggagaccatatgtgtcaagaccagaatgtgcttggggtgtcttaagagcattttaaggaccgaggctgccacttcaaagttcacctagtctacccatttcaattgatagatgggggaaccaaggtctagagagaccaaaagacttgatactactgtggtagaacaagaccccctggcatttaatttcaagctgagtatttttctccatgatgccgggttacctcccaccaccatttggtcagttgagaagtcttggaagaaataagggatgatgagcctgacagggaggttttgggagaagaaagagggaagacatggccactgttgctcctgatggaaggttatttgtgggtagagagagcaggtttgttctttgtggctgcaggggagatggggtagacagatcagaaagtttgagggaggcacatttagatcagtaaaagaaagaactttctaaagtcacttgagaatgaaaagccatttagttagtgcaagaaatgaaatgtctccaccacagagcctctgttaggaatagcattttagttttgaatcctcagaggagatactgctccaaaatcccttatagtcatgagagtattagagtctagagcttggcatttagagaatgaggccttaacagttaccagaacagaggtattttctagatctcagctaacatcccctctgcaacacatggaagcatctggatggtttccgtacaggacctaaagaagtgctgtctcttctgggtagaatggagaaaaatgtggccaccctcaagtttccatgggttacattccaagactattgttctttgttttagaatgtggatctcattgtcccaaactggcaagaagttcctgcctattaacttctcccattgcagagggagtaggaaggagggggaggaggcgacagaggaggaagaggagagattgggtttagggaaaaaaataattttagaatatcagggattgaagggaccttgaagatgatctggtttggcattgcccaaacttaactagttagcccatcaccttagttgaatcactttgcaaaaactttaataaatgtattacaaaagcagattttatatcactaccataaatggaaaaaactctgtgtacctttgtcataaatagaaggaaactgtaaaaacaaacacataaaaaaaacaaaacaacttgattcagttccagctggatataacttcctgtggaagctctgagctggaggcttattctctttttgttaaaaaaggagatagatgagtataaaggaggtgtttaagacatcttggcaccaaactgagactttcttctcatataagcagaattgaaagaatattaaatggaaccaacctcctcatgtttttcactatcatttaacttgtaccatctaacattatcttgcacatatcaggaattcagaaggaaatctccataaggaagtctcaccctcactgaactctcaatctctcctccccatagggttcccagcaccatgagggcctggatcttctttctcctttgcctggccgggagggccttggcagcccctgtaagtacctaaatatcatgtcttcttgttttcattcctaccgctagcaccaggggttctgagcctgccagccctggatgctgaaagggaacagggacttccccatttcaagttagtggtcttttttttttcttaagttaggaagctcgggataaaaactgggatgaggaccattgggtggaggtatcagagaagagagagttccatgtaatgttagataaacttcttagtagtcagagcctcccagcaatgaactaggattgctttagaaggaaatgacctctttgtcatatgaggaattcaagcaggcaggagacaggatgtgggggatttctggtaggggtggtattagaagagattcaagctatagagagaggaatgtgttggcttctgaaacagtgagggttgtttggttgtaagcaacagttcaatctgactaaattggggaaggaggggaagatacagaggtagattataatattaaaggccttggggaggactggaaaagggcagctctaggctttgggagttaagaactaatggacagtctctgagatattgctgtctgaatgaatcaactccagcaattttcacatcttgagagaatgtgccaagaaggtttttataaattcaaaaaatgagagccaatctggctgagcttgggtcctgagccagcttcttggccaggtgagagtggggccccttgattgacagacagttcctcgaagcattgcatgcagggacaggagtagttatccacagctcatctggaagccttcacaaggagaggaggaagaaacagggcaggcaaaaagtgcaatttctttcaacctgtgatcccctcatcctctgtttactaagaagtgggagtgatggcagaccctggcaatcttgatcaggctggtagatggaggcaaaagtttctcaaagttggcattaagttttgaagcagctccagccagctaagggcctcaaagttgtgtgttttcttgcttcctcctactccaagttgaaatggcaagaaaaattgcctaataatactactaataatatcacactgtgaggaagatgatgacatctgttaaaattcacagtgtcatcccctctggatgtcaattttcctatctgtaaagtgaaagaattggtctggatcagtgattttcagactttataagaattcaaagcagcagaaatacttttccaagctaaatcttaggtagacacctaggatataaaatatataaaatgggagctgcttgagtgttccacggtgctcacatgactggcttcttctttgttctgtccctcaccatggcagtccatgaggcacaactttggggatctccagtaagctgctctccaagctcccctagcctgtatccgaggccacaggcactttggaggtgaagctggccttattcctgacccctctgaacgctactttctctttccaacagcagcaagaagccctgcctgatgagacagaggtggtggaagaaactgtggcagaggtgactgaggtatgtgggcagtgaccgcagccccttagcccctctctacctgtatctgtgccctgagaaattagggcggatgctgtgggtctcaatgctagagtggggcattcgtctccctgtacacacatagcatagatgcaaaccctgagtatatcccacatcctgacacactcctgaatgcttcccaaaccttcaacggaaccctacgtttggggaccaggaccttaaaatttttgttttttaagctatgcaacagttgttcttccatgattacccacagtttttgcaaacgtaaaacagaggaggccgggtgcggtggctcatgcctgtaatccctgtaatcctttgggaggccgaggcaggcaattcacgaggtcaggagttcaagaccagtgtggccaacatggtgaaaccctgtctctactaaaaatacaaaaaattagctgggcgtggtggcgggtgcctgtaatcccagctactcgggaggctgaggtaggagaatcgcttgaacccgggaggtggaggttgcagttagccaagatctcgccactgtactctaccctgggcgacagcatgagactccatctcaaaaacaaacaaacaaacaagcacacacacacacacacacacacacacacacacacacacacagaggaaaggggagatgcttgggtgtggctggcaggggtggaggcttgacaccctcttgtgaacatagatctcagtcaatttagaaagtttactttgccaaggttaagaatgtgcctgtgacacagcctcaggaagttctgagacatgtgtccaaggtggtcgggagtacagtttgctttcatacattttagggagacacgagacttcaatcaacatgtctaaattgtgcattggttgagttcgctaaggcaagacaacttgagaagtgagggcttccaggttagaagtagataagagacaaatggttgcattcctttgagtccttgatcagc

SEQ ID NO: 10665 - DNA, 6000 bp, Homo sapiens
tcccagatactcgggaggctgaggcaagagagtcgcttgagcctgggaggcagaggttgcagtgagctgagatcatgccactgtactccagcctgggcaacagacagagtgagactctgtctcaaaaaaaaagaaaaaaaactgaaactcttttgtgcatcactcttttcttccacataaactttcttaaaaatcaaatatggggatatggcccacagctctgagtagcttcatccatctgtatggccccagctgggcacagcagtaaggccaactgaaacgacgtttgccctgaatttctcggtcacttgacaacatgtatctaattgatacataatatttgagccctgatataatagaatttaattgcacagttacatggaaacagacttgacgtttctgagaagactgatgtcctggcgtggtgggggtggttggtttctaggaagaagacaagtggttggtggtgaatgctggcaggggctggtgaagtctccccaggagggagacagaatccatgtctctttagaggcccttcaggatcagcccttttataccagatctgctggtttgagagcccagagcctcagaggttagatctgaggcccaaggttttggccaggattagagagtagcctgtgaggcagagggcaactggcagagctgttggtgtaagagggtgcacgcctgaagctttggggtgtaaagggtagaccagaggcaggacagtcaaggagttatggtctggagtggcagctggctgggaattggggagtgtttcagatcctttcaagtaatgtggtctggtagagcttggaggattggtgggaccatgcctttttctcactggtttgtgtcctggttccttcccagagcctggcagagagcaggtgtgtgatacacgtcgtcaggtgactgaccgaggaattcagggcaaacagatcatctcaatttgccttgctgatgtgccagctgggattacgctgatggatgaagctcttcagagctatgggcaatatctacatatttgattgtcaagaaacttcgtgtggaaatagcttcaaacttacacaaattgcaagaataaaaaatagtataaggatattcgtacacactctctttactcagattcacctgttaatattttgctccatttgctctctatgtgtgcagagtatgtttttgttctgaaccatttgagaagttgcatctatcctggtcctctacttctcaatacttcagtgtgtattacctaagaattggaattaatcagttatcactgatactttaacctactgtccatattccacctttgtcattttacccaataacgtctttttaaaaaaagttttttgaggtttcattgacatacaattgatatcaatatgtgcaaagaactgcatataaagtgtacaatttgataagttttgacatatatgtgtgtgtgtgtatatatatatatatatatatacctgtaaaagtatcaccacaatcaagataataaacatatccacccttctagaagcttcctaatgcccctgtgtagtaactaccctactgcccttctctgcctccatccccaggcaacaactgatctgctttctgtaatatagattagtttctattttcggcagttttatgtcaatggaatcacagtgtatgtgctcttttttgtttttcccaaaaagacccatattgtgtaattatttggagattgtgttgtgtatgtcagtggtttattcagttttattgctgaatattattccattctatgagtaaaccacaatttgtttatctgtatttccctgttgatgggcctttgggttatttccagttttgagtgattatgaataaagttaccatcaacactcctgtgtaggtttttgtagggacatggctgaaagtagaaagaaatggggcatgcaggagagactgggcttggttataacagcctgttatccctggggaactagctcactcaccagaggacgttaggaaggatctgcccctgccccccttgtgatccaaacacctaccactagaccccacctccggcagcaccaccacacaggggatcaaatcccaacatgtgtttcagagaacaaaccatattcaagctatagcatagctacgtaattattataacactattaataagaccatctttgccttgggaattttaagtagcacctttattacatattagatttttttgtgtaatgagtctgtttctggagcttaaattctatttcactggatggtctgtttatttatgtaccagtaccacgcagttgtaattatggaggttttgtagtatgccatatatatatatatataataaaaaaaaatttttttgagacagagtctcactctcttgcccaggctggagtgcaatggcacaatccaatcacagctcactacagcctcagcctcccagactcaggtgatcccatctcagcctcctgagtagctgggaccacaggtgcgtgccaccatgcccagctttttttttttttttttttaattgttacttgtagagacagggtctccgtgtgctgcccaggctattcttgaactcctgggctcaagtgatcctcctgtattggcctcccaaagtgctgggattgcaggtaggagctactgcatctggccagtatgcagtattttcatatctggtagggctgagtccctcctcacagcttatttttattgttttcctagtttttcatgtgaactttactgtcagttcgtctagctccataaaaaggtatttttattgggatttttgatgatgctgaaatgtcctgaccaagaacaagggatattcagatgttcttttgtgtctttcaggaatgatagttttgttcacataagttttgaatgtttaagtttatttaagtttatttctaaatattttctcatttctctggcttttgtaagtagggttttctcatccatgttttcttctcatgagttatttgtggatatgaaggctatccattagtatatgttgatttttatattacacttccttgctcagttcattattgattctttttgagttttccaggcatattctcacaagtaaagataatagaaatagtttgcttcctttccacttctgctttgaatttttttttcttggttcatttgcattggctgcttcctccagcaaaatgttaaataaccctggagatgatgggcaacttcgttttgctcctgacattcgtggggtgcctctggtgcttccctgttggtaaggggttaactgtagccctgaggtgggacatttgattttaaaaatcagtcatcttggggcgcttaggttagaggaatggtaggcagatgctgtcactccttgcccctcccctcctccttcccacctggaggggaaatgaaatctgacaggtagaaagaggggagttggggttctttttctctctccctccaccagcatcactctctgcctctccctcaaaaatacgttcctgggtcaggatatatgttgactccctagagagctctggagtcaacctcctggccttcctccaccctcactcttggccttttcctgcccccatttcctctacctgtggggcatggagccacgagcctttgtgtgacggtttgctttctctctcctgtctttaggtgcatggctgcctcctaatcccatagtccagaggaggcatccctaggactgcgggcaagggagccgggcaagcccagggcagccttgaaccgtcccctggcctgccctccccggtgggggccaggatgctgaagaagcagtctgcagggcttgtgctgtggggcgctatcctctttgtggcctggaatgccctgctgctcctcttcttctggacgcgcccagcacctggcaggccaccctcagtcagcgctctcgatggcgaccccgccagcctcacccgggaagtgattcgcctggcccaagacgccgaggtggagctggagcggcagcgtgggctgctgcagcagatcggggatgccctgtcgagccagcgggggagggtgcccaccgcggcccctcccgcccagccgcgtgtgcctgtgacccccgcgccggcggtgattcccatcctggtcatcgcctgtgaccgcagcactgttcggcgctgcctggacaagctgctgcattatcggccctcggctgagctcttccccatcatcgttagccaggactgcgggcacgaggagacggcccaggccatcgcctcctacggcagcgcggtcacgcacatccggcagcccgacctgagcagcattgcggtgccgccggaccaccgcaagttccagggctactacaagatcgcgcgccactaccgctgggcgctgggccaggtcttccggcagtttcgcttccccgcggccgtggtggtggaggatgacctggaggtggccccggacttcttcgagtactttcgggccacctatccgctgctgaaggccgacccctccctgtggtgcgtctcggcctggaatgacaacggcaaggagcagatggtggacgccagcaggcctgagctgctctaccgcaccgactttttccctggcctgggctggctgctgttggccgagctctgggctgagctggagcccaagtggccaaaggccttctgggacgactggatgcggcggccggagcagcggcaggggcgggcctgcatacgccctgagatctcaagaacgatgacctttggccgcaagggtgtgagccacgggcagttctttgaccagcacctcaagtttatcaagctgaaccagcagtttgtgcacttcacccagctggacctgtcttacctgcagcgggaggcctatgaccgagatttcctcgcccgcgtctacggtgctccccagctgcaggtggagaaagtgaggaccaatgaccggaaggagctgggggaggtgcgggtgcagtatacgggcagggacagcttcaaggctttcgccaaggctctgggtgtcatggatgaccttaagtcgggggttccgagagctggctaccggggtattgtcaccttccagttccggggccgccgtgtccacctggcgcccccactgacgtgggagggctatgatcctagctggaattagcacctgcctgtccttcctgggcccctccttgccacatcatgagctgaggtgggaccacagtccccaggctgcatcggcctgcctgtgtttccctcttaggtgcatttatctttttgatttttccgagtggcatttaagtgcacaaatgataacaagaggattattctcccgttctcaagggagtcagatcaggggaactattctagggtatgttgcggggtattaagcaggaaaccactgtgtggtggggggcactgggcttgttggggccagaaatgtccacgtcctgagctttctcctggagcatgtgcagagagtttggcaacgttcgctctcttgaccagaccccttctccctgacctggctcttccagccagggcacgagccctccttctatacctgctccccttcccccagtggggactgagttatgggagaaggggacatatttgtggccaaaatgatactaaccaaaggggcttccttgtcagggcctggtggagttggtgggtcatcggggctcactgcctcctgcccttctctcctgtctgacccccacttagcccttctctccttgcagcctagcagtttatagttctgagatggaaagttgaagggggcaagcaagacctctcctcagcccatgcccagctgtcaggagagaggtgcagggaggaaggccttgtgctgggacaacctctctcttgccttacctcagagagggactatgccctgacccctcctttctgaaaatcagtgccctccctgttgctctaggaggctcctgctggcttggtagaagacagaattcgatctgcctgtccctttttcccctggggtttgacacacaggctcctctcagcatgaggtggagcagtgaccagg

SEQ ID NO: 10666 - DNA, 6000 bp, Homo sapiens
tatcttctacttgttttctcccccaccttgtacctgtactttctcaagcccaaaaatgaaaatttacctgctaccaaccacatcatcttgtgcatctgtgtagctcagtttttatttctttagatctgtggtcctccgtggaaagagagccactaccccaagacacatctaatataatacacagggcgcttacgtggttagaaaagaagagataagccgggtgcggtggctcactcctgtaatcccagcactttggaaggccgaggcgggcagatcacgacgtcaagagattgagactatcctggccaacacggtgaaaccctgtctctattaaaaataacaaaaattagctggatgtggtggtgcacacctgtcatcccacctacttgggaggctgaggtaggagaatcacttgaacccaggaggcggaggttgcagtgagccaagatagtgccaatgcatcccagcctggcgatagagcaagactcatctcaggaaaaaaaaaaaaaaggagcttgttttggccaggtgcagtggctcacgcctgtaatcccagcactttgggaggctgaggcaggtggatcacctgaggtcaggagttcgagaccagcctggccaacatggcgaaaccctgtctatactaaaagtacaaaaattagccgggcatggtggtgggtgcctgtaatcacagctactcaagaggctgaggtgggagaattacttgaacctgggaggcggcggttgcagtgagctgagatggtgccactgcactccagcctgggcgacagagggagaatccatcacaaaataaataaataaaatatataaattttaaaaagtagcttgttcttagtttaatattctttttgagttctaaaacgctaatttgaaaacatgtctattgatgatatttgagcaaccgtatccatattaagccttaatatgagaggaattatcttctgtgttaatttttttttttgagacgaactcttgctctgtcacgcaggctagagtgtagtggcgtgctcactgcaacctccacctcctgggttcaagcagttctcctgactcagcctcccaagtagctgagactacaggcgcccgctatcgctcccagctaatttttgtatttttagtagagaagagtttcgccatgttggccaggctggttgtgaactcctgacctagtgagccacctgcctcggcctcccaaagtgctgggattacaggcgtgagccacggcgcccggccatctctgttatttcattgtaatgttttaacgggtaccccctgtaaattagtgtatgaaagggcttttgtctgttgtaaagcactttacaaatgcaaaagtttgttggaaattgtatttgaatgccccacatctgtgtaaccaatcctctctatatgaggatgttgtgtatgtttcagttttattttgaaattttccagaaatggaatcttttaactgattttagggaaaccctttaatctctctaggctgcctttctttatctatgaaatgaaatagtaagttctttttagctctgcgatttaaaagctttaattttaaatgagagagtggttagtgatcttcatgaagtttgataggtggcaatacatttaactgattttgctctttatgtgtagatcatggaagggaagtggttgctgtgtatgttactggtgcttggaactgctattgttgaggctcatgatggacatgatgatgatgtgattgatattgaggatgaccttgacgatgtcattgaagaggtagaagactcaaaaccagataccactgctcctccttcatctcccaaggtttgaaatggtctttgaatctattccttttacgtcttgagatgataaaattatgaagatacccgggtgcagggaaatgtagtctcaactactcaggaggcctaggacaggagtgtgagtccagccttggcaacacagggagatatcatctctaataaaatataaaagaaaaacatggtgaagataaatttggaacgttttcaaagggaaagcaaaattcgtgaaaatacttattgatctctctggcagcctttgtcttgctagaggccaattatatgggttgaatttgaaggccagctatgaaatttttgtgacagttgaaagcaaaccaggagaatagattctagataaaaaggcatgttgctgaaaatttaaatttttaattcatttatgtatttaacacaggttacttacaaagctccagttccaacaggggaagtatattttgctgattcttttgacagaggaactctgtcagggtaagtgttttccagagaaatatatgttagaggcagacatgtaaataagatgggatagtagattcctttttggatagcatcttttatagtgaaatgtctaactttattttattttatttatttattttttgagacagaatttcgctcttttgcctgggctggagtgcaatggcgtgataccggctcattgccacctccgtctcctgggttcaagtgattctcctgcctcagcttcccaagtagctgggattataggcatgcgccaccatgctggctaatttgtgtgtgtgtgttgttatttttttagtagagatggggttttgacatgttggccaggctggtcttgaactcctgacctcaggtggtccacttgccttagcctcccaaattgttggcattacaggcatgagccaccgcacctggcctgaaatttctagctttaatatcttcagtgttaacatccatgcaggaaaatagtcttttggaatttgtggtttttacttccacttctttccctcccccactctaccctatattttgttctttgattgaggaaaaaaattttctcttgatgttaaaacatcagtggaattatctcataggtttggtactttttcatataggtttgtgagttgaagataatgtattatcattagttgtgtgacagatttaaaggttggaagtagagtggttaaataggctaagagcagaataggtcctactttaatgagtatttacataattttccctcacaagtcaactgtcattttaagactgattttgggatttgttatttacaggtggattttatccaaagccaagaaagacgataccgatgatgaaattgccaaatatgatggtgagaatcccatttggtttagatataatagcagatagaggtttgacatgttgtctccatggcatttcctaagactagtttaaaaggacatagtaggctttaagatttttccagccaggtgcggtggctcacgcctgtaatcccagcactttcggaagccaaggcgggcagatcacgaggtcaggagatcgagaccatcctggctaacacagtgaaaccccgtctctactgaaaatacaaaaaattagctgggcgtggcagcgtgcatctgtagtcccagctgctggggaggctgaggcaggagaatggtgtgaacccgggaggccaagcttgcagtgagccgagaacgcgccactgcactccagcctgggtgacagagcgagactccgtctcaaaaaaaaaaaaaaaaaaaagatttttccatggaagttttgccacctttgtgtgttgcctaattttttttttttttttttttttatttaaggttcaggggtgcatgtgtagccttatatttaataggattagatctgtttaatcacctgtgctactgaatgttggaaatttctagacagtagtataatacactacagttttaaaaagccatatctgaataatatttgccaaataaagtgtgtttatttattatttatttacttttttgagacggagtctcattcttgccacccaggcttctggaatagagtggcgtgatcttggctcaccgcaacctctgtttcttgggttcaagcgattctcctgcctcagcctaccgagtagttgggattacaggtgcccatcaccacgcccggctaatttttgtgtttttattagagatggggtttcaccatgttggccaggctggtctcgaactcctgaccttgagtgatccgcctgccctcagcctccctaagtgctgggattataggtgtgagcgaccacggctgccccagtataatatatttatgcaactaggaggtgttttttttggcatttaaaggaccttcagaggtagagttaagcagtggaacttttttgtgttgtcttgtaggaaagtgggaggtagaggaaatgaaggagtcaaagcttccaggtgataaaggacttgtgttgatgtctcgggccaagcatcatgccatctctgctaaactgaacaagcccttcctgtttgacaccaagcctctcattgttcagtaagtgaaatgcttgttggataaaagctttctgcaaagggtaatcttagaagacattatgtaacttttactctatgttaaaaaattatgagattatataagtggtggtagggatttttgggtgaatttaaacaccttgtaattaatagtttttcctggctaatgcattattttgaaagaaactggttacttattttcctgactctaaataacttgtagattttgcagaacaaatttaccggaaatctgcattaatagtttttgtaattaattaattacaaaactagtaattaatagtttttcctgcctaatgcattattttgaaagaaactggttactcattttcctgactctaaataacttgtagattttgcagaacaaatttactggaaatctgcattaatgttcaatttaattttatttatttttgtggcatttgataactattcaaaaacaatagaagatggaatcctttgtaagggtaaacatttgacctatgataaaacgtgactaagatgagggagagaggaaatacattaagagagtttcgatctttcaaaatgccatacagttttctgcttttctctctgatattaggtatgaggttaatttccaaaatggaatagaatgtggtggtgcctatgtgaaactgctttctaaaacaccagaactcaacctggtatgtaattcccatttctggaatgtggctggacacccactattaccttgtaagaattttgtaattgggccgggtgcagtggctcacgcctgtaatcctagctcccagcactttgggaagccaaggcaggcggatcacgaggtcaggagattgagactatctggctaacatggtgaaaccccatctctactaaaaatacaaaaaattagccaggcgtggtggcaggcgcctgtagtcccagccacttgggaggctgaggcaggagaatggcatgaacctgggaggcggaacttgcagtgagccgagattgcgccactgcactccagcctgggcgacagagcgagactccatctcaaaaaaaaaaaaaagagaattttgtaataattgtgaaaataaaggcttcctcccctgctgtttaactcttttgatgagttgggaaaattgactttgacgctaacgtgctttttatttgaagtgtaaattacaaagttgttaccaactgtttttatctgaatttctggttttgcttctgtgtaagttttagttttggcaagcttatttctttgttttatgaggaagcaataactgtctagatgtgtgcattacttttttttagacacttaaacgttattttaaatttactgatgattgctggttattcctttttactaaacaaacttgtagttagcttttcctttaactgtcactaatatatttggaattttataagaggaattatcatacacttttgaaacgttgcttttgaacactttgagtacagtgacttcaaataatccttttttgtttttgaaggatcagttccatgacaagaccccttatacgattatgtttggtccagataaatgtggagaggactataaactgcacttcatcttccgacacaaaaaccccaaaacgggtatctatgaagaaaaacatgctaagaggccagatgcagatctgaagacctat

SEQ ID NO: 10667 - DNA, 6000 bp, Homo sapiens
gagggcctggctcttggcttcctttattagcctctaggcttgttttcctctctttgggcttgtttaccagcaacatgtgtttttggagcccttgtttccaagccaaatagtgagagtgagatgcttggctggtatcagctgcccaagtaagaggccagccctgggcctggtcttcgtcactgtatcctctggaggctggacttacccagaccaacaggggcaatatgtcctttgttccacccaaacacccctttctccctgggcttataaagcactggaattttgcactgaattctttcgggggatggagattctgggaacctcggactttataagatgctcttcccaacgacaacattgcttacctctttatttggattctcttgtgtaaatcacccatgagcctttaaagattggtatgttattgtttccattttacacattggggaacaaattgaggccccaagaggtaaagttgatttctaaaggtcatacaattactaagtggtgagccaggatttgaacctgtatattctggctccagagcctatgagcttacctttatgctatactgcctcatagtttattatcactctgtctaccatggtagccactagccacatgtggctatttagatttaagttgattaaaatagatgggcatggtggctcacgcctataatcccacctctttgggaggctgaggcgggcggatggcttgaggtcaggagttcgagaccagcctgggcaacataatgaagccccatctctacaaaaaagaaaagaaaagaaaaattcgctgggtgtagtcacaagtgcctgtgatctcagctactcgggaggctgagatgggagaatcacttgagcccaggaggcagaggttgcagtgagctgagattgcgccaaccacactccagtctgggtgacagagggagaccgtgtctcaaaaaaaaaaaaaaaaaaaaaaaaaaaagatgttttccactattctctattgcagtatttcaacaaggtatgggttaagtaagatattttggattggcctcagtccttttgcataaaatttttaaataaaaaaattggttaaaatgaaatacaatttaaaactcagttcttcatttgcactggcaacatttcaagcattcagtaaccacttgtaaccagtagctatcatagtggaccacgtagatatagaatgtgttcatcatcttgggaagtcctgttgggttgcattactccataagttctttccacccaaataagatttaatgatggcaactcagtttctttgcttcacatcctaagtctatcattctgagacccacagtccatgattctatgattctgaggtatcccccctgttctaacgttcagtggctttttaacgtccaaggagagcccaaaggaggccctttatgttttgagggacaaacctgggggctggctgtacttttccatcctcagagtctttccagagagagaagtgacctcagcttcaggtcctgctggcagccaaggacgggttttcagcagtctccagagcaaataaaggcaaaaggaagggactcgatgtacggaacaggaggcagtggcggctgggagggggctaaaactgtctgcatttgatggccaccatgccaagggaaatatgccttctcttcctcccctggccctgggcattttccttcccaggaactcaggccagttcaaggcccaactgagccccattcaggtgaccacctgggagcgggtagctgccaagggaaatagtgtgcagaggtagagacataccagtggtggggtagggttgcacgggttctcaccctagccctgccacccagtcactcactcactgctgttagccgttggcagttttctcctttcctctaggccttggtcttctcatctgtactattgggcagaaatatgtgacttgagcccccagtggggtgctggattatgaaaacaccctgaaaatgataaatgtatgcatcatcacagactaaagaaatacaaaggagggagtttttgtttaatattggtcatttatatgaagggaatttaaattttcgccaggcacgctacacctaggtttgattggcaaaggatcacagctgtgagttctgaatgctggggtttgatactgtgttctgaccttgctggggtgactgttatactccattagctttgcaggatggacacagggctctttggtcagtggtagtttagagagcctcagagaggtatctcgtggggaggcagggagatggctgtgcatctggaatagttcagccgcttcccttccctcccatctcatcatctgggggaaaagtgctcttggactggtggtgtagcaccgggtgctgggcaggacccagattttgtgtttgtgtttacagttttcttccaaaacttttaaggtgtattccaagattttgcgttctgttcttaacagtctctctgcatttctcccccactcccacttgtctgagcgtaattcctattaggctcaccccaactccatgagtgagaacgcttgcctatttggagagggcctgaattgttgcatgactttggacaagtgcttcctccctctcaacctcagattccccattaggacagtgggactaagaacccttccatgcctgtctgcctacttcccagcattgtcagaaggctctaggagacagtgttatgtgacagtgctttagaaactatgaagcagcactataagacttagagttatttttctcttctggctgcaacagcagggatgggggtggcagggagggtgagtgtgcagctggaaaaggaattcaggaagatgaggaggcaggacagacagaagagccgcccagcgaaaccttcccctggtcacagaggggagcgcggttactctgctcatatgaaggacgcagactcagggaaatgtctgtcttcctgtctttctaatctgaagcttactacatttccagtcctagctgggctatttcttcaataacatgacttccctgtcattatagctcagacagggtaactttttgttttgttttgttttagctgctatttcactttgatccttcaacctcaaactatctcagacaagtccttccttgatgttttcttttctgttccatttgtcccaagccacatgcaggagttatttatcttgcgtcttccaaaaggggaagcaagaagggagatttttccacttaagcctggggaacaagtgaacaactgtgtgaggggaggaacattccacaagctgcctcaaaagggaagactagactcctctggaagttggggttattgtgaagcaataccaaacccccaggtcctttacatttctgttagttttacttcattcactctgtgcaatagggggtgaggttttgtgtctctttaagcccaagaaaggaccattatgaagtgggctcttcctctgcctgtttctgcttcccaaatgctatagtacaagtgaagacatatgatcccagaggagaccatatgtgtcaagaccagaatgtgcttggggtgtcttaagagcattttaaggaccgaggctgccacttcaaagttcacctagtctacccatttcaattgatagatgggggaaccaaggtctagagagaccaaaagacttgatactactgtggtagaacaagaccccctggcatttaatttcaagctgagtatttttctccatgatgccgggttacctcccaccaccatttggtcagttgagaagtcttggaagaaataagggatgatgagcctgacagggaggttttgggagaagaaagagggaagacatggccactgttgctcctgatggaaggttatttgtgggtagagagagcaggtttgttctttgtggctgcaggggagatggggtagacagatcagaaagtttgagggaggcacatttagatcagtaaaagaaagaactttctaaagtcacttgagaatgaaaagccatttagttagtgcaagaaatgaaatgtctccaccacagagcctctgttaggaatagcattttagttttgaatcctcagaggagatactgctccaaaatcccttatagtcatgagagtattagagtctagagcttggcatttagagaatgaggccttaacagttaccagaacagaggtattttctagatctcagctaacatcccctctgcaacacatggaagcatctggatggtttccgtacaggacctaaagaagtgctgtctcttctgggtagaatggagaaaaatgtggccaccctcaagtttccatgggttacattccaagactattgttctttgttttagaatgtggatctcattgtcccaaactggcaagaagttcctgcctattaacttctcccattgcagagggagtaggaaggagggggaggaggcgacagaggaggaagaggagagattgggtttagggaaaaaaataattttagaatatcagggattgaagggaccttgaagatgatctggtttggcattgcccaaacttaactagttagcccatcaccttagttgaatcactttgcaaaaactttaataaatgtattacaaaagcagattttatatcactaccataaatggaaaaaactctgtgtacctttgtcataaatagaaggaaactgtaaaaacaaacacataaaaaaaacaaaacaacttgattcagttccagctggatataacttcctgtggaagctctgagctggaggcttattctctttttgttaaaaaaggagatagatgagtataaaggaggtgtttaagacatcttggcaccaaactgagactttcttctcatataagcagaattgaaagaatattaaatggaaccaacctcctcatgtttttcactatcatttaacttgtaccatctaacattatcttgcacatatcaggaattcagaaggaaatctccataaggaagtctcaccctcactgaactctcaatctctcctccccatagggttcccagcaccatgagggcctggatcttctttctcctttgcctggccgggagggccttggcagcccctgtaagtacctaaatatcatgtcttcttgttttcattcctaccgctagcaccaggggttctgagcctgccagccctggatgctgaaagggaacagggacttccccatttcaagttagtggtcttttttttttcttaagttaggaagctcgggataaaaactgggatgaggaccattgggtggaggtatcagagaagagagagttccatgtaatgttagataaacttcttagtagtcagagcctcccagcaatgaactaggattgctttagaaggaaatgacctctttgtcatatgaggaattcaagcaggcaggagacaggatgtgggggatttctggtaggggtggtattagaagagattcaagctatagagagaggaatgtgttggcttctgaaacagtgagggttgtttggttgtaagcaacagttcaatctgactaaattggggaaggaggggaagatacagaggtagattataatattaaaggccttggggaggactggaaaagggcagctctaggctttgggagttaagaactaatggacagtctctgagatattgctgtctgaatgaatcaactccagcaattttcacatcttgagagaatgtgccaagaaggtttttataaattcaaaaaatgagagccaatctggctgagcttgggtcctgagccagcttcttggccaggtgagagtggggccccttgattgacagacagttcctcgaagcattgcatgcagggacaggagtagttatccacagctcatctggaagccttcacaaggagaggaggaagaaacagggcaggcaaaaagtgcaatttctttcaacctgtgatcccctcatcctctgtttactaagaagtgggagtgatggcagaccctggcaatcttgatcaggctggtagatggaggcaaaagtttctcaaagttggcattaagtt

SEQ ID NO: 10668 - DNA, 6000 bp, Homo sapiens
cctgctaagattccagatgaagaggccacaaaacccgaaggctggttagatgatgagcctgagtacgtacctgatccagacgcagagaaacctgaggattggtaagaacttcagttaactttttttaattacctggtttttttgtttgtttttttttttgagatggagtctcactctgtctcccaggctggagttcagtggcgcagtttcggctcactgcaactttcacctcctgggttcaagtgattctcctccatcagccttgcgagtagctgggattacaggtgtgtgccaccacacccggcaaatttttgtattttttgtatttttagtagagacggactttcaccgtgttggccaggctggtctcaaagtcctgacctcaagtgatctgtctgccttggcctcccaaagtgctgggattacaggcgtgagccaccacacccagcataagttacctgtttttattgaagtcaatcttaatacttaaatatagccaagttccctaatttcagggtagaatttgacaattttaattatattttcttcttttttaaaaaataaatttttcctgaaaaactgttattactggaaatacaggagaagctggtctgggatactgtgaaaacatttcagcaggatcttggcagccctgggccagccagctgttcatagtcctgcatcacagaacctgtttataatttgttgtttgtacctccgtagggatgaagacatggatggagaatgggaggctcctcagattgccaaccctagatgtgagtcagctcctggatgtggtgtctggcagcgacctgtgattgacaaccccaattataaaggcaaatggaagcctcctatgattgacaatcccagttaccaggtttgtgcctcttgatggttgagttgctttcattaatctgtttgtattcagatagaagttttatctagagtaaggctgccaggttggtcattatattcaagctgttgaattaaaagcagaaagtagacttcctaagttgaaagagagcttaatgggttaggtattgcaaagataaacctagaaactggagtgaataactttctttaactttatttatttatttatttatttatttatttttgagatggagtttcgctcttctacccaggctggagggcagtggtgtgatgtcgcctcactgcaacctctgccttccggtttcaagcgattctcttgcctcagactcccgagtagctgggattacaggtgcctgccaccacgcctggctaatttttatatttttagcagagatggtgtttcaccatgttggccaggctggtctcgaactcctgacctcgcgatccgcccacctcaacctcctaaagtgctgggattacaggcgtgagccactgcatctggtcaactttctttttttgagactgagtctcactctagtggccaggctggagtgcaatggctcagtctcggcacactgccacctccacctcctgggttcaagcaattctcctgactcagcctcccgagtagctgggagcacaggtgtgctcacaggtgtgctcacctcacctggctgattttttgtatttttagtagagacggggcttcgccatgttggccaggctggtctcgaactcctgacctcaggtgatccacctgccttcgcctttcgaagtcctggggtttcaggcgggagccactgtgcccagccaagaataactttcatagttgctttgtaactatatttaaaaacaaaagagaaatggaaaactgttgatttgggtaccctgctcttgggtgctagggttgcttcagccataggatccacagctgagtctggacaatctgtgatgtggtgggtagaggactgtggtttgagtcagcatcttgactacatcaagtcagctcactgcttggcctcaatgcttgcaactataaaaagactgaggcccaaaagagatggtaaggatacaagtagtaaggttgtgaggctttaggcctcatgcaaaaatgtacaccctcagacctttgttccttttatctttctagccaagtaaaattatttataatctctacaaagagtggcaattaaaattatttataatcattaatttctactttatttatatacaaatactaatatatgtatatacatatacagaaacaggagaagctggtctgatactgtgaaaacatttcagcaggatcttggcatagtatatgtatatatacatatactaatatatgtttttctgtttgtaaattttttatttttttcctcatagtcgttaaagatgttatgtgaatgtatttttaattgtgtagtcaaacaataagataaaagttttactttaaaaaagttgccctttaggctgggcgtagtggctcacgcctataatcccagcacttgagaggctgaggtgggtggatcacctgaggtcagccattcgagaccagcctggccaacatagtgaaacaccatctctactaaaagcacaaaaattggcctggtatggtggcacacacctgtagtcccagctgcttaggcacgaggctgaggcacaaggatcacttgaacacaggaggcagaagttacagtgaaaaagaagttgccctttagttgttctcctgttggtggccatttaggtggattgtcacttttgctttcagagtcactgctgctgtaataatccttgtacatgtctgggtgtatgttgtgagtatttctctaggtagttatctagaagtgaattgctggttgatgatcatgtgcgttttattttaaatcaccactgaagaagtacgtactgacttatgctcccactctcattagcagttgctaagagtggaggctgttgaatgggccaggaacttgaggggttggtttggaccaaggtcatgggtgacagtagaaattggaagtagttggaatcctgcagtcttagaggcagagtgcgtaaaataatctgtagcatttgttatttattttcctgttgcttatttcaagtttcatgaagttggcatttctctccattgttcatgcaaaatttctcttacggtagattcaccataaacttttgttgatcattatctgaaatgattttctgaaacatttttttttctagggaatctggaaacccaggaaaataccaaatccagatttctttgaagatctggaacctttcagaatgactccttttagtgctattggtttggagctgtggtccatgacctctgacattttttttgacaactttatcatttgtgctgatcgaagaatagttgatgattgggccaatgatggatggggcctgaagaaagctgctgatggggctgctgaggttcgtgtttgctgcttgtgcatttgtgtctgttattgtaaggagctgttattttgtgaaagtctgtgttaaggttttttttcttcatttggcaatattggcataaaaagtataaccatatgcctgcaaaagacacaatattgggttttggggcatgatttcattagtctaatgtagtggctttagagtctgtttgtgttcagggttttttttttattatttgtctgggtatatatttcgaaatttgtcatttaggctatattttaatacactcttatatgttgaatctcggtttacactacatacagaattttcaaacaactggtcatgtggccgatttaagaattggagagccagggatactgagataagaaattcactggatcctgaggttaagggagccttttgcaggtgatgtagaagccagcttttgcacctatgagagtgaaatcatcttgattataaggagagcaagaggatggaggctttctctaatttcttttttacattttatgagcattttctctgaaaaagaaggtcctgcgtagtgccatgccataactgaactgcagaaaaacagcacggcctatgtttggtgtcaaaagctggaactttcaatcagccctgtcttgtttttcagccaggcgttgtggggcagatgatcgaggcagctgaagagcgcccgtggctgtgggtagtctatattctaactgtagcccttcctgtgttcctggttatcctcttctgctgttctggaaaggtaggaagtttttttttttagaatcaattttagagacatcactctagtgattattaaaaataactaagatatgttgcctgaggttttctttgtagtggctcagtaatgaccaagccatgtttggtgttgacttcagaaaccttacttactgttcctcagtggccgtttattgtgcccagatgggagcaggatttatagccccttggttgctattattatttatcctaatctgttactctccatagtgttcggcagcaactttctaaaaaaaaacaataaacttagataccaaactagccacttgggcaataatcagctttgcctgctggcatagctatttctattctttgtaattcagtctttgattcctcattatccattctgccttcaccttccccactctcaaaacagtatgttggggtaccacagccttattgttagtttttcttgtttagcctttttttttttgcatgctatcataaaaaaagaaagtcttattttggactctacttctgctaaatgaggattatgcttcatctggcattcatagcactttgtaactggatcccaagttccttttccagcctcagcctctgccactattctgtgtatcggtgcctcagtcaccttgacttttttgacctttattttcctgcctggcccttttgtttttattgttctaccttgaaacacacaagcacatgtgcatacacacacgtacatacacgctcttcagggtaggaattacatcctattcgtttctgtatatctatccctgtatacagcctggaacagaactttgcctgtaggcattcaggaattatataacataatacatgaacatgtaaacaaaattgtactttggggaacatttcagaaacagaccagtggtatggagtataagaaaactgatgcacctcaaccggatgtgaaggaagaggaagaagagaaggaagaggaaaaggacaagggagatgaggaggaggaaggagaagagaaacttggtaagaaacagagtccagaaaatctgctttaagccaagaccctacgatgttgttaaacctttacagtcaagttaaggattgtttttagccaggcgtggtggctcaagcctgtaatcctagcactttgggaggttgaagcaggaaaatcacttgagcccaggagtttaaggctgtagtcagccaggatagtgccactgcactccagctgagcaacagagtgagaccctgtctctctctctctctcttttttattttttaagacaaggtcccactctgtcactcaggttggagtacagtggcacagtcacagttcactgcagccttgaccttataggttcaagtgatcctcctacctcagcacccctccaagtagctgggaccacaggcatgcgctaccatgctcagctgtttgtttgtttgtttgtttattgatttatttatttgatatggtctggccctgttgcccaggctggagtgcagtggtgtgatctcggttcactgcagcctttgcctcccagattcaagcgattctcccacctgggcctcccaaagtgttgggattacaggcgtgagccaccagacccagcgagatcctgtctcttaaaaaaaaattgttggccaggtgcggtggctcacgcctgtaattccagcactttggggggccgaagcaggcagatcacgaggtcaggaggtcgagaccatcctggctaacatggtgaaaccccatctctactaaaaatacaaaaattagccgggcatggtggcaggtgcctgtagtcccagctactcaggaggctgaggcaggagaatggcgtgaacctgggaaggcagagcttacagtgagccgagattgggccactgcactccagcctgggtgacagagcaagactctgtctc

SEQ ID NO: 10669 - DNA, 6000 bp, Homo sapiens
tttatgctctgcttcccttataaaactgaatgcttttaacagcacccaagtcacctcttgaatgctttgctgcttagaaatttctcctgccagataccctaaatcatctctctcaagttcaaagttccacaaatctctagggcagggtcaaaatgccaccagtctctttgttaaaacataacaaaagtcacctttactccagttcccaacaagttcctcatctccatctgagaccacctcagcctggaccttatgtccacatcactatcaggcgtttggtcaaagccattcaacaagtctctaggaagttccaaactttcccacattttcatgtcttcttctgagccctccaaactattccaacctctgcctgttacccagttccaaagtcgcttccacattttcaggtatcttttcagcagcatcccactgtactggtgccaatttactgtattagtccattttcccgctgctgataaagacatatctgtgactggggaatttacaaaagaaagaggtttaattggacttacagttccacatggctggggaggcctcataatcatggcagaaggcaaggaggagcaagtctcatctcacatggatggtggcaggcaaagagataacgagagagaagcgaaagcagaaaccccttataaaaccatcagatctcatgagacttactaccacaagaacagtatggggaaaactgcccccatgattcagttatctcccaccaggtccctcccaaaacatgtgggaactataagaagtacaattcaagatgaggtatgggtggggacacacagccaaaccatatcatacactttgctgttcttgggagggagtgatgtcctataaatgtctgttagatctagttggtttatgtgttgttcaagtcttcaacttttttgttgatcttctatctgggcctttatggaatgcaaggtgttgaattctccaactattagggtagcactgtctaaaattacatctttacatattatgtgctcattaacatagatttataattattcttttatgcatttattttttaaatcctttttccttaaaaaagaggagttacaaatccaaaaatagaaaactacttacttttaatttcacctatgtagttacctttactgatattctttagttcttcatatggctttgagctactctctcctagcctcttttcaggctgaaggacttcctttagtattccttgtagttatgaactccttccgttttgttgttctaggaacatatttatttctccttcattttttaaggatacttttgccagattcaggattcttttttggcttttattcgcagcacttacgtcattccactgctttctgagctccatggtttctgatgataagcctactgttaatcttaatgaagattccttatacatgaccagtcatttctctcttgctgttgtcaaaattctctgtttttgtcttttaacaatttaatcacaatttgtcttggtgtcgatccctttcaatttatccgccctgaagttcattgagcttcttagatgtgtagacgcctgtctttcattaaatttggtaatttttcagctattatttcttcaaatattctttacactcctttattttctcctctccttttggaattcccactgtgcaaatgtttgtttgatagtgtcccacaatccttacaggtcttgttcatttttcttattttttctttctgttcctcaaactgtatactcttgatgtatcttcaaattccccaatctttcttctgcctgctcaaatctgctattgaacccctccagtgaacattatatttcaattattgtgcttttcaactccagcaactctatttgctttctttttataatttctacctctttaatagtatcctctatttattgaacaattcacttttcctggtttcctttagttattgtctattattttctttgttctttgagcatattgaagacagttgacaatgtctgggcttcccaaaggaatgttctttaaaaatgttttccttataaataagccatactttttttctttgcatgcctcataattttttcttgttgacaactggacattttgtatataatatggtaattatggacatctgcttctcccactccccaccagagtttgttgttgtttatttcttttattaaatgtctcaaaccaaaaaataaaaagataaaagcccaaaatgcgagaaaacactcccagtctttgccagttagctatgtgttctggcaccccttcaatgcttaacgaggtagtttacaacgccaccttagccttcacttcctgcttgcatgaaagctgacggtcagtcagaggtgagagtttacggtgttcttaggtttttctctgagtatgcatccagaccagggcatgccgatggccttctagattccccagaataaaatgaagctttccaaagcctttattcccccaactatctccttctccagcctcttccttcccaggatttttggtctgtttattgcttgtcctggctttcataccttgctttctgtgacactggctgtttgcctttaatgtttttgacaaacactgcctgggaagctgcctgagccctgaggaagctctgaggcaggtgaaacaaaggcaagccgttgagttgaaccttcaggaaaccatcagggaggtcaaaacacacctacaattccttgaggataaggtccatagtgctccctctggtgccagcaacccacaccaggaatgtggctgccatcttcaaggccactgacaacttggagaatagaagatgaccacagaactctcttaccaaaattcagcagttttttcttcattacatgttcccctggattttgtgagttttttttatcagtttcagagtttccaaaaaaggtgctcctgacagttttgccagcttattcatttttgagttccctacttttttcccattttttgctgacatcatttcatactatttacttttgtgtttcccagccttgcttgaaattattttctcagcctggaatgcagaaaaaaaagaaaggttgctatcactgaaactatcaaaagaatgtattactgacttgtgttacttgaccagccctgacttgaaggcagggccaatgaacagttaaaaaagtttttgaacaagaataccatcagcaaaacaacttttatctcccttaaagacaacattcattaaatcgtttgccttgcatttgtcaagccctccataatagacgcaatgtttgagagcacgcaggctttgggataagatcttagtatgaattccagatcttctgccacttagtagttgtttagccttgtacaaggcacttaaattctctgggactatttccttttctgtaagacaggaaaaatatacatttctagagctgtgataaagacttaaagagatattatcatttccagaactgtggtaaagacttaaaaagatatacacgtaaaattcttggcattcaatgttagctatttgttaaatttgaatttttattttattttattttagagactgagtctcgctctgtcgcccatgctggagtgcagtggcacaatcttagctcattgcaacctccgcctaccggattcaagcgattctcctgcctcagcctccagagtagctgggattacaggtgcacaccaccacgcctggctaatttttgtatttttagcagagacgggtttcaccatgttggtcaggctggtctcaaactcctgaccttgtgatctgccctcctcagcctcccaaagtgctgcaattacaggtgtgagccatcgcacccagcctaaatttgaattttcaagtttaggttttttgttttgtttcgttttgtttttgagacagggtcttgctctgtcacccaggctgcagtgcagtggcaccatcatagctcactgcagccttaactcctggcctcaaatgatcctcctgcctcagcatcccaagtaagcttgactacaggcaggtgccaccctgcccagttaattttttaaattcttttgtagaaatggggtctccctatgttgcccagactggtctccaactcctggcctcaagtgattctcccacctcagcctctcaaaatggtgagattacaggcataagccacggagccggtctaaatttttagttttttttctggcattacagacactgtttcttctggtttaaacagaaaaaagaaaaagaaacaaaaagagccactggcttcctttgtaagaagagcttagggtggccatatgcttttcagggactgaccttgaactgattttcataacaagcacattaattttacttagactgtatgtttacttggggaggttttggggaaaattgctgggtatgtggggtgggcctctaaaatccttctaaagccccttttagcctagagactaatttgcaaacacatttttaaaaaacaaacccaaatatctagacgacggagggagcatgccaactcaacagttttttcaaaccagcttccctttgtgtctgtagggtccaaggacgtaaccagatcatacaacacgcgccaggaaagcccaaaagaggggtgatccctcgatggaggtgccgcatcagcgttttctcacgtggcctccggggctctatgaatggcaagagattgcattccttctactacccctcccagcctccagccgggacaaggaactggagcaaactcggggctgcagttccgactggactcgcccacctgggcgcgccggctgcccagcctcctgaagcctcggggctgggccctgcggtgatgggcgtgctggccgtcgcagagccctctgggagttgtagtccgtagcggcgagaggtttgacagcgaccgcgggcttggcgcattcagaactccaactcccgccggcccctgcgacccaggctattgccgcttcctgtttggactaggagccccgcggtcgcaaattgcgagaatttgggaagggaatctttatcttctcgtctagttctccgaggttgaaggctcggcctgctcaggtagatcacgttcccacgtctagcaaactcgcccctcggggaggtgggaaggtatccgagggaaggcggcgggaagggttgaagttggggcgaagccggctgtcacctgggatagttctttgcagcgcatcggaaccgtctcttcttttggggctcagggaggccatagcctggagccgcggagactgctccggaggcacggcgcgcgctcctcaagggctcagggaaagaaagtcaggagtccctcggggtctgaggaaatccgagtgtctatgggagtcggtgtcagctggagccttagagaaaagatagggttggggtaaatgaacaccctgaccctcgggtgagagaaggagggagtaggagaattgtgggacttgcaggaatgggagcacccttctttctctctcttgagatagggtcttgctccgtcgcttgggcttgagtgaggtggcgcgatcacggctgggagcacctttctccatcccgagttggggacatctagagggggaacatgagggaggaaccccctttgggccttgagctaggaccacagagggggtgagggccatgactggtaagccctcgccacgcttttcacacgactcagttgtgagagtgagtgtgttgatagtgggtagcttgacatctcagcatagtaaagctggaagaggggtttgagagcagctagtcaagcgcattctcctcattttacagagaaggaaactgaggtccaccgagttggagaaacctactcaacaccaggtaaccatttaatggcaaactcgaccaacacctaattgtcatgactcccaggcagtgtcttatccattgccgtgctctgtagatgagcacactataagttgtaagttgtacctccaccttgttttcttttttcttttcttttctttctttttttttttcagacaagagtctcgctctgtcgcccaggct

SEQ ID NO: 10670 - DNA, 6000 bp, Homo sapiens
tacattctggagaacaatctggagaaatggtggaataaagtatgctaaatccttatgccctaggaattcctttctaggatatatgcttctagagacactctatcactggaccttaaagtacatgcacaggggtgtttaatgtagtgtagtttgtgatggtagagagttgaaggcaagacaagtatttaatattatgggaatgaataaatatggcagaatcacactatgtaaaatcagatagcactgagaatttgaactagttgagtttgcagactatgatcatacctaacagggatgtttagggccagaaaaagaaaatttaaataaattagaaatatgtaaacataaaatagcactaaatatattttcagtgagatacgcataaccaaggaaatacagaaactaatttgaaagttaatattttactatctttttaattactctgtgtagtatattagataataataaaccatcacatcttagccttctaaataagttccacaagtttaccaaaatgcaaaatttaaataacttaattatttgtataggtagatttccaggagtaaaatataaaacattttctgcagtcctactggtttttcttgagtattgcttaaattttctttgtttgtgttttagttgaataaaaaagacttgcttaaaaaaataagtagagaagcaaaagtaaggagaaattctagatatatggttaataatttacctatttttctctaatctttacaaaaaaattccaagcccataaataaaaattaaagtagtatgaagagcaaatcaaaatttaaatggtcaaaaacaaactttcttttatagaatttgtatattggtgaatcatagattgctgtttggatctgtctgatctatctatctatctatctatcatctatctatcaattatcttttcagtttagattgggaatggtaaatttttgtagacagatcattagcatttggttctgtctattcctctttatctaacaaaataaaataatagatatataacttatttttatttcagattctgatgaagaatccagtgctcatatgcctagctctgtcaaaagctacagaatatttagttattattggagcttctgaatttttgcctatatatttagaaaatcagtttatattaacacccactgtggcaactacacttgcaggtagatttaccttcttattgtcatttcaaaaattttgcactgtcttattgtatgtacttatgaaatacttgaaataaataaaaatataaagaattatatacctagatatgatttgtgcagattttacaaatatgagcactttgccatcatagtgtcaatatttttaacatataaatccttgtaaaaacttccgtgttcctcctttatcccatttatcttcattccttttcacaggtaatcactcttctgaagtcagagtgaatcattcccatgcatgtttgtacatctttactgcttatgtgcttgtctatatacacctatttctaaaatttatgtatcactttatatatactcttctgcagcttattttttcatcagaaattatgttctttagatttgtgttgatctatatctatttaatgcatttcagtttgctattttattttatgatcctattttatgagtatactattgtttatgtattatccaattaatggatatgttgttgcctcccactttttctctcttccaaccagcgtagtaatgaaaaggtttgttgatatctccttctgtacatttgtaaaagttgatgtaagtttagacattgaagggaaattgctattgtgtacatttacaattttatgagatattgagaattggctctccaaaagaggttgcaaatggaattaaatgttttaaagttttagcattaataggaaagttgtaaatgcaatgatttattttagggtgtaaaaggtcaaggatgcatccagtaactttgaggataaccaataaagtagtagtagtaagagactatattaataggaaacatttaattaattaaaaaaagaaaggaatgacagaaaacaaaaagcatgtgggcaaaatagaaagcaaataagatgtgcagaaatcctgagtataaatctaaaccttttatggagtacattttttataaaaggcttgtctgactgcaaattatccaaaaagccaaaatagatcagctttcaatggccataatgacaaattttttcatgagcacaccaggtttggggcactctgattaatcaaatcagcagaatgtgaggagtaaattcattccatttgtttcttattatatttaattaaggctattatcaatggattccaagaaccagggtaaggctacatgcagtattgactccctcaagctcctggatctagccagctgaacaaatccttaagccatcaaggtctatcttaaaaaatcaggtggctttctccttaagtttctctactgacctttccacttagcctgagatatcaaagtataacagaatacattagcaattgcaaattctaccttggcaagaatgaaatttggggtaattttatcatctgtaataatgttgatcagtaagtgaggctgagcagagtgctttccaggaatgaggtggtgtcattgattatttcaagtcaagtcacagacaaattttgccctatagtttctaattgtattactctcatcataaagatggcttcagtaaggctgtgtatgaatagcataccactaatcttgccaggaagctcccttgagtaactgagtgtaacttcattttagagaaatttctaatcttctaagagctatgtgatctgctggtggtgatataaacacttgatgatcttttatgaccacccctatgttcttgaatctatcatttccatttgacaagtaaggcttgtcaaatagttatgaggctggtttagttcatcccaaaatgagaatataagttcacaaagtcaaaagattgctgtaagttaggactttggttttgacaagatggcagtgtaagctagtagttgcttttcaaatggtagctgttttagggagtcagtgagtgttatacaacagcaggtgtttctgaatggagcctatatcttttatctagaggctgcagtccatgaaattatcagtcatggagatttgtagctcatggggatcattaaatttctagcagctcaaagaagagagtatgccacagcttgcttatcagcttcaatgtaggtttgcgaattacactccctgtaagttagctgttataaaagaatgcccaagacagacatctaccatctctgatacccagagtccaaagtgacattaggttcccttttggttggagggaaatgagacatttttttgcttgacttccagagtaattgagcattgtgaatccatttgcatagtcccccagaaacttgatgtgcagtctttgggttttgttgggatttatcagttacccttgcaggtgaaggtgtgataataccaaagttagagccattgagtctaaggcttgagagtctctagccaactgcatatcatctatcagtgaaaggtttaggcatcagaaggtaatgggaatcacactaaattcttatgcaccttcttgtagccaatggcagagctttaggtactcctgaggaataactaaagaatattacagtattcttactgtaaaggtatatttgtggtttttaagcatgaatgagaattagtctttgtccttgggtgccaatgggatagaaaagaatgtcttggcaaagtctaatacagtatattaaatgtaatcagtctgtgtagtagatttggttacatcacaatgcctggaacagccagggttataagagcaataactgaaatcaacaataatcaatccactataaacctccagctccagctcctgataacttttttttttttttttgagatggagtttcactcttgttgcccaggctggggtgcaatgatgtaatctaggctcaccacaacctccacctcccaggttcaagcgattctcctgcctcagccttccgagtagctgggattataggcatgcaccaccacgcccagctaattttgtattttttagtagagacggggtttctccatgttgctcaggcaggtcgcgaactcccgacatcaggtgatctgcccgccttggcctcccaaagtgctgggattaaaggcgtgagccaccacacctggtcctgataaccttttacactggccatgatgtgtgttgaatggaaatactgcatttcttagtacccctgctaccttatatactcaaagctaggactttcctttctgcttcttggattctacattgtttctgttagaccgtgtgagaggaaacagggaggcacgttgggtaacaattcatgtgttccattatcacttctggagtttaacagcagtcatagtataatattatagaatataaatactaattatatatttagaaattgaagctacagcatcagtatattgaggctacaacaaacatgcattgaaattgtccagagtaccacccacaagcttacttcacattcttttcaggaatgatgagagttcaaaatctattcaatgcctcatctatgatttcacacaggaattttatttgtcttaggaaaatcttcctaagagggtcacagcaaagctactttatagcagtcaggacacactacaaaaaactctgaggtcttttattgtcttaaaatggatccaagattggcatgatagactggaagaggagctggacctccagtcaacccagctattggctattttgtttaaacaagaaattatgtactgcactttatcatgtcccaagaaaatgaactaaaattctgataattcacctggtctctgctcatagtggctataattttttttctttttacactcagggtaattgcacattgctggaactgttatctgtaacttgaaagcagaaggaatcttctgtctaataagaaaaaaaaatagtaatagtttttacagtggggcagtcctgaagctgatggccagattgacaaggaagtttgcttgcctagagaagagttgataagacctatggtactttctatggagctgtctttaaacctacttcagcttgcagctacagaaagccacgtctctgttagcatcccatcgttgttgccaagagtgctcagatctgtaatgggtttgaatttcatcctatctgtaagctaacaagttaacctaacttagtttcatgtgtgctggaagaagacaccaaacttcttggtcagagatgaaataaagtttatgactcacagcaatagcagtaatgagagttcctgctaggtttctgagctccagtttccaaagggtgatgtgaaaagaggccaggtgatatctgtacacacaatgagttgcattacatgaaagaaatcttgaggttagggaacccaggtcttttatagtgggcagtaattatgcttgtctttggctccagagggaggcattatacttgataaagagtgtccagaggggacactctctctgtcttccaaaattctaagcaaagttgtcctgtgctctacgtggaaatactatccttattattcaaggctactcatcgtataaatatccttgaaaagatagtggagaacaaagagcagtcagtgcttctgcttgcaagatatacagaaagttttcacccaataaatatattagtagttatgttaaatataaatagtctaaagaatgtcagattgggaaaaaaatttcaatatatgttactaacaagaggcactccttaaatatggggacatgaaaaggttgaaagtgaaaggatagacgaaagatacaaatgctaaccaaaagagaagcttgtgcaactataataattttaaatattgtatcctttaaagaacacaagaactacgacaactcaaaaagctggaatgtcttttttccttcaaaaaacctcactagctcccccatggaggctagcaccccagtacctgccagcac

SEQ ID NO: 10671 - DNA, 6000 bp, Homo sapiens
aaagccaagtaccaggtcctgaaactttcgtatcatataaataacgatgatgatataataatgatgatggccgtcaagatttattgggtggttaccatatgccaggcattggtgctaaatgcctacatgtactttcacagctgatcctcatgacatcctgataaaagttattattgctactgtatctccattctatctgtggattagagaggctaagcaaatgtctaggttatccaccaagaaactagcgaagatgagattaaaatatagataggcctattccaaagccctctactgccactctaagtatcactctgtttcattaagaaagtagagagcctcaagacaaaatcttagtttctagcttcataattagcccctacttctttcccctaaacactatccaccttaaaatctaaaacccttcacccttccttcaccttttctttttcctccttcgtgcagctgggtcttcatcctcattgtactcccttggcatcctagaagagacgagaaattcactgatagcaaaatattgccacagccccagaaaccccaagaagtctccttgaggatttttagaaagacctagaatactgatcaaagtaacactttcaatcaagcagaaatccacaccaatatttgtaggtgggcagttctcaaactttagagagtatcataaatacctgagggactattaaaagtcattctacttagtagaaagaaataggaaggagcaagaaacaagttgggagacaggttggatcacccaaagacttactcatggtgacgtgacttagaaggtggtgcagaggtaggtgcagccctgggggtcatgagaagtttcctgaagtcttcattggtgagttttgatctagaagaaaaggcaaagattttaaatattaggactcaataagaaatgaaaaaggaacaagtaaaaatcatgattaaattaacagaaatcagggaaatacaaattaaaacaaagatatgacactgtttttttttttttgagacggagtctcactgtcacccatattggccaggctggtcttgaactcctgaccttgtgatccacccacctcggcctcccaaagtgctgggattatagggatgagccaccgcacccagctttttttttttttttttaagacagagtctccctctgttgccccggctggagtgcagtggcatgatctcagcccactgcaacctctgcctcctgggttcaagtaattctcctgcctcagcctcacaagtagctgggaatacaggtgcccgccaacacacccagctaatttttgtatttttattagaggtgttggccaggctggtcccaaacttctgacctcaggtgatctgcccacctcagcctcccaaagtgctgggattataggtgtaagccaccacgcccgaccagatatgccatgccacttttaatgcatcagagtgttaactaccagaaagtttgataaatcaagtgtgagtgagaatttgggaaggggactctctcatataatgctgatgagaatgtaaaccagtataaccaatttgaagggcaattttgcagtatttgttaaaatttaagtatatatatcctatgagccagcaactccatttatttatatttagcctggtccattactgacatatgtatataagaaggcctgtaaatttaattcagttatagccttgaaaataatcagtctggccgggtgcagtggctcacacctataatcgccgcactttgggaggctgacgcaggcggatcacccgaggtcaggagttcaagaccagcatggccaacatggtgatatcccatctctactaaaaatacaaaaaaattagctgggcgttgtggtgggcgcctgtaatcctagctactcaggaggctgaggcaggaaaatcgcttgaacctgggaggcggagtttgcagtgagccgagatctaggtattacactccagcctgggcaaaaagagcaagactctgtctcaaaaaaataaaaaaaagaaaagaatcagtctgaaacagactaagcgtttattagctggagactgactaaactatgatggtgtttcccaaagagggaaagacagcactaatggtacaagagattattttaattggtacactaacaaagactcctctcttgatcaaattaaagtcagactcctttaaagctctcttctgactagggctcttccttggcctgctgacctcagttttaaaaaggaatcctaagtcagttcacagaaagttttcccactcttgatatccaatccaacttgatatctaatcaagttcctcttctccccaaggaagactttattgaagactactgtaacaagagtcaagaccattgtaatagagtagagagactgaacttaattccgaatacaacagggacaagtgagaatttatagaaaattactaaaagcaacttggttaggtatgggggtggagcggtggttgatttctttgttaaaactgtgctcagcaggccacggatgagtcctgctgaaaaatgggactctttggggaacctgactaaagtttagccaaggagggaatgcttgtcactgctctgaaagataatctcagaaacactgagcagggtttaaaaagaagcaagttgcaaaaatgatatatacagcataatatcatttaactcaaatattttaaatcacaaagcaatgttgtgttttcctcagatatgcatgtatgtgtataaatgcatttaaaaaagagtaggagggccaggcgcagtggctcacgcctgtaatcccagcactttgggccgccgagacgggcagatcatttgaggtcaggagttcaagaccagcctggccaacatagcgaaaccctgtctctactaatacaaaaattagccaagcatggtggggcatgcctgtaatcccagctactggggaaactgaggcagaagaattgcttgagcccaggaggcaaaggttgctgtgagcagaaataatgccattgaactccagcctgggcaacgggaggaaaagatatgccaaaaaaggtaactgtggttacttctaagaaaaggactgaggctgggcacggtggctcacgcctgtaatgccagcactttaggaggctgaggcgggtggatcacttcaggccaggagttcaagaccagcctgacgaacacagtgaaaccctgtctctactaaaaatacaaaaaaaaaaatcagtcgtgcatggtggcacatgcctgtagtcccagctacttgggaggctgaggcaggagaaccgcttgaactcaggaggcagaggttgcagtgagccaagattgcatcactgcactccagcctgggtaacagtgagactccgtctcaaaaaaaaaaaaaaagaaagaaaagaaaagaaaagaaaaaaaaaaagaaatggactggaattggggatgttatcaaagatgattttatcgggggccaggcacggtggctcacgcctgtactcccaccactttgggaggcagaggcgggtggatcacctgaagtcgggatttcaagaccagcctgatcaacatggagaaaccccatctctactaaaaatacaaaattagccgggcgtagtggaacatgcctgtaatcccagctactcggaaggctgaggcaggagaattgcttgaacccgggaggcggaggttgtggtgagccgagatcgcaccactgcattccagcctgagcaacaagagcgaaactcagtctcaaaaaaaataaaaagatgattttacccttatttcctatgttttaatttgctattggaagaagtaattcctatataatgtgtaattacacaacacgtataaaaaaaaaaaaaaacttaacacctttcctgcaggaatttcccttctaatacccttatgcacttggcctgatccagttaaggctcacagagataaagggccagcgggtataattttttaccatccttgatgacaagacattcagaattctttcaccatcaccaccacttttctattcattgcccaactcatttccatggtcctagcacaaaatactcactggtggaaggagtgaggatcatccacatcgtggccatcgggggccaaagggttggagaacggctcacctgacaaaaaaaattgacgttaatttaatcagtctcttacgtgtcagatcctatgcaaaaatttgagatatagtagtgaacaatacagaacaaaagttagaacagcgacagtgtcaacacaatgtaataagtgctgaaataggaaactacaagaagctgtgggagcacaaagcagaggaccctaatcctgcgctggaggatcagagaagacttccggaagatcacgtctaaaatactacgtaaaagataaatacgcgcaacccaggattaagtatggggacaggactgggggaaagcgatccacgcacaaaagccgcccatcatcacttggagtaggagtgaggactggggacggagtttggagctgtcggcctcacttaggaccctgtggcttctccgggctcaagcgtcacacatacatacatacacacacacacacacacacacacacacacacacacacccggcttaagctcagaagctacaataatgcgccaagtgccccaagtgccatggggaagaaataacggatggcctgagccttactatctcgctccggcattttgttatcgttctttcgctgtcaccaacaatcgagtctccaacagcaacaccgcagcgacaagctctttcccacagtgcacctcagaatcaacccacactgctttgcgttcgcagcctttccgcttcctgtttttccctccgaccaaccccgagcgcaaagaaattgacctcgcagcggtcctacaatacttttatatcattggccaagctttaccccgcccctgcctcatgcagcctatgggctaggctttagggtccgcggttggtcagaccggagcacttggcctgaagacctggaattggcgacttcgatattaacaaggatggcggcggccgcagcaagtcgaggagtcggggcaaagctgggcctgcgtgagattcgcatccacttatgtcagcgctcgcccggcagccagggcgtcaggtgaggcgcggcgtggtgaggcgggcgggcttcgggacgccagggtcacgacctcgacctccctgaagttgagggaagcccccgcccacagcacgcgcggcgctctctccggccccgcagggacttcattgagaaacgctacgtggagctgaagaaggcgaatcccgacctacccatcctaatccgcgaatgctccgatgtgcagcccaagctctgggcccgctacggtgagtgcgggacgccaggggtctggggctccggtaggggaacaagggtttgagaagagaagggaccgcccaaggtcgtgcagaaacccgtggagaaactagaactcggactttagccttgctgttgatcttgtttccatgaagaaatttatattcgcagggttatatgatgcgttgtattccgggcaacataagtatgcaggctgaccgaatcctgcgtagggaccaggagctgacgtttttgtagttaagaatgggcttcagacaggagagaagttagtcaatatagtttctccaaataacgtgtagccagtgtcagtccaggtagtgtgtgagaatctcagtaattttgcacatagagctgggccctgtgctgagtgcttccctgcctaactcatttaatcttcattagttaggaggaagcgtgttcttcttttctcactgtagagattagaaaacggaatcaaaactttgttttgcactattgttaaactctagctgcaactttagatgcagctagagtttaacaggattgagcctttacatttattccccttcctagaatgcacttacccctctaagactggcatggcaatgtattgcaaaatgaaattttcctatcatgttgcctaacacattgtaggtatgcaataaatgtttatacatac

SEQ ID NO: 10672 - DNA, 6000 bp, Homo sapiens
ttgaataattatctaatatgtattagctcaatcacggcttactgcagccccaacctccctggctcaagctatcctcccaccttagcctcctaagtagctgggaccacagacgtgtaccactacacccagctttttttttttttttctttctgtagagatgggggtgtctccttatgctgcccagactggtcttgaactccttggctcaggtgatcctcctgcctcccaaagcactgggattacaggcgagcctggcttgggcactgttctaagtgccttatgttcaataccccattcaagttccgctcaaccctttgtggtaagtactactatcagttttcattttatagagggggaaactgaggcacataaagtttgaataacttgtctgagactatggagcatgtaagggcaggatttaaccctagcaatctgtaggcagtgtctgtccatctgtctttcaagctgtccagcccaaagctgaaacagctgaaacgctgaaccggaaagcttaggaggtagtgccaggccagagttctaacctcttgttctgacacatcgtctcttcctcaaaggactagggtccccaaggctctttcctggttctgggccttctaccactgagctcagcctggctgagtctgaattctgcagatctgagttctggggaaccttcttgagggcctcaggctgtgcccccctcctctgctctctgtactttgtatgcactgctgatgttaactgtaattaagtgattctttgatcaactatttgtttaatgtctatctcccgaacttgactataaatggtaggagtccagaatttctacacaggtggaaggaaataatctgtttgggtaggggggcctttgcttccattgcataatacttactaaggttgagaaatgtcaactgaacacagaaacgaatgggggttctgatggagattgtaggaagaaaacacatgccatcctcacctctccatgccctccctgtggcatcaccactgtctataagccctataagagcaaaaattgtgtctgtcccttttctcactataactgttaacagctggcactatgcctgaaacataagaagtgtgtcacaaaaatagcacgcaaaaaaacaattttttgtggaataaataaaattttaaaatggagccttgcacttctggtctgcaaaagaggggtgacacaatcaagacccattttttttttttttttttagacggagtctcgctctgtcacccaggctggagtgcagtggcgcgatcccggctcactgcaagctccgcccctccaggtttaagcaattctccgtctcagcctctggagtagctgggattacaggcgcatgccgccacgcccggctaatttttttgtatttttagtacagacggggtttcaccatcttggccaggctggtcttgaactcctgaccttgtgatccacccacctcagcctcccaaagtgctgggattacaggcgtgagccaccgcacccagccaaagacccagctttttgaaacaattttacatatgaaaacatgctgcacatacaactggcatacagtaagtgctccagaagtgactgtcattgaattggaattcctgcctctcctcaatcccactaactccaggtcctagcaagcctaggagattaataaaagaacaaagctcaaaactgaacctactctactcccctggccacaatctggtgggagtgacgctgtttttattggaatcagggtaaaagattgtcattagccctggcaggaatgcaaggttgttaggatgtgcctctagcaggaaagttatacctggggaagacatcgagtagctttggaatgaacagagtcagatgaagcagaaaaacaaatccagcacagacctaccggccacccaatcctaaagaaggaacatgatgtcttcaccctgcaatggagcaaatgctctgcattccccaaccacctttcgttctgtcccctcaccccctaaactgtggccccagggctgctggagaggtttaaaacacaaatcagaatgtgtcagaccttgcttaaaatccttaatgggatgacatctgaattcctcaccaggctcacttcaaacttgctcataaagctgtggccacagaggccttctgtcagtgcctctaatatgccaggcttttcccacacacggcctccacccatgctccctctgcctgagatgtttctccagtcctccctcagattcacttctcagtctttgggtctcaactcacaactagaagccgccctctcagagacattccctgatgaccaaatcagaatcagctccttccaccatcccccacctccccggcaagcaacataccccagagaaagctcatttccctcctagcacttagaacctcatgttgcagcctgtctgtctgtcttttcaaaagactgtgagcttcacaagggcagggagggctgtctgtccctcaccactgagtctccagagtcagggcaggccccactacagaatcgatcaatgaatgagtgaatgagtgaatgaatgaatgaatgaatgaatgaatttttcataactgctgctccaaaccattcctcagcttaggttccaagcacaaccagaatatgacctccagagcccttctagacgctctgaatctcgctgtacttaagcatcagaggcccctcccagctcaagactgggagctcctccttctccccaccacaggctggggtctcctcgcattctctttcagggaagctgagaaagactatgaaatgtaatcctgtctgtctcctgagtttctctaataaagaaaacaggatagcaacccccctccccgcggctcctccaatcctccttttctgccatagatttaagatttatttattcccatccttctgactgtttcagcaagggccatgggtgagcaccagctggaaaattactgcttcaactttcattgtttaaaatgcttaaatgacatgcgagaaacaggtttttaggtctgtgatgctgagaagggttggtagcaaagtaaagccaggttgcaaagacctagaaaataagtgctacaatttaccagctcttccatatacccggtgcaggacccttggcctcagtttctacagctgacagagagggcgatactgaacttcaacagccttaaaaggaagtcctggacaactgtacccatttttctggcgaagagttctcttggtcttagagaaaggtctcgcccctgaaaggaaggctgaggttccctaggggagagtctgctctgccctcaggagctgggtaagtacacggaggggtgagccgaatggtgagaaggcattttaggctaggactcggtgaccttgggctgcctgcctctagagtcccagccccagccctaggccagacctcagccctgggctgggagcctttcattggttcctctgacaacagccaagcacaatcctatagtggcgtaggaagaaaaagactgccacacaatctccccgtgcggccagaacagcggcaagacagaccttacaagggactcagggccaagccctggcccagactctgctcttatccacgcatcaaagccaccccccgccccggacttcccggaggctacaggctcctccgttccagggaggagcagggcctgctgcgagggctccccgccttcctggagtcaggcctaatggcgggggcttttcttttcaccggcttgagctgatcctcacccccgccccccaacgccaccatcattaacagcgaagaaaggatccccagccatttccatttcctctgcggctcaagagccccgttgttatttaatcctgaggccaccccggcagcatcctcggcgcagccggctccacccatccacctggccagttctcggccgctcccacttccccggaggggaggccggtgagaggtgggggatattggggaaaggcgcctacaacagcgaagggccgtgggccttcggtggaccgaggctcctcaggccagcgtcctgtgagggctgggaaaccgactgggacagagaaaggacacctagctagggcgacagagagcgggcagacgcccgggcactgcggacattgcactggggcggggggcggggggaacgctgggaggcgagggccaggcttcctctggctgagttgccagaatcgccccggggggtactggagccggaagaggcctgggcccagtcactgtctacacccaagaaatggggggaggggcggccagcactcacgagagattcagcctcaggaaaaagaaccagattcactcaccaatcctcaccccaccctttgatatgaatgatggacattttcctaatttttggtaaacgcagcttcaagacccctcccgcctggcgtctctggtctagagcaagagaaggcccccagtaggggtcctcccgcccccccttttgactgcctgcggggggcagagatccccagatctaggtgtgccctccaccaccctgctctcaacccgggatccggaggccgcagcgtcccccaccccccagcgacactgacggttcctgcccaggcccgcagtggcgtgaaggtggcctttacctcctctcgcaggctgggagggggtgcagcccgcgcagctggcccagctgcagcagtcgccgccgccctccattcattaaaaaaaaaaaaaaaaaggcaacaacagcctccactggaacctccacccctctttgtaaaagaacgacggctcctggtggagcttgagccagtcccagcaatcacgggttaagatcttttcccgccccccattcataaaaaaaggagcggagcgcatgcgcgctcagggtctgttgtgcccacccattcatagaatcgcgaacggcacgcgtgcgcactggcgctcccttccctcccattcataaaaaagccattttcccaggcagtggttgcaacatcgccgcggaggtagcgagctgagctgacagcgcggagctggcgctgtggagcgcagggagccttgccggttcctccgaccggcgtctgcgagtacagcggcggctaacctgccccggcttcaggatttacacagacgtggggcgatgcttgtgaccctgcagctcctcaaagtaagtccatggctggtttggagatctgaaactgcccctctctgagccgcgacgcgactccccccttgggctggggcaaatggtgcgctatttctaggcgcgcctcagtgttccttccctcagcctgcgcctccttgagtcgctgcggtgcgccgcagctccctgacgccctcggcccggccggcacggcgccgggggtgttcacagcctggcaccgccgtttccgacccctgggcattgccaagcccggcttccccgccctctgagactcgggaagccccgtgcgtgtcccgggagtttgcctctggcctggcctctttccttctcctgccaccatccgcctcgaacgctggaacgggcgtctctgggcttggtcaggagccaccgtttgggtcggggggcgccctcgctctgggcggctcgcccacctcccagctcggtgcccacggtgccagctttgccgtgtatctcccagcccgccgtagcggcctatgctcgacgtagattttttctttctcttcggagccgtgacggactgaattccctccccttctgcctctccctcgatggtcagcgaggggctggctcaggactgggcattcctactccctctccttggcgaggcggttcctcgccgtctgacctttgctccgctgccgcattttatgctatgcaactgccttgcagttgactttttcttgcctggcctctgtaaggcctgaggctcctcggccaccctgtacctccctatcctcgggcaccgagctgtgccaggccccggagcccccaggccgcgctagggctgcggtgggggttgaaggtgcgtttacataacaccaggcgtgtgggagctggaggaagaggttgcgaatgta

SEQ ID NO: 10673 - DNA, 6000 bp, Homo sapiens
tactgatacatgctgcaacatgtatgaaccttgaaaacattatgctaagtgaaataaatcacacaaaaagctacatattgtataaatccatttatatgaatgtccagaataggcaaacccatagagagagaaactggattagagcttaccaggggatagtgggagaagtaaggttggactgattgctaataggtatgacgtttcttgtggggttgacgggaattttctggaattagtggtgatggctgtacaacacagcaaatacgatggcctccctcattcaaagcccacctggagtcacagaactgggagtattaaagataaattattcaactcctttgttttgttgatagggaaatcaaagccttgagagaggatgggactttctcaaagttacaaaatgagtcgttggcattgctggacctaaaatctcgtattcctctttctagtagtacatgcacttttctaaactagattacacaagacatctccccaaactctactggtagcccctattgccaataaaagaagcttcagattaccagtttcttccctgacgtctgaaatcaggtccatttcataagttagtgttaggcgttaggtgactcactccaaataccaacttatttgtacctacctagcaattagactgaagtttttcaacagccttgccttcctcattctggcatgttgaaaaatgagataaaagtagattttttggcaaactgttgcttctatttctcaccagaacttggtggttctggtggacatgctacggaaaaggacatgtgctgagctctttgggaaatctctttttaaagacagggtctcattcgctcaagctggaatgcagtggcatgatcataactcactgcagcctaaaactcctggcttcaagtgatcctccagccttagcttcctgagtagttggaattacaggtatgagccatcatgcctggctctaggagacattttaaaatgggccaagttttacttctatagttcaaggagtttgtccttgatgaaagtacaggtgtgcagaaataacacaacctgaaatgtagaaactccccttagaatggaaggaaaccaatagtttgggagttgtgagtagaaaaagagtttagttggtacatcaaagaagaatcaacagaagtaatgacattcggacagggtggtaagggacaggtggagggcacagcaagaatgaagaggcaaaaccgaaaaagaatgaaaacattagggtgaagcttggaatatgtgtagagaaattgtggaaaacaaaataagaagtgttggggacaaattctagagagctattaatgccaggattaagaaaaagtgtttaatttactaggcaacaggatgttgttgaggggtgggttaagggttagggacagacactgtcattcacactggtaaagccttggagacaaaatttggcattatttatcaaactccttagacagctgcacactctttggacctggaatttcacttctaggtattttctactaagaaatataaggatgttcattacaacattgtttctaatattaggaaattagaaacaacctaaatatctaactatgggataatggttctcaactggggcgatttggaaatttctggagatatttttggttgttacaacttgaggtgggtgttattggtatctagcggtagaaattagagtaaacatcctgcaacgtacaggacagcctcccacaacaaagaattactggacccaaaatgctgatagtgtcaaggttgagaaacctggctgtggacggtagtactgtggtgttctggtacctccatacagtgaaatgctttgcaatcattaaaatgaatgggacaggctgggcatagtggctcatgcatgtaattccagcactttgggaggctgaggcgtgtggaccacttcagtccaggagttcaagaccagcttgggcaacatagtgagacccctagctctatgaaaaatacaaaaattagctgagcatggtagtgcacaccttcagtcccagctactcaggaggctgaggtgggaggatcgcttacgtccccgaggtggaggttgcagtgaaccgagatcacgccactgcattctagcctggctgacagagtgagatcctgtcaaaaaaaaaaaaaaaaggaaatacctttgaaaggttttcatgatatagagttcatagccctgccaccctgaatgtgtctgatgtctcctgatcttggtagctaagcaggattgacctgttattattcgagaggagaccactagctggcctccaacttctgggctcaagtaatcctcccgcctcagcctcttgaatagtataggtatagcccaactcacttggatcttctaattcaattaaatcctgacattttctacctggagatagcctcagatcccataggttgagagctcagtcccacaagactgttcccctgtgcctcgcctttgggcctgcagaacttctgaccagccagtttcaagttggggttcccatgacaccctctttgggttcaattaattactagagtggctcacagaactcaaggaaatttactaacctttactggcttattataaaggatatcacaaaggatacagatgaagagaggcatagggtgaggtgttagggaagggactctgggcttgcacggtccctgggcttgccaccttctaggaacctccttgtgttcagctgtccagaagctcatctgagccctgtccttttggatttttatggaggcttcattacacaggcaagattgattaaaccattggccactgatgatcaactaaagcttcaggcccctttccccttcttggaggttggaggatgggctgaaagtcccatcctctaattgtggtttagtctttcaggtgaccagcccctcagcctgaagctacctagggattaccaggcactggtcaatcattggtatacaaaaatacatcactctggagattctaaggattttagaagttgtgttacctggaaatggtgttgaagaccaaatacatgtatcacaatatcacaatactgaataccaaggatgtgtcaggcacccttgcaaggcctagggaatcaacactgacaggtccctgccctcatgaagctcacagtatagtgggaggccagacaataggacaaggaaacaaaaacaaacatgataattgctgatagtaataaatgtaatagaaaaaataaataggctgatatgacaggcagaaaccggggagagggtatttgggggctacttgggataagaaaactagagatgacctgtatgacctgaaatctggaagttaagaaggagatggcatgcagagagctgagaaagcgcattaggttagagagttccagttccttatgatgggagtgtctggaaggtttgtgctgctacacagcctgccagattggggggtgagcactcgtgcacactgctggatgagtgcagtgccccaagaatttattacactctacaataaaggaggcaatctgcttcccagtaaaggtcatttttgaagttcaaagtgctagcaactgtctataattatgcgttccacatagtttacaacatagaggtgccaggctatagtggatatagtcatggaagctaaagtaagtttcatccagaaagaaaagtgctctgtctccttcctagtgggcaggaagggcattttaatgaagattctggtatttcaagattcactggagttgctagaatgtggaccattgtgtgtatttctttctttccttttctttttttctttttgagacaaagtctaggtcttgtcgcccaggctggagtacaatggcgcaattttggcttactgcaactttgcctcctgggttcaagcgattctcctgcctcaggctcccgcgtagctaggatgacaggcagtgccactatgccctgctaatttttgtatttgtagtagagatggggtttcaccctgttgcccaggctggtctcaaactcctgacctcaggtgatccacccaccttggcctcccaaagtgctgggattacaggcgtgagccactgcacccagccccttgtgtgtatttctgacagacaacccaagaaattacaggctgaaaccagaaaagaacacattaaagcaccaagagaaagttggagtgggttgaagggaaacagatttttaaagttaaggctctgtgaaatgggtagaattaactacaggttaaaaataaaatgttaactaaaggttgcctctgagtaacaggattatgggtgattttaattgtcttctttgtgtatgttcaacagtgactataatatgtattacttttggaataaaggaaaacctgaaaggtgtgttgttttataagggcccttaggttgccaaaattagagtcattgaaatctaaagctgataaaaactttagtgcaaagattgtgacatgggagactacacataccagatccataatgtacatgaggacagtaggccgaggggccctgcacattgaaagcccacatgggagaagcccttgggaaggggagtggaaggatgaggcaaggggccggggggatgcagaggctggcaggcagtcatttctcagcttcagccattcccgccatgggggaatgtggacagagaagccaaacaaatctcctaaacagtaaatgtcagtcttctgtgtcagatatttaagaaaactaacagaggtcagagaagacacacctacagcaagtagactgtccctgtgctgcctttttgcaacccctgctttggcagtgctcaagcccacctcctgctctgtgcagacatctcttctttgctcttactagaccaaggtgaaagaaaactctcaccttctcccatctggccccacagcatctggaacacactgatcctcataatccttgttcttgagaaatattaatgacttaatctcccaagcttgctccctctcctgtgcaggccatctcagtatgttttgcagacaagacccagagaagtccagactggacttgttgcagactgcaaaactgccattggaaggcctccgtcccagtccttctacagagtagccagtgggattcccagccatgggcgaggtgacagcagaggaggtggagaagttcctggactcgaatattggctttgccaaacagtactacaacctccactaccgggccaagctcatctccgacctccttggggccaaggaggctgccgtggacttcagcaactaccactccccgagcagcatggaggagagcgaaatcatctttgatctcctgcgggactttcaggagaatttacagacagagaaatgcatcttcaatgtcatgaagaagctgtgcttcctcctgcaggcagaccgcatgagcctgttcatgtaccggacccgcaatggcatcgcagagctggccaccaggcttttcaatgtccacaaggatgctgtcctcgaggactgcctggtgatgcccgaccaagagatcgtcttccctttggacatgggcatcgtgggccatgtcgcacactctaagaagattgctaacgtccccaacacagaggaggtactctcttccccatgagagagagggcatggggcattattacatggagttctggggtacaggtggggtgaggggcattggccaccaagacaaggctggtgacaacatggtgcttcttctttatttatttacatatttactcataattctttattttgaaaaaaaaattcaaacttaacagaaaagtttgaaataatacagagaactgtatgtctttcatccaaatttatcattcattaacatcttgccacatttgctttctctctccattttctctgacccatttgggagaaagttgcagacatcatgccctttgtctgtaagtactggcgatgctcccatcattgtactgtggataggtaagaaatgtccctgttctggaaatacacagtacttccacagtacttctacacagtacttccacagtacc

SEQ ID NO: 10674 - DNA, 6000 bp, Homo sapiens
tgaagttgtaatgaaaaactgggggaggtggctgttgaccaggaaaggatcttgggacaggataaacaggcacactcaagactctcctaacttctgattttgtccaaagttatcttttcttttaacatgaaaacgaggtatgtgttagactggggagttagcagatagctgggatggaagacagcacaaacattaaggccttgttcctgcctaggtccctttgcacacaaccttttgagttagaagaaggcaagatggcagtctcactgtcttttccttccatagataatgtcttgctgttggatggcactgacctagtggctagcagcacataagaaatagctgttattttttgagcaactactacggtccaggcaatgtatgtggccttcatttaatcctcatagcaaccctatggggtataggtattatcatctcaatttccagatgaggaagcaaaggcttagagtaacaaataagccactttttgtccatggcagtggaaccacagtgcccctactcttcattcctgaagaaaatgctatattttgactccagtattgattattttcctgtttttcttctagtgaaaagtagtttatcagttatgtcccataagcttaactctcgcttgttttctctttcattaaatggcaatttattggaggtagcgctgtataaacaggggacagtgtgtgtatctgtttgcctgaagataagaaaagggaaagggtacttctggaaagtgaattatttagcttaaaattgagcagtttccctaaaacatgagtcagcagcaggagggtatggatcagccagaccaggaaccacaggcttaattattagctaatggggagtcaagggaagaacagctacccacttcccccatcgcctcctcacaaccgtcttgtttgcccacagtcttattctccccatgctgtgatcctgtgagaggagcattagtgaaagagtgaagagacaaagtataaaatgtgtgagatcagcctacatctgcaccctgcttctgataaaagttaacctctctgagacctggctttcttgtccataaaatgggaaaagatcatactaacagggttctaaggattaccataatgtggataaagctttgatccagcacaatgtcatcacatagaagaatgagttagtggcagcagttattaatgtgatgctagtctatgtgtcacaaatgatgttgcactgaggggtggagggatgggggacgggtgcagatgcaagaggagatagttttcagaggaatgtgtactcaggagggactactcgggctccatcaaccatcaggcttccacaggaaacttgggtcccaggcatctagagttctcctagggcccctggatttcttttacttctgaaagatgagaaatagctgttctgctgatgctgccaactcacggagagctgggaagctccataaacttcacaagctattgccgtaaattggaagagatagagggggacttctctttgttaggcgctgtagttgtgctttttcatttagtccttacagcagccccagcagaggttgtgcctcgcccatttcccccaggcattcgccattctgctgtatacccacagagtcctgttgcaagtacctgagactctgcctgaggacttctcttggtttgtgttggcacaagctgagagtaccagggagttagtgcccctgggacagctctcagccagtggaagtgggaggatagataccccagcttcctcactcagtgagggacaactctaaggcacattctacctatttctcagggttccctgtgggagtgaacctctctaagctcccagtaacaattaacgtacacttccttggcttctttctcttcctacctggcttccagctcctcttctgtattttcctgatcaggactgggactagggtgatgagcctttattcttgggttcatctaagtgcaaggttggcacccgtatgaacctgagagggtctctttacattctgtaccctaggcatatcatttgcattgccctgattctggccctgtcctggatcacttcccaaataaagttatttgcattcaaattaggtctgcctctgggtttacctaacctaaagcaaatcctatgaagacatcagtctccaagttttatacaaggaaaaccgaggctcagaggaataagaaatttgtctaaggtctttcagttggtaatgagatgggattttgaaaccaggtctgcctgaccccagagctgaagctttctgtactatagcacactacttcctacttctcatttcagtcacaaaactaatgactcaagggaaatttcaggtttggatgagctcatttttgcctgtgaatcagggtagctttggccttaggttgttagcagatgggaatttggggaggggaaggcaggtagtaagtggatgagagggttgtagttgtcagtggaaagatggactagtggaaagactgctgaaaccatatgcaccaggaagacagtaagagcttgcttgcttcctctcagtttcaaaagccctggactttttttttttttttttttttttttgagacagtcttgctctgtcacccaggctggagtacagtggcgtgatctcggctcactgcaacttaccctgcctcccaggttcgagcaattctcttgcctcagcctcccgagtagctgggattacaggtgcacaccaccacgcccggctaatttttttaatttttagtagagacggggtttcactgtattggccaggctgatcatgaattcctgacctcaagtgatccgtccacctcggcttcccaaagtgttgggattacaggcgtgagccatcatgcttggccagccgtggactattgagattgtgggagggctcttcaatttaacaaaaattaattgatacttgttccttgccagataaagaactgaggtctgaggctgcacgggtgaataagaaacattctctgggagcccatagtacaatggggaagaagaacacataaacagatgcctttaataaacagatataaatgcagtgatacaagaacatgcatcataatacggaaccaataagcagaccacactcagctggggtcggccaggaggagcttttcagagaagggctcctcattgtcgttgatgattataatttaagggatgaggaaaaatgaggtgaaaaggtgggagaggccaaagggagggtcattccagacaagtcagtgcaaacaaagacacaacagaagtagctcgatgtgtgtaggagagctgcaaggcacattcacggtataaagggtgtggaacaaattgggggagcttattgaggatctctgtgcctggcatgggcactgtgagtggtgagaagcctgtgagcaagcgcagagggaaggcctgacctcccagcccatcggcagtgctctggttgtgcccacctctcccccagcaaactgcctttcctcattccttagctccatctctacagttggagattggcactaaggggctatgagggaacctcgtgaggacttgtccttccctttgttggtcagtggccatctggtgtctgaagagaaccgctggcagctgcagtgcctctgctacagccaggctgtcccagctgctcacagacctcaagctcagccatccttctccctccactggccttgacccagactttccctggcattctgactagggaaccaggacccctgctcctggggtctggacacagaccttccagaaacgcagatgaagagccctggccatgcttgtcaggggcatatcctcaccctggctcaagaaatggcaggctatctgcatgaatcacagctgggcctttcatagtcagttccacattctcctctcccaactgaacaaagttgaaagggactgggatcccaggctaggcaggatgctgtgttgtttgtgacagccactctaccctctgccaccccatcccccacttccctgcctttcacagcctatatgcctggttggtacccagtaaacttcacagcaggactgatgtttggcatgtttcctggcctcttcatgccactactgatagaggagccactatctctggtctccatcctgatgtcatgtggaggcctactatctgtggatagagttactgctgacaaggcagcctgaagctttaaagtgtatccatgccttcaacaaagattgttgcaggctgtctagtattctacattggtgccccaaggttctgtgcctttgaggagaaattcccacagaaaaacagcttgttcgccaatagctccacagcagcctaacactccccttcttccagtagagaagacctaagatgtgaacctactctccctgcgcaggctacagactaaaggctagactccgcagtctgcctgtcacctcctctcccactatatattcctaccttggtgtaccctcttcaggcgcctggagctgcacctcattgctgtgtgtgtgtgatttgtggttgtgcacatgctctccactttgtcaaggaccacttttgtcagcatactgctgttctttcttcaagactcagcttcttcagctagccctgcccactctcggcagagtcagtcccttccgcttgtgctcccacattgcctcttgctcaaaagtacttaccataacctttccaggctaggcgcctccagctccttctaggggcgagccaccacctcagaactcactatatttgcaaaataaacagccctcagcattgtagagggaatggcccaaaatcttagacccagttcaacgctccacttcgcggtaatcatcttgctcaagttttcaccacagccttgcctagcctgggctactcttagggcaggcttggaaggaagtgcagcttcctgaattagctgatgtttggtaagtggtggtggaggaaaagggtggggcttgaggatattataactcgggtcacccctgagtgttgcttttggtcattggggtgcctcatattgccagacaagagctcagacctgaggagagtgactagcttctctgtgtcccaggtaagcacttcggtctaattactgcctgctccttccacagctgtcttgtcctcatccctcctgtttggctcacaccaggggaagtggacactggaaagattaagccagctggttctctttctttgtttttgagatggggtctctctctctatcacccagactggagtacagtggcacagtcagggctcactccagccttgacctcctgggttcaagtgatcctcccacctcagcctccggagtagctgagactacaggcgcacaccaccacacccagctaatttttgttatttttttctagcgatggcgttttgccatgttgcccaggctagtctcacattcctgggctcaagcagtctgtctgcctcagcctcccaaagtgctgggattacaggtgcaagccaccacacccagcctgccagctggttctcgatggcagctcccaacatcagtagaggtccctggggtacttttcaggaggaaaactcacttcgtgtagcccattcagctaagggaagccacggggcccttaggcaaacagaccctgggctctggggatactgcagtgaaggagacatgtccctccccacagggaatctcagtgggaagagacagagctgaatacatttacctagcatataaatattagggctacttggggattgcttcacagattctgtcatgtaaaaatgctgaataaatattgaatggatgagggaatgaatgagtgagtgaatgaataaatgaactagctgggccttgagaaagacacgtgtgtagcccttagtccttttcgaaggtaattgccccagttacctcattttatccttgaaatagacctgcagcatagaacaagaattccacacccctatttgacagatttggaaactcagcataggtatgtatggtttggggagatttatcagaagctgatttgttgctttattaaata

SEQ ID NO: 10675 - DNA, 6000 bp, Homo sapiens
aacggtgccttttacagttgatgacatgtattagaagaaagatgatagtacatatcttgccaaggcagagatactgaggggaagaacagattttcttggggcaagagaaaggggtgaaatagaattagtttggttttctatatgttaagtttgagaatgacctatgtgcagttgaaaatttagggctgaaactccagcgggtgatgaagtatgttctgaaatttatgtgggaaaactccttgagttcttaagaatgtgattatttgtacctcttgttttccaaaaataatttcaagtgacagatcttcactataggtagaaattctttcatttgttgccaaagcctcagctgcactgctagatgtcatgataattttataagatgataaggtattaagtttttcaaataaattagcagtgaaaaatgagatgtgataaaaaaattagtttgcagccaataaagtgatggtggaattttgtcatgtctatagtgattgtatgtgaaacttctgatagaaatgtctggttttaatttatttttttctggatgctttactaaagacccatgtgcaaggggaaaaattaaaaacagacaactttggatccactgtaactttcacatgccatcagaaagtctaagataaatgtttcatttggcaatcatggatgaagtgcaagcaaaaagtaaagtcaatttacattttaatactcctatttgaaataataaaatggtatttggacataggcattttactacgcttactggtagaatgcatagtttggttgaagttataaaaaaatgcacacagcaaattatttctgttccactctcaggtctatatccttatttgaaatgtaagaaaaaaggaaatgaaagaggttattacatttttttaatgcaagcccagtaaaaggtaaatttatcttttccgatctcttgccagcaacgtggagctcctgtccccaatatctcaccaagttcttcaggaaatggcaactgatcaaagatgaaattttagaaaccaataagatctatagacccaagacagcaatcacattaatttgtatgagcttttcctaagcaaaatagcaaatagagatagcactgttttttttcatttttttgacattttaaaagttccagttactttcattcacttattccatacatcctttggaggctgctatatgtgagggactaggctagatactgggaaaatgataatcaaaatcagatatgatccttgtcttcagataacttactttacattgtagagaaagtgacaatgatagtgtattaaaactgagacatgagaggtgctacgaagaaggaagatgtgatgctaggagagtctacagaaagagctgacataaagggaagtcagagaagtatttttcatgtaagagcataggaaaagatgtttttggatgcagaatatctaactaatggaggtttaaacaattaagtcatttattacctcatgtaacaggaagtttggaggtattttcatcaggtttggtttaaaagtcggttcaggattggctcaatgatgtcaactaagccctaggctcttttcctctctctattcctccaccccttcttgttagctaagctcttatgcttgtcccttctagttcagaagatgccacagttctaggcattatgtcctcatataactgcattcagacgcaggaaaagaggtatttcttcttgtatgtcttttttttttttttttttcagaagtcttttttctcaaaagggatttcagatcctgttggctttggacatgttcatgtgctagctgcaggagctaatgggaaagccaatatacagcaactttagtctctatcataggagtcaggctctgtcagcaaggatggcggaggtgaaaaatgcctgtaagacgtagtttctaccatggggagtgactctgaaggatgtgactcacagctgtgatctgaagggcaaggaggatgactagagaagaggcaaagaagtggactctagtagttaacaacttctggggcagcacattgaaataacaaaatggcacttggacctagacattctattaagcttaatggtacagcctgtggtataggtgaaatagtataaataaatgaacataccaagttatttctgttccattctaacacctatatcctgtatataaggtcagaaaggacctcaggaatgggcagctgagggaatccagcagaaagtgaagggaatcaaagattccactagggttctggcaatgctgatgttggattatgggctgtacaaaagacaaagagactagagaccgggggctttcctggggaattcagatccatggaagttggggactagaataggtgttaggtggagaggttgagctttggttggtagggccagtaacagggctataggaagttgctcttatgaacactgggacacatcccattattccttcacatagaaaatctttattaaaattcacccagacaccaaagccacccttgggcttaaaatttctctctgaaatagagaacccagaaatagccacacacaagtatggccaactgatattttgacaaaggtgcaaaagggactccatggaagaaggataaacttttcaataagtagtgctagagcaattggatagccacaagcaaaaacctgaacctaaacctcacacctattaatggaaaacttaactcacaaaaattacatagacttaaatgtaaaaggcaaaactaaaacaacctttgaaagaaaacaagataaaatctttaggatacaggattagagaatagttctcagacatgacagcaaaagcacaatccataaatttaaaaaatgaataaactggacttcatcaaaattaaaaatatttgttctgtggcagatcttgtcaagagaatgaaaatacaaactacagattgaagaaaatatttgtgaatcatgcatctgacaaaagacacatctaatatatgaagaactctcaaaatgtacaggtaaaaaaccaaataatgctaattagaaaatgggcaaaagacataaggacatttaactgaatggaatatacagatggcagataaaaacatgaaaagatattcaacattattagccaccaggggaataaatgtaaaactgtgatgaggtattactgcacatttattatttactttagctcagctaaaacaaaaatagcaataatagaaaatgctggtgaggatatggagaaactggatctctcatacattgctggaggaaatgtaaaatgttacagttactctggaaaacagtttttaatttctttaaaaaatgacacatacatgtatcacatgacctggcaattgcactcctgggcatttatctcagagaaatgaagatttttgtccacataaaaacctgtattcaattgtttgcagcagttttatttgtaatggccccaaatgggaaacaatcaaaatgttctgcaataggtgaatggttaaacaaattgtggtacatccatgtcatggaatattactcagcaataaaaaaggaatgaactattgataaacacaacaacttggatgggtctcaagtgcattatgccaagtgaaagaagccaatcttagaaggtcatgtactgcatgagtccattcatataacatctcaaaatgtcaaaattataaaaacagaaacagagatcactagggttaggagggcaggtgttaccaaaaaggttagcactagggagatctttgtgagggtggaatagttctgtatcttgatcatggtggtggttacacaaaatatgtagtagaatgacataggactacacaaatactttatatcaatgccagtttcctggctttgatactgtactagagttatacgagatgtaatcactgggggaaacaggtacacaagacatctgtactatctttgcaacttcatgtgaatctataactatttcaaaatgaaaagtttgaaagaaaattttctctgaggcatctctcccttgccttccttcatcttgtgcatttctttccctgagtatgactttttctctttctttctccctttcccttatgtactgggttttcctttaacggtccataatgccaaactatgtcattccccatcctcctattgttcctatttatttaatgaaggttatgttttcatgtgcttaattttaaaagcaggaaagtactaactctttaaacaaatttcttaaaaaacaaaacccaaaactaacctgctttttattttatataattcagttagtcattattctttaaggtcggaagtccacaatacaaacatgtttccaacacttgtattggaagataatttttgttttatatgcatggagcattaatatcattcttcatgtctatggattatgaacacacacacattcaggatttactggggaaacagtgacatcaaatattatgttctattgattcttcatataaatctacatgtcaaaaaataatcctttgccagatcacgtatccagatttttcgtttggaaaatacgaacattactactacagaatatcaaactgaatacagccctgtcctgagggcttgcaaagtgaatctggcaatactttggaaaagtactactgcaggttctcaaggacccaaagagctctccagcttttccagtgggttcagccccaaatatcctaatttcttcaataaattacgagttgcaggtgtttaaatatgcaagtatattttggtcttttcgttatcattgtaaaacaccagtcctaacaagcagtaaagattacactttatggtggtaatatttacagttaatgcacttctgcatttcttcccgcacatttttcttcttacttatttaaactaagcgtttcccctctttttttaagccccagtattaaaaagaaaataaaatcccaaagaatttcgcaacattgcgattgcactggcttgagaacgaaggaagttagtcccttgcggtgatccgtcctttcatcctggcgtttgcctgcagcaagatggcggcggtgtcaatgtcagtggtactgaggcagacgttgtggcggagaagggcagtggctgtagctgccctttccgtttccagggttccgaccaggtaatagaattttcacacttttcttcaagcttcttgggtccctccatttttgcggagtctctgctggctgagttccggaggaggcctcggggaaggcgtcctctgttgacccttttctcgggagaagtcgggcggactagggactgtctgctatcaatgggcgttggccaggcgagtgagggcgtgagtgcgaggccggggaggaggacctgtggttttctggaagctttcgtattcggcttgtcgctgagggagagggtccgtggaggttttgcctccggagctgcaagctgaaccttagccctcagagaaggggaggagtctcactgatttctgtttccactttctgcatcccttccatttgtcacctgtttgcccaccactccagtccttacagaagggttaaatcactgtatcccttccatggttttaagtggttttaatttggtttctgcataggaagattgtttattcatcagtctgcttgggaggaaaacttgtttggaattcagtgttagtaaaaatatcactgctagtaatattggaaggtaatttttaaaaggctggtggtaatgcctggaggttttctagggattttgttaaagcctcacaataattcagggattgaattgagttgttgagggctctttgcgtccttgagaacctaaagtagtacttttccaaagtattgtcagattcagttgtcagttgattgagttgttactgtttttccttgaagcatttttgtgatgatttttttttttttggctgtattaaccttccattttctatttttcagaatttcctggagttttttaaattatagtactaatgctatacgtacatacacacacatattagaacaaagattggaaagactggatggaga

SEQ ID NO: 10676 - DNA, 6000 bp, Homo sapiens; identical to SEQ ID NO: 3432

SEQ ID NO: 10677 - DNA, 6000 bp, Homo sapiens
ccacatccttacccacacttcttgttttctggttttttgtaacagtcatcctaatagatgtgaattggtatctcactatggcttggatttgcatttctctaaagattagtgatgttcagcatcttttcaggtgcttattggccatttgtatattttctttggaaaattgtttacaacttttaaaaaatctgtttcagctcagatttcttttatccaagatattggaaggctccctctgaagcgacactttggaaggtaagctgatcatctcaatttccaaaaagctgataatgaaatgtctactgaatatgttcagtatgaatcaataactgttacctgtaacatccaagaaagacatactgtacctagtaatttataaacataattgtattgtagacccttccttttcttaaatataacagcatatcttcacccactcccaatggactataccagattaaatggaagcatggaatcacaaaggcagaggaatctttaaaatcctccaactcaacaaatctagaaaccccttgccagctttcctgttgagagatgttcttagcctatgcttgaagacctgcagtgactaggaactgcctcagaaagtagaagagtccttcatattttcttattttagaaaatttaaacaagcaaaaaatagatgtctgtctatatatatatatatatatatatatatatatactgttcattttattggaaagtagcttctgtgccattatcagtgattaacacaaaacttatatttcagtttgacttagcttatttgtaagatcgaattaagcacttaggaattgtttaaagattttaaaaatggccgggcgtggtggcttatgcttgtaatcccagcactttgggagcccgaggcaggtggatcacctgagataaggagttcaagaccagcctggacaacatggtgaaaccgtgtctctactaaaaatacaaaatttagctgggtgtggtggcacatgcctgtaatcccagctactcaggaggctgaggcaggagaatcgcttcaacccaggaggtggaggttgcagtgagccaagatcacaccattgcaccccagcctgggcaacaaaagcaaaactccatctcaaaaaaaagatttaaaaaaatcttgcttactgaatgcatggacaaaagtaagtgatagaaatggcacctctgactcctcctaccttttctcctatttctggtcccaaatggaaaactcctgtgatgtgagctttttccccctctttaccctccaagattcattaaggcctttgtagtgttaatgtttttttctgtatactggcttagctatgtggggcccatctttcctatcgcagaaagaccatgatggatggatcttgaagcatcgtcccactgggatgtgatcagggcttacacatttcataaacactgcttttcttctcacatccctctgaatgaaagcaggaccaagtctctttgatggcttctctccccaaccccctaagattatggcatcaaaataaagacaagtatgttctattgtatttttgctcctgagatgtattgagttgctgcaatttacacaaggctaaattgaatgagaatcttcactattttattattggttcaactacctacttgatgtgacttgagaggcagtattttcttttcttttttttttgtagacggagtctagctttatcgcccaggctggagtgcagtagcacgatctcggctcactgcaagctccaccttctgggctcacaccattctcctgcctcagcctgccgagtagctgggactacaggcgcccgccaccacgcccagctaattttttgtatttttagtagagacagggtttcactgtgttagccaggatggtcttgatctcctgacctcgtgatccgcccacttcggcctcccaaagtgctgggattacaggcgtgagccaccacgcctggccacgagaggcagtattttcagtgctatatattacaatgactggtactatcttttatttatgttgaccatatttaaaaccattgttcatatgtttagtatttagtattaaatattaatacttaatatttaataggtgtttaatttcctgtaattcaacctacacgttatttttgcccatttagctttttttcagcttttactatcccagccttatagataagtcatcatgcacttcaaatactatttacttagggtgaattcctacaaatgaaattgctggatcaataggtatataccttttggggcttttcctctttattgccaaattgttggcaagaatattttgccagttttgtatccacttacagtgtatcagtatgttcttttctcctaacccttgccaccactgggttttaaaagtatctttgccagtttagaagatgacagtaataggccaggcgcagtggctcatgcttgtaatcccagcactttgggaggctgaggtgggtggatcatctaaggtcaggagttcgagaccagcctggccaacatggtgaaaccctatctctgctaaaaatacaaaaactagctgggtgtggtggtgcccgcgtgtaatccctgctactccagaggctgagacaggagaatcgcttgaacctgaagtggaggttgcagtgagccaagatcgtgctactgccctgtagcctgggtgacagagcaagactgtctcaaaaaaaaaaaaagatgacagtagtagctcattatgttaattttcatttttaaaattacaaattagatttaacaatttaggaaccatttgtatttgttttataagttgtccatgtttgtgcccatttttctatttcattttttcctttttaatttgtaaaaattctttactgaaggctgggtgtggtggctcacacttgtaatccccgcactttgggaggcggaggcagatggatcacctgagttcgggagttcaagattaccctggccaacatggtgaaaccccatctctactaaaaatacaaattagttgggcatgatggcatgtgcctgtaatcccagctacttgggaggctgaggcaggagaatcgcttgaacctgggaggcagaggttgcagtaaactgagattgcaccactgcactcctgcctgggcgatagagaaagacagtctcaatgaaaaaaaagaaaaaagaaaaattctttactgaagacattatttctttttatttttaggtgtttttgttgttgtggtttggtttggtttttttgtttgtttgttttttgtttggagacagagtcttgctctgtcgtacaggctggagttcagtggcacgagcttggctcactgcagcttctgcctcctgggttcaaacaattctcctgcctcagcctcctgagtagctgggattacagatgcgtgccaccacgcctggctaatttttctattttcaatagagatgggtttttgccatgttggccaggctggtcttgaactcctggcctcaagtgatctgcctgccttggcctcccacagtgcagatagtacaggcatgagccatcgtgttcagctcctttttgtattttaagttgtaggaacttattcagtttgtcatttaccttgtagttttgtttttatagttaaagggactagctaaacagcacaatgtaggtaaatgaaagatggcttcataatcatcacactcatggtgtaatttaaaaatcttctcctttggttcttattaatgcctgcactgtgaatctgacagattgaaaatggaagccctgactgacagggaacatggaatgatagaccctgacagcggagatgaagcccagcttaatggaggacattctgcagaggaatctctgggtgaacccactcaagccactgtgccggaaacctggtctcttcctttgagtcagaatagtgccagtgaactgcctgctagccagccccagcccttttcagcccaaggagacatggaagaaaacataataatagaagactacgagagtgatgggacatagaagccagcctgctaatcagattgctacttcacagcttcatttttgtttcattcagtggtacttcagcagagttaatatgcttttctgatgaattacacaacagtttgttaattcttcattcttgtagtatttcatcacaagaaacctactcttctgtcatcttgaagtaaatagaagatcaagccttcaaatctcttaattttttcggtatttattaaatctgtgagtggtttaaggagcggtcagtgtgtataaagtgtgtttgaacattatgccaaatatcaagatgtgaaggactaattcaggatgcaaaaacgttattggggggttgtaaatatcaactattcaacagtttaggatgcaattacgagtgtaaactgtgtgccttatttacactttattgtctcccgcttctcagatagttttgatgtgttgtacagtggaatatcttagatactttttggaaagtatttacataagttatatcacaattaaaatgttgaatttaattttgtttctcctgtcttttaacattatctagcacgcactcgctgccatgggtccttaagcacagtgcaccaatctccctcccccagtgtcaaacttttcaaaagatagggaagaggatggcaacgttgcgatgagaactgtaaactctttccaaaagagcccagtgtgtggtcattgccgcgacgtgccggctggtggcaccgagcagcctgggcccagagcggttgtcgggccgacagatccgggcggggcaaagccgggcggggaaagctgggctcgtcccgtcccggccccgcccccaccccgggagcccgataccggtttcagagtcctgggcagcgtgcgcgctcttcctggcggctgcgcaggtaagtgggaccggggtggggccacgtgaccgggagaggagggcccggcggcccccggcccaggtgtgctgcgacggacggctgcccgcgctcggcgctcagcctgccatagcccgcgggggaggccggagccagggatccggggaggcccgcgtcccgccaggtttcgctctgcggacgcaggtgcggccgagccgccgtccttccgggcgcggggcggggcgcgcacctcggggcgatctcggtgctccttacctgggaggtctcccggcttagtttcggcctcgttgggtcggaatctccaaagacagtgggtttcagccagaaacgcgaagacgaacgcctagccggcgcgggcagaaccgaggacacaatgagatttgtgggaccgggcgcccagaggctggcgcgggggagaccccacagctaaaatgctcggtacccccgggcagtcgtgggttagttagaaccgcagagcctttcccgacccctcggaagcgcagaagtatccgaaatctacccgtttcttgggtccagcaaaacttttaagccaggtaaaccggtggttctgtttgtgtaaaggtgaccaggcatgattcctgtgacactttgctggggcagccatttctcctgccattgccgcggctttccaagatgagtgtccaagagtggagtaagggtccggggcctgagcaggacaaagacacacgctgccgcgacctgcgggaccagaacgaactctcagtgacatcttgaaagacattaggggtatccagatatttaagatgtaatgaaatacagctaaccattcccttctaaaaatcacattatcttgcttttccacaactctttaataattgcttgttttttctttaaaaatggatagggtggtttgattcaaataagccacttcacaggtgaagagttaaatccattacagtgaatcgtatttttaccagtgagttgaattaagcatagcgtatcctgtaaatgctgtgtaaaacttgctaaaatcatttgttgtgcttttgcttctacatttcttaggaatgtgtttcaaaaactagagtcgtaatagcatttctagaacttacacttttttagagaaagaaagagaaaggtaca

SEQ ID NO: 10678 - DNA, 6000 bp, Homo sapiens
agaaattcagtttctaaatcatgaaggttagacttattgatttcttttattttaataagagaacatgacctatgatatatttatcataggtcatccttaaaagatgatcaaattgtacatattttccatacatgctggaaaaatatatgatttataattttagagtatatgattccaaacaaatattaaatcaagctgagtaagtggcattcagatcttctatattcttattaatctctgttctgctgtctcaacttactaggatttgcgaatttttccttatgtctattttcctttgtgcatcttagtatattgttagattagaaccatgttcagaactataatgtcttcctgatgaatttatccttaataattctaccttacagtatactttgtctctatttctattcagctttgagttactgaacacttttttctctttacttttaagtttcagggtacgtgtgcaggatgtgcaggtttgttacataggtaaacgtgtgctatggtagtttgctgcacctgtcaacccatcacctaggtattaagcccagcatgcgttagctcttttccctaatgctctcttcccccacctgccctcccccgacacctacagcacctagtattcctaggcagtctcccatccaagtactaaccaggtccaaccctgcttagcttccaagatcagacgagatcggacacgttcagggtggtatggccatagcctattttctaatttaaaaaaaaaatttttttttgtagagacaagatttagttgctcaggctggccttgaattcctggcctcaagagatccctcccatgttggcctgccaaaatgctaggattacaagcatgagccaccatgcctgacctctttactttcaactccatattgaaatatgcttacctatattatgattactgatacataggtcttttatttctacaatctttgtgttttctctttacagagttttttcgatgctttttgttctcctttctgtcctgttttccccaaatggtaaagctatgtattttatttttaccaattttcaccacgaatatttaggaaataaactattttcaatctaccttccttcctacaaagctctgtccttctattggatttcctccatcagcaagttacacattttatcttatcccttctctgattacccttcattttacttattaagaaatatttttcctttcaactgagctggcaagaatttcagtcttttcatttgctagtattttaattcacttttgtttctggaacccctaaattaatagtcattattgctagtttatatagtcaatacttatttaagtttaccaatatgtttacctgttttacatatcttttttttcgctcctcattgcttcttgtttcctatgcctttcttcctgcaatcagttgtcttactactgtatacaatttagtagttcttactcaacaatatgagagtattaaacaccatttttatctgaatggcattatttctccctggcacctaattatctgaatatagttatttggattcagagctattctccttcagcattctgaatatactatgctattacattctgaaatctacctttactgaagaaaattctgttgtgaatataatgttcttctaaaggtgaatctaccttttttctctagtagttttataggttttaaaaaatctttgtaatactataatttcaatacatgcataagggtatgaattttttaattttatttgctgaggactcttgtgcctctctaactctggaaaagtctcatctattctctttgaatattcttctttcctgtcctcctcccattttctggccactcctcaggagacagtcatatgttgaaccacaggtcttagtctatcttccataccttatttattaaccactctcgtgttttccatttccaagtttagagaatttccacagatttatctttgaattaattcattctcttcatctgtgtttaatctttacctttaatcactctgttcttttctgtaagtttctaaaaattcaaattgagtccttttcttgttttttgttttttgagacagagtctcgttcggtcacccaggctggagtgcagtggcgccatctcagctcactgcaacctccacctcctgggttcaagtgattctcctgcctcagactccaagtagctgggactacagggctgcaccaccacgcccagttaatttttgtatttttagtagagacggggttttaacatgttggccaggttggtctcaaactcctgaccttaggtgatccacccacttcggcctcccaaagtgctgggattacaggtgtgagccactgcgcccggccaacaaaatatatttcttaaagtaacctgagtcctcccagaaggtatagtctgcatttcataagggacagctgacaatctaactcttaaagatgtttggtgacaatatcttcagaaagaaattaccttataaatcctctaacctttgtataaaagaaaatggaacatcttttattactttttaaaaaaatacttaccagatagttattatatttctacatactaatgaataaaatgaaaacactaaaatgatatgtatcactgatatcagcaaaaatggccaagtaaggaactctaaattccactactccaaaaaggcaaggaaaaaaatgggcaagaactgtcagaattaactttttccaaactctagaaatcaataaaaggcttgaagcaacccagggaattttttcttttaaacagcaaatttcgcagcattttaacttacctagttccatctcccggcaactcaacttgtaagtatataaccaaaagatttgaaaacagggactcaaacagataactgtaggtgaatgttcatagcggacttacaatagtcggaaagaagaaacaatccaagtgtccgtcacatggataaacaaaatgtggtaaatacattatattattcaaccattaaaagaaatgtagttttgatgcatgctacaacatggatgaacactgaaaacaagatgctaagtaaaataagccaaatacgacaggacaaatattgtacgattccacttgtatgaaatacctaaaatagacaaatttcatagagaacatggaatagaggttaccaaagaccagggttaagggagtacacagggaattgttgtctaacggaatacaaagtttctatctgggtgatgatagtgatgacagaatactgtgcacttaatgccaaaaattatacacttaagaatagttaatatgggaattttatgttatagagatcttaccacaaaaaagctcaaaatatcccaagtttcatgaaaactattaatctataaatccaagaagctcaactccaaggagggtaaacccaaaaagatccacatctagacacatcaatataaaacatcaacaaatggtgctagaacaactgggtatccatatgcaaaagaatttggacccccaccctacaccatctataaaaatgaattcaaaatgcatcaaagacttaagtgtaagaactaaaactataaaattcttagaaggaaacaaaggaaaaagtctgcatgactctggattaggcaacagttttctagttataacaccaaaagaacataaaaagataaactgggtttgataaaaatgttaaattttagtgtttcaaagggtactatcaagaaagggaaaagacaacccacaggaggttattaaacatttgcaggccagatgcagtggctcacacctgtaatccgagcactttggaaggccaagaagggagaactgcttgagcccaggagtttgagacaagcctggacaacacagtgagaccccatccctacaaaaaataaagaaattagctgggcatggtggcacatgcctatagtcccagctactcaggaggctgaggtgggaggactgcttgagaccaggaagttgaagctgtcatgaaccatgactgtgccactgcaccccagagtctgggtgacagagcgagactctgtctcaaaaacaaaaaaaaaaaaattagataaattaaaaaaaaataaacatttgcaaatcaggtagctgatgatactcacattgagaatatataaataaatcttagaacataaaaagacaacccaattgttaaaatgagtgaaggatctgaaagacatttctccaaagatatacaaatggtcaataagcatatgaaaagctgctcaacatcacagtcatcaaaaaatgcaatcaaaacaacaataagggctgggcactgtggcacacatgcttgtaatcccagcactttgggaggctgaggcaggcagattgcttgaactcaggagttcaatatcagcctgcgcaatgtagtggaaccccatctctaaaaaaatacaaaaattagcagggcatggtagtacacgcctgtagtcccagctacacagagggctgaggtggaaggattatttgagcctaggaggttgaggctgcagtgagccgaaattgtgacagagccctccagcctgggtgagagtaagaccctgtctcaaaaaaataaaaaaacaaaaaacccacaatgagataccacttcatactcagtagaatggctataattaaaaaaacaccagtaataactagtatcggtggatgtggagaaatcagaaccctcataacattgagagtggtaatataaaatggtacagctactatagaaaataatttggcagttcctcaaaaagttaaacattaagagttagcacatgacacagcaattccactcctaagtatatactccagaaaaatgaaaacacaggttcacataaaaacttgtacacaaatgaatacggcagcattagccatgatagcccaaaagtggaaacaactcaaacattcatcagctgaagaataaacaaatgtgatgtaaccacacaacagtagagccctcatgaatggaattagtgttcttataaaagaagccccagagagctgcctggccttatccaccatgtgaggacacagagagaagacaccatctatgaaccaggaaatgggccctcaccagacactgaatctgctggtgccttgatctcagacttctgactctccagaactgtgagaaataaatttctgttgtttacaaagctacccagtttatagcattttgttatagcaatgcaaattaagatagctttttcttctggaaattgattaagctcattctaaaaatcacacaggaatgcaaaggactaaaaataacaggcaatcttgaggtttttcatttgttttgtgttgttataaaggaatacctgagactggataattaatgaaaaaaaaggtttatttggctcaagatttgatatctgaaaatgttcaagactgggcatctgggaagagcctcaggctgcttccacccatggctgaaggtgaaagggagctggtgtgttcagagatcatatgatgcagaggaagtagagggtaccaggcccttttaacaactagctgtcaagggaactagtaggcaactcactcaacagccccacaaggaaacaggtctattcatgagagatctgcgcccccatgacccaaatacctcccattagaccctacctccaactctgggaatcaaatttcaacatgagaaggacaaacatccaaaccatagcacttgaaaaacaagcacttgaaagacttacaatgccagatatcaggacctattatgaaaccacagtaattagattatggggcaatggtacaaaaatagaaaaactgaccaacggaataaaacctagagaaacagatacacatatataagccacctaatttaggacaaaggcagccctgtagtgcaaagcagaagggacagtcttttcagtaagtgatactaggtcaactgaacatctatatggaaaaaaaatgtatattgattcccacattatatacaaaaataaactccagattaatgacaattacttttttttgttttagacggagtctctct

SEQ ID NO: 10679 - DNA, 6000 bp, Homo sapiens
aatgcctttaacagcacccaagtcacctcttgaatgctttgctgcttagaaatttcttctgccagatactctaaatcatctctcttaagttcaaagttccacaaacctctagggcaggggcaaaatgtcactactctctttgctaaaacataacaagagtcacctttgctctagtccccaacaagttcttcatctccatctgagagcacctcagcctggatttcattgtccatatcattatcagaatttttgtcaaagccattcaacaagtctctagggagttccaaactttcccatgttttcctgtcttcttctgagccctccaaactgttccaacctctgcctgttacccagttccaaagttgcttccacattttcggataccttttcaccagcgccccactctactggtaccaatttactgtattagtttgttttcacactggtgataaagacatactgagactgggtaatttacaaaagaaagaggtttaatggacttacagttccacatggctggggaggcctcataatcatggcagaatgtgaaaggcacttcttacggggtggtggcaagagagaatgagagaagcaaaagcagaacccttataaaaccattagatcttgtgagacttattcactactatgagaacagtaagggggaaactgcctcaccaggtccctcccatgacacatgagaattcaagatgagatttgggtggggacacagccaaaccatatcatgtttatttcaatgtttacacatttcttaattgtaagattccaggcctcccagtttcttctgactgtctctgtttccataaggtctcaggtagggaaccatttctggggatctaaatattattccacttttgattctagctctctccccatcagggtaatttgttgtccctgaagctacttcatgaagctttacaacttattgtcacagcacttgattttcttcctaagtgtcttaaacattacctctaatgggccaggtttggtggctcacacctctaatcccagcactttgggagaccaaggcaggcggatcacaagttcaggagattgagaccatcctggctaacattatgaaaccctgtctctactaaaaatacaaaacaaaaacaaaaacaaaaacaaaaaacaagtcaggtgtggtggcacgcacctgtagtcccagctactcaggaggctgaggcaagagaatcacttgaacccaggagacagaggttccagtgagccgagattgggccattgcaccccagccttggtgacagagtgtgactctatctcaaaaaaaaagaaaggaaaagaaaaatacctctaatgtacctcacaacaaacatcaacttagtctgctatgcctcctgcaaacattattacttatctgaattctaccagttcattacagataatctgaaatgttgccatctctttacagccttttgtgaaaacatttgctgataggttttccccctcaattggtaaatctctactcaccaatgagggtctgacttgtagggaggtatatataacagtagttactttttaatatggtggctcattattctaataatttgaaacataattatctttgtttaagcatatgccaaaaatgagctagatacttttaatatattgcttctaatcttcacagtaatttttcaaatgggataattattatcctcattttacaaatgaagaattaagggtcagaatgtttaaaagacttaccccaaatcacatatcaactaagcaaagtctatactttattcattacatataatgcttctttctttcatgtccccacccgtttcctccagttgcctttgttttcttctggacttaaaaaattatgtagcattttacttatctagcagttagacttctaatctcagtaaactgaaaagattcacagaaagcaaaaagtaaaataaaaagtctgtagttatcaagaaaaatagtacttatagcacccagatatctaacattagtttcaacataggacctgtaaatcttatattgtgaaggaaagatgtaacaagcgtcactgcaatattataggtggtagcatattagaaattgtagcaaaatgtcactactgtctatcagggaggaagtaaaaatcatttaccaggaaagcaaagcaaatgagaaaccatttactaaaagagaaaacagttctatatctcttaatagttgaggtcatcttatattaagctacattattataatttgcaccatcatgcggtttatctacttcataggctcatttgctaaaaggattatatgaattatcatcaatatgttactttagtgagtagttcttcctacatgtttagagcatttagcggaaatagatattacatagagaatataaaagagcacctcataaacattcattgtttaatttaagctggtttcttgaatatcttaagcacttggattgctgaactcatcagggaatgctttagttggtagctatatttcattgcctgtatcgaaattttatactataattacttgctaacttttaggaaacatgtaattaatatgcatacattttaagattcaaagataatttttttcacatttaatatttctggaattgagatagttttataactctgatcgacatcatctataaaaagatttttaaaatcagtgatctgtctcaggaaaatacatacaaccatgttaatttcagtatggtcagagcaaaaattgaaaaacaatccaatacccatcaatataaaagaaagtggttaaataaattatagtaaatccataccatgaaattctatcatgcatggtactatcataaaggtagccaaaatgaattaagtgtgatgttttctaaggttaaatgagcaaggtaaacaaatatccacaatttctacttaaatacttagagtacaatttttgtagctggatgacagtgtcctacattatgtaataaaaatatgctgatcaaagaatgttgaaggtatgtttgtcagtgtttccattccacccttagctttcagcaggtcctgtatgcttgcaccacaggtagggtttccctctgctctcttgactcacctatattggtggagtgctgttttttcactcatgcaaaactcctcatcgaggcagaagctaggttgtccctggtccagcctcaattttggacatgccctgaatgcctgaacctcaagttcgggctttgccttgtttcagtggggttcttgggaagaaatgaagttcctgctcctctctttttggcaaactgttttatttctatccctctctctggtggcagtcaatcttaaggtaggccatagacaggatggtttgctgctcctccttcagtgggttttttcttctgtaacagataacctttgtcacagactggagggcatgagagtttcctgcctcaatcccagaggcaaaactgcttttgctttggatagcagaagggtcagtggaggtaggagggaaagtattccttcttctttctcagggacagtctaccacgaccaaatcttttcccttaaacaaagatctggtaaacgggtatagactccccttatttcttaggcttctagggtttctaaactgttaagcttcccttggcctttaagaattcattaaaatttcaagtgtttctatcttcctttatgactgctttttcttctttctgtgctctttgaaaagtaaaatggtttgtgtgtcccatcctttttctgaagggcttattgtcctttagaatcaatttgcctagtttctttacagcagccatagctatagaaatgtagctctctgataaaaaaagtattttttcatactatccagctttgttgttgttgttattattggagtgggggttacattttatttggctttctacattctgggtagaagtaaaattcccagtaccattcatttttaatggagttgtcttttccgctctgcacccaagcagtacctattctggttttgaagcacaagaataagagcccaccactccccactgtctttcctacctcctaggattcctgtggatttttttttttttttacatttattatcatgaagcagtgtagagtcgaaatcaggcttcaggtcagtggttcttaattcttctttccctggtctaccaggccagcactattggagcagcacaaaatcttgttgaagagctaaattgtttttggcaacacaatgtctaatccataggagagaagatagtgccatctctcctggaaagtcaccctccacatatacatggcctaaagagcttatatatcagcctaagaaaagaaaaccaataagaagttgcattttcattaaaaaaagaaagccacgtttcatatcctactactcttcgcttacattctttctcttcaataaagtttttatacctgaaaaaataatcctctggttctcgtgccctcatttaaggtggaaaatgataatcttttctgttcttgagttgggatagagtttgtagggcaataatttctatgtgtaaaacacttcacttaaggacattcagtcggacattgatttctgatttttgtgcgtccaaatcttttactgtggtgaaactgtttttgttgttgttgttgttgttgttgttttaatgtcttctgctctctcctggtccttcaacaattttcaggttgtttctagtgagatttttcagttggaaagccaccataataaagtaagtctggggaaactggggacggacagttccactttttttttttttccatgcttctggtgctctttgtctgtgttagcagttatcaaaatctagttttagcttttttttttccttccgcacgtggaagaaaagaaggaaaacagctttggaagttctcaaccgtcaacccccgggaggacgtttgcctcctgccctaggagaaacgttcgctctggaggcttgggcggcaagagccccttgtggccaccgagtcctccgacgccctcgccaggctggcctttgggttggcccaggcaggacgggcagccgagagcactcgggccgcgtcgccaggagccgcccagggtgagccatgttcgtaggcgtcgcccggcactctgggagccaggatgaagtctcaaggggagtagagccgctggaggccgcgcgggcccagcctgctaaggacaggagggccaagggaaccccgaagtcctcgaagcccgggaaaaaacaccggtatctgagactacttccagaggccttgataaggttcggcggtttccgaaaaaggaaaaaagccaagtcctcagtttccaagaagccgggagaagtggatgacagtttggagcagccctgtggtttgggctgcttagtcagcacctgctgtgagtgttgcaataacattcgctgcttcatgattttctactgcatcctgctcatatgtcaaggtgagcctgaaggaggcggtttgttgtggcgagggcagctggggccgcactggcggaggcgggagagggagtatggcggaggacgccctggggtggcccagcatgccctggggtggcccagcctgaggctgctttctgacttctcaaggcgttgtcggatcaaagtttagccacccagtgggtttaccttgcccgctgcctagacagagaagatttatcaaggaaggggaattgccatggagaaagagtaaggcacgcagagccggctgtgcgggagaccagagtttttttattgctcaaatcagtctctccagcattctgggatgggatcagagtttttaaagataatttggctggcaggggctcgggaactggggagtgctgattggtcaggttggtcagggaatcatagtgtggttgaagtcaggttttcttgccatcttctgttcctgggtgggatggcagaactagttgacccagattacttgtctgggtggtgtcagctcaaccatccagtgaagggtctgcaaaatatctcaagcaccgagcttcggttttacaataatgatgttt

SEQ ID NO: 10680 - DNA, 6000 bp, Homo sapiens
attagtgatggataataaaatattttaaaattaaactaaattatttatcttctttgtgtaggactaacttcttcagtgcttagagtgtgagaaaaatggcaaatatgaatagtgattctaggcatcttggcacctctgaggtagatcatgaaagagatcctggacctatgaatatccagtttgagccatcggatctaagatccaaaaggtaagcatttaaaataaaacacatttcataattagggtctttaatgattaaaatacatctaattataaccaaacatgtatagatttgattataaaatatccactttcttacaggatttgtgtgtatacatgtggagagaagtaaataggaatactatttactggtttatatttttttttttttttttttttcactaaactcaacatctctgttgggggagtggttggggtaactttacaaagtaaggtacattgatataattcatttaacaaatatgtattgattacccactttgcgcaaggtaatatgctaagtgctcgaggtagaagagtaaaagtaatagaaaatcttcatcttcattgaggtaaaatttcagcagatagtttaaaataatttgagtttaaattttatttcattgtatacctgtaaaacccaaaagaatccacaaaaaaattataaacagtaagagaattcaataaagtagctgcttacaaaacaggcaaaaataaatagacttccaatgagaaaatgtaagaaaaaataaaatacatagaaatggtcttgagtgctcaatggcgcccaggctggagtgcagtggcgtgatctcggctcgctacaacctccacctcccagccgcctgccttggcctcccaaagtgccgagattgcagcctctgcccggccgccaccccgtctgggaagtgaggagcgtctctgcctggccgcccatcgtctgggatgtgaggagcccctctgcctggctgcccagtctggaaagtgaggagcgtctctgccccgccgccatcccatctgggaagtgaggagcgcctcttcccggccaccatcacatctaggaagtgaggagcgtctctgccccgctgcccatcgtctgggatgtggggagcgcctctgccccgccgcctcgtctgggatgtgaggagcgcctctgcccggccgccaccccgtctgggaggtgaggagcgtctctgcccggccgccccgtctgagaagagaggagaccctccgcccggcagccgccccgtatgagaagtgaggagcctctccacccggcagccaccccgtctgggaagtgaggagcgtctccgcccggcagccaccccgtccgggagggaggtgggggggtcagccccccgcctggccagccgccccgtccgggaggtgaggggcgcctctgcccggccgcccctactgggaagtgaggagcccctctgcccggccagccgccccgtccgggagggaggtgagggggtcagccccccgcccggccagccgccccgtctgggagggaggtggggggggtcagccccccgcccggccagccgccccgtccaggaggtgaggggcgcctctgcccggcccgcccctactgggaagtgaggagcccctctgcctggccagccgccccgtccgggagggaggtgggggggtcagccccccgcccggccagccgccccgtccgggagggaggtgggggggtcagccccccgcccggccagccgcccagtccgggagggaggtggggggatcagccccccgcccggccagccgcccgtccgggaggtgaggggcgcctctgcccggccgtctctactgggaagtgaggagcccctctgcccagccagccgccccgtccgtgagggaggtgggggggtcagccccccgcccggtcagccgcccggtccgggagggaggtgggggggtcagccccccacccggccagccgccccgtccgggagggaggtgggggggtcagccccccgcccggccagccgccccgtccgggagggaggtgggggggtcagccccccgcccggccagctgccccgtccgggaggtgaggggcgcctctgcccagccgcccctactgggaagtgaggagcccctctgcccggccagccgccccgtccgggagggaggtgggggggttagccccccgcccggccagccgccccatccgggaggtgaggggcgcctctgcccggccgcccctactgggaagtgaggagcccctctgcccggccaccaccccgtctgggaggtgtgcccaacagctcattgagaacgggccaggatgacaatggcagctttgtggaatagaaaggggggaaaggtggggaaaagattgagaaatcggatggttgccgtgtctgtgtagaaagaagtagacatgggagacttttcattttgttctgtactaagaaaaattcttctgccttgggatcctgttgatctgtgaccttacccccaaccctgtgctctctgaaacatgtgctgtgtccactcagagttaaatggattaagggcggtgcaagatgtgctttgttaaacagatgcttgaaggcagcatgctcattaagagccatcaccactccctaatctcaagtacccagggacacaaccgctgcagaaggccgcagggtcctctgcctaggaaaaccagagacctttgttcacttgtttatctgctgaccttccctccactattgtcctatgaccctgccaaatccccctctgtgagaaacacccaagaatgatcaataaaaaaaaaaaaagaaatggtcttaacatgaatgtgtaaaatctatatgagagaaactaaaatgcttctgacataaaataagatttagaggatttcataaaatctgagatgctactgattataaattgcatattaaaaaaatttaacactaagaaaaactgctgcccataactctgatgcaataacctcttaggacttagagtttttgttttgtatttactgcaagagctcttgggccacgcacggtggctcatgcctgtaatcccaacactttgggaggctgaggtgggtggatcacttgaggccaagagttccagactagcttggccaacatggcaaaacctggtctctactaaaagtacaaaaattagctgggcgtggtggcgcacacctgtaatcccagctatttgggagactgaggcatgataatcacttgaacctgggaggcagaggttgcagtaagccaagatcgtaccactgcactccagcctggtgatagagcaagactctgtcaggaaaggaaaggaaaggagaggagaggagaggagaagggtggggagcggaggggaggggaggggaggggaagggaagggaagggaaaagggaaaagggagaactcttggacttatgtgatattttatcctatatttcttgtgcaattataaaaatgaaaatagaaacaaagtatattgattaaggtattactgacacctcacatttagaatatgattcttctgaattattttttgatgtagagtcatcaaaatagttgtttcccccaccacacacacacacacagaattgtccttagtgccattaagaaccctggtgctgtaacatttcctgaaaagattttcttccaggtcactgacacttaagttttgatgcttgcactttcctgatcttaccagaagatgtcacaaaaggttttctaacaagaacatgacccatctgtcttcctcaaatggtccttaaatggtttgtctgacatgaccacggatggcagttacctgtcatgccatcaggaataactactatcatattgtcacttgctgacagtgatttttttttttttttttgagacagggtctcactctgtagcccacactggagtgtgatggtgcaatcatggcttgctgcagccttgatctcctgggctgaagcagtcctcccacttcagcctcctgagtagctgggactacaggtgcatgccactgtgaccagctaatttttttttaaattttattttgtagagaaggggtcttgctgtgttactggggctggtcttgaactcctgggctcaagcaatttgtccatcttagcctcccaagtagctgggactacaggtgcacaccactgcacctggctaatttttcaaatttattttttgcagagattgcatctcactttattggccaggctggtcttgaactccagggctcaagcaatcctcccaccttgccctcccaaagtgttgggattacaggtgtgagtcaccacgcctggctctggcagtgatgaaaaagtgttctagattatgagattcatccttaattagaagtgtttaaatatgtatattagaatcagtaaaatatgatgtaataaaaagaattaaatgaggcatattctgctctcattgggaagactctgaagatgtcatagtcttcaaattttaatccataaatttaatgtgatttcccccctaaaatgccagcagcctattccaaagtttatatggatcagtaatttcacttctaagcattaattcacattgtcaaaaattgtatgtgtacaaggttgtgtaatgcagtattttttatagtagtaaagattaaaagcaatcaaaatttcttacaggattggataaataagttgtggcacatttatacaatggaatattttttcctcttaaaaaggaggtggctttattacatatcaaaatggaacaagtcttcaacttattttgttaagtgaaaaattgaagtacagagcagtgtgtatagtatgccaccatttgggtaaaaataaataaatataatatgtataaatgaagttttgggtagtaaataggaaactgtaagatggttgccccctcagagggaaactgagtgctttaggcgggatggtgtggcagatactgttaggtagacacccaacaattaatcagcaaccctacctattccttaatgtcaacagaatccttatttttttgagtcacaatgggtcttcatccaagagatgaaagatggttggtttaagctaatcttgataatcctattttcattcgcacatacttaagtttttagtctttcttaaaactagaggtggaaatgtgaaatttatcacatgagaaatttatcattgtcatttatagtggccatcagaaaagataatgaaataagacttttgattcttacttatataatccaatgtcagtaaatataagcactaatgaatgctgacttgaatgctcagggttttcttgaaaattctaaattctgtgataaataattgaccactgtgacaacagaatgtaagtcattaaagtgcattccattacagtaagttggcaggagttcaaacagttctctgtaaatttgtttaactgcgtagattaaatggcaatatattttctataatgaaacttgttgaaatgagagggaatcagctatttacaatcatggcataactacctaggtaagcatgttttaagaaaggcaaatatagagacttagcagtactaaatgctaatttgcttgtggaataatttgtttaggaaaacaaactatttaatgagaaaaaatgtaagtaccttcaaacattgttatttctgttaaaatatggattacttcacattacatatataaataaaactcatctacactgtgggaaaattatcttccatttgaagaaccagattaggacaactatttccaaaactgtagtcattttagagttaccttatgactttggcaatatcttcaatagtacctgtataatataagtgaatgtttcttcaaaaatctatttactttttaaaattagggttaatttagcctcaacccagctttgtaaaacgatggatttgaagtgttgtttatgctttttttctaatacgcattgcattaaataccaactagtttaaatagcatttattcttgtgctacttacaatcatcttacatattaccatactttgagaaactgtctttggctgtcagagtatgtcaagta

SEQ ID NO: 10681 - DNA, 6000 bp, Homo sapiens
tgtgttgagtatctataatgttaaatttctctttatatcttatttgaaaaataaatgaataaataaatataaatgacaatgtacataaattactcagcatggtggctggcacatggttaatgtgaaacaaatgttagtcactatgattaaatagtcattcaggaaaatagctaaccttatcagaagataatttatttaaaacagtaatttatgtaaagcacttaggacagtgtctacatggtaaatgtgtaatatatgttaaatataactattgtatagtcatttagaaaaatagctaagctgagtatatcaatgtacagtaaaatgtgagacaattctaataattgtgtacctaagtgcattgataggtaagattttgatcattattgtcatgaacatttgtataaagtgttatggtatccagggcatttggtagacattatttaatcctcactgtgctcctgaggaacatgaggaatgggctttattactccctttattttggcaagagaactgtggtttaggagaagactccaaatgactatttcatcactgttgctctagactaatactcagaatatgtactcttgggagaagatgcacagatcaaagctgagttttcctgggtgtttgatctgactcctagattctgtttggttctatatccagttggggaatattacaggctgaattgattttaagcttggataatttccatagagaattttgatgcatgtagcattttagaaaagagacaacaaatatctctaaaaaaacattttgattaagtggccttttcttcttcagtaattaaccacaatttctgtctccaaaaggctttatggccatgctcatctgcagctggacttagggcacaagatttatacttttcatgggtcaatgacatctggcttccttcagactggctgatgcatctgtaagagcagcttgataaaaataacaactgaaggatcaagagggagtttaataatcagtcctcctctcatatatggttttgtttccgctggaatccttcttccaaatgacatcaaatgttaattgtatgcatttctggaaaatgtaaaacaaagtgtcttaattggggtatttaatcacacattatctcaataatatgtgcaaataaaaatgtatttgcattcaaagttcatttttaagaaaaatactaaaataagggcaatcaaatgccaattgcattttagggagattcattttgcttatcattggccctaaaactgtgataagatctccagagttcatcagggcagcacatctgattcatgagtgtaagctttggccaccaactattgagagacatgtgactttatctttctgacacagcatcttttgtggattctttccaacccgtgtgatatgtatagctaaaacatgaatatctgtgatatcaaaattaaatagcaaggatatggtggctgaatatattcacaagtgcataaatgtctaaaaagtatcattagagggatattagggtaagagggagtcagagctaataaaaaggccacagtgaggttaaaaggcctccatcaatatctgcatcaattctcatggcttcatagtctattgtgaagcccctcgcattggaagcaatttcactgagtagcacatgccattatctgcttatatgcatacatgactctaaggctcataagatttcatttttaatgctaaattctgctaggaaaggaacagaattgatgattttgtgagcatccaaatgtttttcaaggctgaggttttaaaggctgcgaaagagtcttgtttatttcttactacatctgggtgtctgctttcaaggtcattcagaaaaatgcttgtcaaatggtgaggacattttaacgtctgccaagtactagctatacacatattttttttgataaaacataattattgtagaaacatcaagatttatatgatgccctacccttgtgcagaaattatttgtccaaagtcttaggacttaagatttagtcttttcacttgacctaccagagtttcttcacctaaaagatgagaatgctaatactttgctttttatgttttgttttgttttgttttgttttgtaatgagtggaattaacaaacaatgcttgaatatcctttaagtttgtaggctgcagtgtctatgatattcacagggactctgaatttagattgagtacttacgtgttccttgtgaaatatttctctgctatgacttggttcagtagtcattaaatttcctttgagttaatctctccatggcttgttgctgtgtaatagttgggtacccttgaccttgtagtctgacctattctccctcttgagcagacctctaatggaaaagtgccgtggaatcaagctgtattgcagcttcttctcggacagctgctgtttcgtatctgacacactgctcagatgctcttgagtgtaaactgctttttctcaggttgagttgtgatggctaagaataaaaaaaagtgtttctgagagaagtagaagcctattgtaggacaggctgagtacttccatgaaaaagattattattagtcttctttgggctcatcttctacctgtgtgtgtgtgtgtgtgtgtgcccagatgacaggccttgaaactgagttcattacatctcctgaaacaaagcctcttgggaatacaaatagggtaactgcttagctttcgactcagtaactttctctttctgaaaaccctataataataagtgcctgcacactatttgtgaatctttctctcctgtaaaggtttttctgggactcctaatccacagtctgcctttggtaccattgagcagactgtctctggaatgatggcattgttgaaaggaatgggctcagaaggatctcatgaatttgaattctgacagtcttttccccagcaatcttttatcaaagtgcactttaaaaaagtggatggtggttcagacgctcttcctaaaggtgtacagagctctctattaggatttatcacccacagttgccttttgagggagttgcccataattattctttttattttgtgcagataaagaagttgctccatatataatttaggagctttttcccaagggaagtgtgactcagctccaggcaggattagagtaccaagatctgatctgcattatttgctttataccagacatacggcccccaaggagctaaaaccaaaaaggtttgagcaggtcgaaaggtacaatgagcagaaaactaaatggagtccccaatttaaacattcacaaggctaattgcataactttttaaaaatctcaaaaaattggatttaattttaaagcctttctctgtgatcatttttgtttgactatttttaaaaatggctaaagtgaaatactgagtattgtttatgcatgaagacataacaaattaaaaaaagacaattctctgggaccatagaaaatagttaaaaacaaatatccaagtacttactctttaaaacggatacactcttgataaaatttatgccattctaatattctctgaataatgtgagtggaggtagagtagaaaagaaaaatagaaaatacaggtagaaccaattggagaatcaaaaaagtttaagatgtgcaagttggtagaggcttaggaaacacctggtccagcccctctatttcatagttatctgagatctagaagctgggacctgctcaaggtctcaaggctagctggagatggcatatccctgacttgagctcaaattacacagtagctgttattgtctctagtttgctgtttcaacactttggtaatgtaagtttgggtaacttacattgtccaagactggcaaatgatggagcccggattcctactctaaaccttctaacttcaaagtctgtctttcagcccccctactcttagtatcttcatctgaggatgaggagaataatagcaccttcctcacagatttgatgcaagaattacacaagttaatatatgtgaagctcttagtataatacctggcatatattaggtgcttaataaatgttaactgctattattagtagcattagtattaagctctacactaggccacactgggaaacagcaataagtaagaaggggacccagcatataagttgagctatttcttccatccatatagaaatccaggctcaatcttaagaagctaaggctgaattctctcagaagggttgcttcagtggccatcagaaagtgacaggattctagtcctgctccctgccacatcttgccctttaataggtgcctaggttgtgtgtggaccagaaagcactgtccccataaagaacagcacagaatgtagaaacggacacgtgtgatatgcatgcatgcatattgctgcagttttgccatggtgtaggagctcattcagggggagacatctgaaccgaaggcagccatatttgtgatggccaactctatggcacagcccttggagagctgggcataaaaagaggcaagagggaacagaataaaacctacattgacttatactttctacttacaaattacttcatttaatcctcctacagactctgcagcacatgtaagttatccacattgtacaggtgggaaaactaaagcatagaggggtttagtggctctctcgactttatataaacggaaataaaaccaatagcctcctgcctgcttcagccataccaccaccctacgccccagcctccatctcttattagggtccttctaaatccatttttcagctctgccaccccgtctccacccaaggagtatagaggcagacaactgagtcatattctaccacttgaaagaaatagtacaggtaacccagtgtgtctgaatcttgatgattaagacaatgatttgtaagattgcacaattcctcataagattccaagcatgatattctttgtgtatctcaaccatttttgtgtgctctactgctagggaatccgcaggaaagtaacagggcatctttgccttgtcccataggttgaggaacagcaccttcaaaaacatgcagcgccggcacacaacgctgagggagaagggccgtcgccaggccatccggggtcccgcctacatgttcaacgagaagggcaccagtctgacgcccgaggaggagcgcttcctggactcggctgagtatggcaacatcccggtggtccggaaaatgctggaggagtccaagacccttaacttcaactgtgtggactacatggggcagaacgctctgcagctggccgtgggcaacgagcacctagaggtcacggagctgctgctgaagaaggagaacctggcacgggtgggggacgcgctgctgctggccatcagcaagggctatgtgcgcatcgtggaggccatcctcaaccacccggccttcgcgcagggccagcgcctgacgctcagcccgctggaacaggagctgcgcgacgacgacttctatgcctacgacgaggacggcacgcgcttctcccacgacatcacgcccatcatcctggcggcgcactgccaggagtatgagatcgtgcacatcctgctgctcaagggcgcccgcatcgagcggccccacgactacttctgcaagtgcaatgagtgcaccgagaaacagcggaaagactccttcagccactcgcgctcgcgcatgaacgcctacaaaggactggcgagtgctgcctacttgtccctgtccagcgaagaccctgtcctcaccgccctggagctcagcaacgagttagccagactagccaacattgagactgaatttaaggtaactcttccacttagcaccctgcaggcaggttgcccagggggctcttccacgtgtgtccagtgtgaaatgggttgtcttcaaatctaagaaagagggaagcttcaggatcttactgagcaggcccaggggaggaggggaacacatctcacttatcagagataggcctgaggaaaagcagccctctgggtgaaatgctttaaactacatgaatgcggtaag

SEQ ID NO: 10682 - DNA, 6000 bp, Homo sapiens
ggaaacaagagcaaaactccatctcaaaaagaaacagagagaaagagagaaaaactgactgaataaacatgaaataacatgtaaggacagatgagaagaaagtagaaaaaagaggcagagatagtttgagagaaagatggaaatgaggcacagggagatcgctaaaattttctcacaaacagtaagctgttagagcaccaagtacaagtatagacttggctacaaaagaaaattggggagtctctggtctctgagcaggtcagctttgatatgaagcatttttcatcacagatcttagctccacttctgttattttaggtctcacagaaaaaagggtagggaaccatgacctgaaagataggagtcctccaatctagattcagttttgttgtggtatcttaagccagtcgttccccctttcctggaccttgaatagctagtgaaatgggaggaaaggtctcttagtattttatgcatctattctttacaactaaaattctggtgtcactgagatcccccaagtagttctggggtcccttctttaaaggataaagaacaggtaattgctttgtaaaaaaaaaaaaaaaaaaaagtaacaagagcattctggattaggattagaaggattagaaagagctggcagcaagcctctaattctttggagaaaagactcttccacagtcccattttcaggcctttattcatcatactacagcacaattaggcaagctgctcagttgttccaaatatctatctgtctttgcaaagtatctttcaggcctgtcaaagcagtgttgaaacatacagcactctcctctgtgaatgccattatggacagaggcttggcattatattaattacattagctggctcaggacaacataatctcagctgattaacaacattccttactctctttcccctgtatttgtgtcctctgcctgaatctttttgttcttttgtttattcactcattcatccttgcaataaatatttactgagcccttagtatctgatactgatatgtgatatatatcagtatatattagtaataaaaacgggtaaactctcttccctcatagattttcctgactttctttctgcatttcctttatcttaattgaaacaaacaaaaaaatagttgaaacaccctttagctataattagggtgcttgtgttcttgtcccagctgcgctatgagtctaaggggtaagtctattaacctctctgtatataattttcctcttctgtactcgaaatgttgaacaagactatcttaaagaatttctcacatggactttttcagtagctcctaactagtctccctgctttcattttgctcctgccatcccagaaattttattcttggaggtagtacctgctctagtccccaacttcctctctaatctcatcttctatcactgttccctgcactcactctgtccaggcacactggtctccatgctgtttcttgtacactccaaacatactcccctctccgggcttttacatttgcttttcccactgcttagaaagctttccatacctgcccccaaggttcacatgactcattccttcacttccttcaattacataaatgccttttcaggagccattctctgatatgatcaccttacataaaatagcacctccatgccactctctgccctgcctttttctttttagttcttatgactgcctaactcatcatatatttccttgtttgtcttgttttcctccaatagaagatgcatacctttagaatagggctcttggcttgttttgttccctgctatatccccagtgccaagaatagtaccagatacacagtaaatgctcaataaatgtttgttgaatgaataaaataatgaatcttttctagtaataaaataagtctcaccgtgtgtcaaaatttattcatacttagtagggctcaaatctggctactaggatctataagagaccagtcaagtattagaactacgctggagtcagactacacagaaaagttaccaatagaaatgagccattagctgaagccaatccattccattccttgaagatttttgtttcatagcatggtaagctacaataaggttagacttaaatatttattctatgcagtttcttgcagtgagaaaagtggcattactaccctcatttcacttaggcctggagtttagtcatttatccaacataaccaacctttttgaagcagagataaaataaggacataaatccctgacggccaagcccacagttgtttattttcaatagtgacctaaacaagaacaaaaagatctgtacaggcataaatatgtgatatgtagggtaaaaagtgtagattaacatgagggactcttcccactgaacttctgaagcaactgcatgttccaaaagtttatcttatatactgtttattttatacactatcagtatatactgtgttgtttatcttatatactgtcatatccccaatacttggcacatgctcatttcatgtgtactgattaaatgaaagtatcagcctcatagtaaacagaggcctattaacaaacaggtgcccctccaccaccccaggtaataattactcttacctcctgcacaggccacagccttggagccactcacactcatgaacagcaacacacactcagcaccccttgaaggaaaagaaaaacaaatttccacatactgcatcacacctggctatgcaggtatttcctagtcagatgaggaaccaggacaaaattgccagcttacggcttgtttcagtacttctaggaccaccacaaagacacacatagatacatacacatctatgtgtatgtagagaaagacccatttacaaatacaaacgtacaaatacacatatgcatatcaaaatcacttcagaattaggcacgatacaaatcataaataaatttgtatacacagtaacctacaagctggttttgccctagcatactcacaaatgtacacaaacacatacgcaaagataatacttacctcaaggtttgactgtgaaaagtaaatgagattatgtgaattcacagtaatttctgacacatagaaaccatgctaataaaggttagctcttgattacatatataaaaatacatatattatacattatatttaaatttgtatccaactcatattaatatacaccttcaaaacaaaatttccttttcagtcactatgcagaatatcatggaaattctagactgtgggagccaataacagaaccggtagtgtggggtatgctattgtagtacagggggaggggaggggaaatcctactggtaagaggctagtaaacaagacttttcagatcctttctgcttgggagaaggcctagccttggagggagctgagctgatgagtattcttgggagatcagccaaaggagtttctaacgttattgggtaaggaggaggggttgtcctctctcagtagccttgggcgagagagtccccagagtcccaatgagttcaaatcagccagaaaatcctttaaagtatttatcctatagtcccacagcttggggaaaatctgattaactccatctcaccagatgggctttacagtgaaatgtatagctggtttctaagattcaaataaggtgggaaaacagaggaagaaataacgaaatgtgagtcataacacatccctgtgtgtacaacttggctctgccatcaatttggagcaagccacagctctgtgaggctcagtttccccagcatataaaaggcgaataaaactgtctcctgtccagttggaagaaggtgcttttattccctctcaaaagggtgccagccacaacacctcccactcaacgctggaaactgctcaaagaatttctctcgtatttccctgctgcggtgaccctggagggggtctttatccaccagacttctttttggatattcctcctttctttctagggccaaatattataacttcagagctcttttaaaaaaaatcagggatctggttcaactcttcccttttaaaaggataaattgagcccagagcacgtcttaacaaggaaccatgtgttttactcacatacaactgcattctttaaaaatcaaggcaaccttttgagagacctagagagattaattccatatcctctctcaccccaccgcttacacggaaagaagcttgggggtaggaaggggattgcgcagatctcgtccagcactctaagcgttaaattcaacccggagtctaacaggctattggccgaataccgggagaagatctggttttcgtagccgcgggccaatgaacacctcgagtgggagggtttgaagatactaaggagttttccccctttttttttccccctcaaccccctcccatcggctatcacccctcccatcccccacgcctccagtttgttaaattaatgcagtaagaaagtctgaagatctgaaggagtcttgaccaagggaagatgagcgagctcagaaaaccgagatgcatctgagacattgggcttcagagccccgcggggtagccagggaccccggtagcccctgaaacttgccctgggctctctgacgcctgcggccccgagcaatgggacaccttttctgcagtgatcacaacttattcggcggggaccgggaaacaggaatagcaaggcgacagcagacccgcacagaggcaggagaacgagattccgagactggattgcgatgcgccagcctggcacactctccgagatttaactgaaggcagcgccgtcaaccgctttcccctcgcccctaaccccctcaggccggcccagagccataaagctctgttctctttacccaagatgctcgcccaatccaacggtccgaggccagcgctctgatctccacagaagatttttttccttgcagggagctggccgtttaaacagaaaaacaggggtttaaaaaaaaaaaaaaaaaaaaggaaatatacccacccccaaacgtgcctccccagcgccgcagggagccaacagacacgctggagtttaacaaacagcaatactcttcgcgctcctgaaaagcaggtctggacgctctccgtggtgctgaaacgcctcgcagccgccgctgtccgtggtatctacgaccccctcgctccaatttcccctggggctctccctccgcgcccctgttccccgcctccctttaacatctggattattttttgcaatagcgctttctggttttgtaagtgccaatttgaaacatttttgcccccataactcgtggactacaaagcacaaggacctgaaaaatgtacagcttcaatactcttcgactctacctttgggagaccattgtattcttcaggtatgcaattttctactgaccacatcgctctgatggaaatggggggaaagagtacggaggctacctctgtccgtggtcccatcattttggggaagaggggtgctgtattccactgcaatcgggtccttccatcccccgtctcccttctcccccctcccaccccccgccacccaccccacccccgcccgcagggtgtctggcttgtgcgtggaggtctgagacagtcgctgttctggcagctgtttgcctgtttcttacggtttgtttgtccttctgtctgctacaccccccactattggtccccagccccactgcatgttggctttcactcggctgaggactttaaagggaagctttaggagttactcagtttaattaggactgcattctccctaaccgcagtgccgaaaacctcagctttcccgtctgggagccaagtgacaactagcggtgacggggaaggttgcactcaaactcgctggacacagatcatttcattttctgtccttttttgctgttgttttctttttctgcgaagagggagggggattactaaggctgagtgcttggaaacaatagtattataacctcagtgtgtaaagccctgaacttgggtgcagagtggatctatttaggaacatactgggaaacatttccc

SEQ ID NO: 10683 - DNA, 6000 bp, Homo sapiens
aatgtttccatattacattaaagactaatggaagatggttggtgactttttaaacttgtatttatatgtttcatactgagatgattttgaaatatggcctgttaagagtacttacattttgccttctcattctacatttgggatcgtggaggatactcttcagcaactaacacatctccagattccacgttattgttctcattttgcatcttctgaggcagtattgtcagcaaagtcgtccagatagatggccagtgttgctcctgttgtatgactgagactcactttaggcataagttgaccttagctttgtaactagtcaaaatgtttttttgtttgtttttgagacggagtctcactctttcaccaggctggagtgcagtggcgtgatcttggctcactacaatctccgccacccgggttcaagccattctcctgcctcaggctctggagtagctgggactataggcacgtgccaccatgcccggctaattttttttgtagttttagtacagacggggtttcaccatgttagccaggatggtctggtctcctgaccttgtgatccacccttctcagcctcccaaagtgctgggattacaggcatgagccaccacgcccagccagaaatgtatttttaattatattagttactgttgttggtaagggatatccctgagatgttattgcatagagaatgcatattctttaatcttttctctgtttgattgctgcttggatttttaatacctcttcttcttcacccttccttaattcccatgaaatatctgctcctttattctcaggctgacttataataatggcaccaatcaagcaagacaaagaaataaagggtattcaaataggaagagaggaagtcaaatggtctctgtttgcagatgacatgattgtctatttagaaaatcccattgtcttggccccaaatctccttaagctgataagcaacttcagcaaagtctcaggaaacaaaatcaatctgcaaaaatcacaagcattcctatacaccaataatagacggagagcaaaatcatgagtgaactcccattcacaattgctgcaaagagaataaaatacctagaaatacaacttacaagggatgtgaaggacctcttcaaggagaactacaaaccactgcgaaaggaaataagagaggatacaaacaaatggaaaaacatttcatgcccatggataagatgaatcaatatggtgaaaatggccatactacccagagtaatttatagattcagtgttatgcccaccaagctaccattgatttcttcacacaattagaaaaaaaaccactttaaatttcaatgggaaccaaaaaagagcctgtatagccaagacattcctaaacaaaaagaacaaagctggaggcatcatgctacctgacttcaaactatactacaagtctacagtaaccaaaacagcatggtactggtgccaaaataggtatacagacaaatagaacagaacagaagcctcagaaataatgccacacatctacaaccatctgatctttgacaaatctgacaaaaacaagcaataaggaaaggattccctatttaataaatggtgttgtgaaaactggctagccatatgcagaaaactgaaactggaccccttccttacaccttatacaaaaattaactcgagatggattaaagacttacatgtaagacctaagatcataaaaaccctagaggaaaacccaggcattaccattcaggacatagtcatgggcaaagccttcatgactaaaatactaaaagcaatggcaacaaatgtgaaaaatgacaaatggtatctaattaaactaaagagcttctgaacagcaaaagaaactatcatcagagtgaacaggcaacctacagaatgggagaaaatttttgcaatctgtccatctgacaaagggctaatatccagaatcaacaaggaatttaaacagatttacaagggaaaatcaaacaaccccatcaaaaagtaggcaaagaatataaacagacacttatcaaaagaagacatttatgtagccaacaaacatacaaaaaaaagctcatcatcactggtcattagagaaatgcaaatcaaaaccacaatgagacaccatctcacgccagttagaatggcgatcattaaaaagtcagaaaacaacagatgctggagaggatgtggaggaataggaatgcttttatactgttggtggaagtgtaaattagttcaaccattgtggaagacagggtggtgattcctcaaggatctagaaccagaaataccatttgacccagccatcccattactgggtatatacccaaaggattataaaccattctactataaagacacatgcacatgtatgtttattgcagcactattcacaatagcaaagacttggaacccacccaaatgcccatcaacgatagactggataaagaaaatgtggcacatatacaccatggaatactatgcagccataaaaacggatgagttcatgttctttgcagggacatggatgaagctggaaaccatcattttcagcaaactaacacaggaacagaaaaccaaacaccacatgttctcactcataagtggaagttcaacaatgaaaacacatggacacagggaggggaacatcacacaccagagcctgttggggggtgaggggctacgggagggatagcattaggagaaatacgtaatgtagatgaccggttgatgggtgcagcaaaccaccgcggcacgtgtatacctatgtaacaaacctgcaagttctgcacaggtatcccataacttaaagtatatttaaataataataataatggcaccaaatctatatctactcagtttgtatagctgagtgacactaaaccttgtttgttttcctgtacattcattatggcttattcattaaaagattactaatatttattaatcacagccaaatactacacctatatgtacctcattctagagcaatccagtggagagggtattcttttccttctcagttttccagaagaggaaactaaggcttagaggttaaatgacttgcctgagttacaaagttactaagtatttgacctgggttttgaacccaaagatttacctccggttcttttatgctctcagtttacactacacaattttacttgctgacatgcaagctattttaactctttgcccctctctttcttaactttctgtatatagtagacctttaatatatacttgtttcatcattccctgggccattattattattattattatcattatagatgggtgacagtatttgtggtttgttctgtctactgaattttgttctctcaacttacactgaagcgagcctaggtagaaggggctgatggtgcagaaagaaaaacgtgggtaactgagggtcagaaggaaaaccctattttgagatgtgttagaggttcgaggggaaggggagcattttaggacttcatcattttgttacttgagactaaactgctttaggaatcttctggacatcatgctgataatgccctaaccacccccccaaccccgatcctccccctacccatcattctactcagctggtgcaaaagattctcactgtgtataggagtaaagagaaaggaaaatcagcagttttccttggctatagttctacattctgaggtaacgctaaacccaagtaactgcagatgggagacttacagaccttcctcccccaccctcgtgtgtatgtgtgtgtgcgtgtgtgtgagtaagcgcgcgtctttggatgggctcctatgagcctgggagtctatagagcgccgcgcggtagatcagcagtatgttcatggtgctgggctttacctgttcctaacctagaaactcccttggtcggtgaaggaactcggctttcttttcctgtttatcatccatcccagaggagctgtcggattccccccttttaaagccctcccgcctccacacttcccccggagtcatccccacaaactacccccagatgaccctctgaccaaggtgggggaggggaaaggttatcagaaggtaagtgggtcaagagtgcagcacggaacaggaccctgaggagcccccagggctgccggggtcgcaagcctgtggagctacttccgccgcctgccgccaactctgcgggccggcgacccctcctctccgcagacaccggccgggtctagctcgtgcggtccgcgctcaactccacccgcagccgccgcgggctcctcgggcgccaggagcttgacccgccacagcaaagcgctggcagcgggcaaggtcgctgactcaggagacttcggagtgtaggctgtctagttcagtggttaggaacgctggctctgaagtccaatcctggtttcacctcatgccatctgagtgaccttgggcgagcttcttgacttcagtgagacaatttctgaatctataaaatggggacactgaagtgatagctaaacgctagaactgttgtcagaattaatgaatgcagcgctctggcacgaagtaggaactcacttaatagtgaccatgattggcagcagcagtgagaggctaagcattggggtccagaatagagatttgagctctggcctttccagttcttcacccagggtggggttgggggaggggtagcgggaacgtctactcttcccgcctcttccccagttccaagataaactcaggagtacccggagagccgctggtgtggactccggttccttcggacggccttgtgtccccagactcgtagcacctcacgccgcccgtggctcctctctttccctggagcggagggaagacttcttttgtgaattgagtatctccctcccccaatttccccaccccaagcttgctgcctcctccgggtcccggcggccacggcgaggcggcctgagcttcaggaggaagggaagaggcagcctctgggtgtgcgagtcccctgggcgcggggaagggaagaagaggacgaggtggcgcggagaccgcgggagaacacagtgcctccggaggtgaggggctcttcctcattttgcctgccttctagggaccgctccggcttcttgtatccagaggtacagcccctgaacagccgggagtccccgtcccctgtcccggacgaggggccgggggcgccagctccgcacgccgcgggagtgggcggcgagcgcgggcctgcgaggtaaggagggatggcggcgggtggggagtgcgcctgcacgtgtgtgcgcgcgggtgcgcgcagcggagggggcgctgggggaccggccggggcgcgtcccacccggccacctgcccttcctgctctgtgcggtcgcccacgccctccagtcccccgcacctgcgctagggcgcccgtcacccgcatccctcacgcctccacgtcccatctccccctcatgcaaaccccaccctgcccactaataattcccactgcagaatcagaccgaaacctggagagacagcattgcctttctgctcccctcgcccccctcccctcctgctataaataacccggactagcgggtcaggaacgtcacacggcgagaaaacaggaccccgaggttttcttctctgggaatagggggcaaagggtgaggagaggagaaagaaatcgctcgtgagtagtgaagaaaagcttgctctttgactactagaagagaccagccattattttattcttttctttctctttcttccttttttatttttccgtgcctttcttattctgtacccgcctccccaaccccccgccccaaatccaacgggttgctcagcattcctcccattggttttttccctccctcccgcttcgactcccaacgccccctcccccctcctcccacccgctgcacaacccccgccccccccatcccagtctcgccccaggcagggcatgctatttgccaaggaaataaagttcaaactccttgccccgtgtccggctgagaccagaagtgggcttaccgg

SEQ ID NO: 10684 - DNA, 6000 bp, Homo sapiens
acgtgtatcccccgaatctataattaaaattcaagaaagaaaagtgttttatgtacaactgtgaaactataatatatcaatttaaagaagaaaaatgtttcatggcatgggaaaatgattataatattctgttatgtaaaaaagcgagagattttttttcccgaaaaccaaagcacgatgacaacaaaaccgcaagatctttgtttattcctcctggcgctagagatgcggcagtgaataagaacggttccagtccctgattttagagagcttacccttgggttaggagacatgttaatggaggatgcacatgaataaatgttaaattacaggcggaggaagtgttctgcagaagaggcatgcggtgctcccagcatgcggaagcagagcttccgcctggcccaggaggcgcggagagtggctaaggggctgggggcgagggaaggccccagcggggagtcctgtggaagaggaagagctggccaggaggcaaggacagaggagacatgtgccatggaaggagagggcacatgcttcctttatgtgtgttgaaaaggccaccaccactcttacagcaactctctctgagcagtgaggctaacactgtacctcatcttctccctgcacttccacatcatgccactttcccacagagctgggatgatttgcactaaggaaaaagcatttttttaaaaaaaccaaccttaccacacagacagacagcagggctgtttatttatttatgctcctctttgtctcaaagaggattttcaaggtgcttacaattatgttaacagcatggcaggataaaggaagaaaaatcaggccaagggaaaatatggtgaaaagagtcagaggaaaaaggagtgagtatcaccctacacagcagggaacaactttaccatgttttttgtcgtgtcttgttgtgtgaccatttaattgtaatatcggcatttacttttgctgttgttatactttgtcatctcaactctactaaaaaacctcccaccgttatttcctctgccttttattactgtctctcatttaaaacacatctttcactttctgttctgtatttttgtagttgaggaaatctggcatcgcttttctgcagtgaagggaccgtgtctgagtcacctcggcacagtggtgtatccagagcctctgcatagcaagtgctgggatgtctgtgaacgcacagcttcgctaggactgagagtgactaacacccatccctgcagcactcagagaggcacacacaggggctcaagactcagttgccaatttgatttatgggacttattatcccaagtgtcagcagagaggagatattgattcagaaagacttaaataaacaagcaggtgcataatccagagaggggtacagactgagctgagggtgtctggaaagcagtggaagcagacatcatgaagaaacctggggtctcttgaaaactgctcccaagggagtcatggggtgacagaggggcagggacgggctgtggagtcagcgggcacaggtgcactccaggctccatcacatcacacgctaggggcgtgaccttgggaaaatcactttgccttgtgcttttacagaaagaacaaggccttttgtgggggattgtggagaggaatgtccatgtgtatgtgtatgtgtatgtattgcatatctatgtggtcattccctggtacatagtaggtgcttcataaacaaaaataccctcccatatcactgcccttctattccatttgtgccatagtgtgtgacctaagagtagataaagcactttttttgtttgtttgttttggtttagatggagtctcactctgtcgcccaggctggagtacagtggctcaatctcagctcactgcgacctccgcctcctggattcaagtgattttcatgcctcggcttcccagaatagctgggattataggcacctgccatcgtgcccagctaatttttgtatttttagtagaaacggggtttcgccatgttggccaggctggtctcgaactactggcctcaaatgaaccgcctgccttggtctcgaaaagtgctaggattacaggcatgagccaccatgccctacctagataaagcatttctaaactctcctgtaacactccatatagcaatctcaggtgttttaattctcactggtttaatcctaccactatcaccagcaactgtaacagtccccctttgaaatcacttgcaagtgtgttccagttactatgactgcataacaaattaccccaaaacgcaggggcatgaaacattagtttttttcttctcgtggattttgtggctctggaattcagagagagcacagagcaggtgggctgtctctgctccacattctctgaggcctcagctgggaggctggcaggctgggggctggaactgtctgcaggcttgttctctcccatgcccggtgagatttgctagctgttggctgagatctgagctgaggctgtcagctggagcacggggcctcggcttcctacaacatggtggctggttcccaggtacatgtcccgagagcgtgtggggggaactcgagcccccgtctatgacttagccttgaacatcgtgctgtgtccttctaccatattctactattgaggcccttacgaagctccacccagggtgaaggggaagagacatcaatgcccctcttgatggtggagtgttgatgccacactgtgaaaagggcacatggaatgggaagtatttggtgtgaccatctttggaaaggacaatctccatactatgtgtcaggtagcttaggtgatctctcattcctcaaaaacactgaggggctaggtataattatctctattttagagacagacaaactgaagcttagagaggcaaagtaacttgcttgggcaatttatttcacctctctgaggctcagttactccctctatcaaatgggtagaaaaatctccacctcagtggtctattgtgagcctattgtgctagtaccttaagaagctgttggaagagtcagagaagatattttgtgatctctgacaccccgtactaatgcaaaccgtcaatatttattgttgcagcattgttattttcttgccctccacctgtagccatctgtcacacacaaccccgcagccagcaaaggacctgggttttcacccacaaaccctcgaggacagggcttgtcaatgccttttggttgtggctcatttagggggagcagaagaccccacggccccccttccctgtttgttcccaccttcccttgggaagaatgctaaagtttgtttatgatttccaaataatatgtagcccttaataacttattcagagtatcacgagcaaggagcccttcggttatactcataaatggcagcctgttgcactgtgtatctctcccccagggaagcaggaggggggcctggcatttctggattagccccaggaggacttttcctgcttctgagtggacagaggatcatccttggaaaattgctcttctgagattgaattccagatcctacatccctctgtcaatctgcctgcaaggtctgaagctggtcttagaccctctggtgctatggtgcccattaaacagacactgtagtctcctgttaataagattcaattaggaaaggggtggagaagggcactcaccgcctgagagtgtgtcagggaggcctgagtggctgccttcatttcgcgcctgctggaggcaggagggaggaaggtggtgagctcgctcagcagggaaggccaggctgcacccacctccctgggggctggggaaactcagggtgacctccagagcctcaggtggcagcttactgtatgatcgaggtgatttttaatgtctcagagcagccccagggtcatcagagacagaccaagctgtgccatctggaagggccagcttcgaatctagttctggcccctagggttgcaccagtgacttcaagcctccaagtctcagtttcaggttctttgattcttgggtcaagtgaagggtggagataagctgccttctaccaccacgcctgatacttaggaaagccccaatatctgggattgtttttgttgttttgttgaaaatatatatatatatatatatatttgttttttttttttgagacggggtctcgctctgttcaggctagagtgcagtggcacaatcttgactcactgcaacctccgcctcccaggttcaagcgattctcctgcctcagcctcccaagtagctgggaccacaggcatgcaccactatgcccgactaatttttgtatttttagtagagatggggtttcgccatgttgcccaggatggtctcaaactcctgggcttgagcaatccatctaccttggcatcccaaagtgctgggattatgggcgtgggccactgtgcctgccctttgttgctgatttttaatccttacttccactttacagatgaagaagcagagatctaaaagcatgttttttgcctgcaaatgctgacattcacttgtcttattgctaggaagaaatctctgtactttcgcggtctctgggagggcccctggtgagcagactgtccctggacctggttggaagcagttgtggagctctcactactcccagcttcagctcagttggtccttaaaaagtcagttctctccccttgccataaatccccaccgtctctaactcccatcactaccctaaagcaaagtaggttttaaaaatgccagtaacacaagtgagaaaactgaggtcatttaacgataagtttgggagtaaaaccaaaaacaaaaaaggaaactgaggcccagagaggtgccataacttgctcagggtcacacagcacgtaagtgccaaaggcagggagctgtagctgctccagcgtggatatgccagggactagtgacaagcccaacccctccagcccaactccacccttcctcatgccaacaaaaggagaatcatttcctatttctggcatctttgccagcccacagagacagagagaagaagaaatatttccaaatataccaggctgatctttcgtagtttctcagtcttgctgtctgttgttgtttgaaatctgtttcccacgagactctgggaagatggaggtgcagggcttgggtaacagctgccttcctcagggctgggtacctgctctccgagtctgtgtctccaggctgtgtgctcagacttgaccatgtttgggcatggaggcttgccccagatggggaccaaaagctgcttccctggagacgggcggggaggccaaacttcctgctgaagctctgtggcctcttttggggtgggggcgggggtccaggcagaaagaaactgtctgctgctcaagacccacaggacgccgggaagactgtgagtaccgggcctgaaagcacttgggaagtgatttctctgaagaccgggctggagggagacaggggaaagcagcctgccacggggcagggagggaggcaggcaggaggactcccttcctctcggggctgtccttctggatggagggcccgtggtctggtggccagtggggagggtggcacagtggccaggttactctggtagtaagcgccctggccctctaggtcccagttctcagagtggccagaaggctgcagcctggagattaacaccaatgctggcacttgtcaccggtagagaggtgggacaaaaatagattcatcaagaggggtccagacttctgctccaaactttcagggtttccttcgttagtagtaatagctaatatttactgggggctgatttggggctaggtgctatgatacatgtctgatactcaatatggcatttgatctttagctgaactctctgaggcaggtaccatggttctcgtttcacagtcatgtggttgctaagtgtaagtggcagagccaggatttgattccatgtctgaggacctcagaatcgccctgtccacaccccaccaaactgttcaacaatgtactctattccttgtccttctaa

SEQ ID NO: 10685 - DNA, 6000 bp, Homo sapiens
ctggagtagggtaggccctaaatccaataaccacagtccttataagaagaggagacagacacagaggaggaggccacgtgaagacaggcagaggtcgcagcgcttgtggccacagcccagggatgcctgaaggtgcagaagctggaagaggcgggaggagtctcccgtgcaggctcaggaggggcgcggcctggccacactgggatttcagatgtcacagtactccggaacgggagaggatgatttcccgtggttttgaggcaccattgctggtcgtttgctgcggtggtcccaggacctgatgcagttaggttgtcccctgcacaggcagctgcctcgtcagacccacggccctcttagagcacccaacttgcttgtgaactaccttcaggtgggtccttgagaacccactgggcagacagcacgtccctgcaacatggggtgactctgaccccaccagggtacatctggcagtatatggagacatttttgattggccacacttgtgtgaggggtgtgcctggcatccagtgggtggaggccgaggatacctcgcagcaccctacagtgtccaggacggccccacccagagagtgaccagccctgagtgttccaaccccagcctcctgtgcttgggagcagggcagcacgtcagcactgcacctgatggcacttttcaacggggacgtcaccaagaaaacgcacacaaaagtggaaaacatggcactcacaggccacagaagggacagtgttttacaggatgagccgggtcagggaggacggtgatttataggatttacaggatgagccgggtcaagaaggcagagctgggctttgttcagccccagccggggacgtgcatggcgggcaactctgatttctgctcactctgaatgtcgcaagtaactgtaaaagtgcgcaaatattgacggggttacaagcacatctcaatgagcaggcggataaggaccagccgtgcgcacaacgccctgcgccgtgcagcccaagctggcctcgtgtgccacatggggctagaagtgaggggagcgaggtctctctcttcaggattgttctaggaatagctggagccccaaaaaggtgtttgctggtatccatgtgtcccgcccttggctgtctgtgcttgaaccttaagccctgaggacagaaggagcctttggcagtggagacagaagggtgggcgggtgggctgaagtcctcccagcaaaccttcagaagcccaggtccttgtctgcagggcggccccacagggcgaatcaggacccaccttcgaagtgaggaagctgccaccacccccaccccctttgcacccatgggggagtgctccccttccaaacccaggggggtagagaacagcttctcccctcacccggcagtgtgcatggagtaaaccatgcccctaccagtgccgccctgtcacagcacagacgtccacacgatcccaacaggggcaggaggcgtccacacgatcccaacaggggcaggaggcgtccacacgatcccaacaggggcaggaggcgtccacacgatcccaacaggggcaggaggcgtccacacgatcccaacaggggcaggaggcgtccacacgatcccaacaggggcaggaggcgtccacacgatcccaacaggggcaggaggcgtccacacgatcccaacaggggcaggaggggcccacacgatcccaacaggggcaggaggggcccagccctcccagggatgctgtgcttcgcagcaccaaccaagggtttctctggatgtgtttgggaaccagggccatgagcccacagtcctctctgtccccgcagaaacatcctcagcctcatcaacgactttgacttcccagagcagagcatctccagggacgactacccagccgtcctcatgcacctgaacgccacctggcccaagagggtggcccagctccccctgaaggcctgcctcctggaagactttctggataaggtacctgcacaccccctggggtagccaggcagggccgtccacaggagcaccagggccgcactggctgtgtcccactgccaaaggctgcaaacaattcccacagacccagggccagggcctgtgaaccaagaaccccagtctatctttgtctcaggttgccaggcctcctggaaagcccgaagtcctgggggcagctgtgtccagcagacgctgcacccagcagtcttgggggttgggctgacccgagagagtgggcattgctggtgcccagaccccaggagagggggtggccagcatgagggtcacagtgccagggcatggctggggtcaagccacactcagggccagtgtatgcctggacctaggggcaccaggcaggggggcacagccaggaggcaggtgtgggatgcatctcagggtgcctgactctaggcataaaaggcgctggtttctaggcccagctgcctgctgtgggttattaaaggggaaggaccctcccctgcagagttgcgcttgcagcctcgtctcccagaaggcatggccagccctgagccacctcagcccgacaccaggaggggtgatgtgcactcgtgtcctcggcctgggagagtgtgtgtcctgcaggcaggcgtgtgtgtgtggtggagtgtgtgtgtgcgtggcctgaagcccggggctccgtgtattgcagagtgcctcgggcccgggcctggccttcgtcgtcttcacggagaccgacctccacatgccgggggctcctgtgtgggccatgctcttcttcgggatgctgttcaccttggggctatcgaccatgttcgggaccgtggaggcggtcatcacacccctgctggacgtgggggtcctgcctagatgggtccccaaggaggccctgactggtgagcgcacagctccgccgccctggaggacccgtccccagcatctgactgtccactcccgcccgctgtccagacgcccctcctggatggagagcgcaaggggccaagcctgagttcagggaaaggctgagccaggctactccttgctgacagccatcaacggagagccgagggtcgagggagggtcagggctgcccctcccccacggccccggaggccacatcccccatctggagcaggaaagcaggtccttcctgctccttgagcacaatacaggaaagagactggggagggcagggatggagggtgggaagccgagagaagtctccagcccaggtgccctggccctccccgctgtccgagggcaggtctgcctggctggcttcctcctgaccctccccacacctccactccccatccccttaccccccacacccctttcccactgccccagggctggtctgcctggtctgcttcctctccgccacctgcttcacgctgcagtctgggaactactggctggagattttcgacaattttgccgcttccccgaacctgctcatgttggcctttctcgaggttgtgggtgtcgtttatgtttatggaatgaaacggtgagctgccgccccgccgagtgctcctctgggacccaccagggtgggacagggaatggctgccgggcacaggttcaacccgcagctgcccagaccgccgagaatgttctgccctggggagctgccgaggcaccagagggtgcaggttggaccccagttagggtccgatcctcggcttggagtgggtggaccttccacagaccatgtgaagcctgagcccagcatctggtgcaggttctgcgatgacattgcgtggatgaccgggaggcggcccagcccctactggcggctgacctggagggtggtcagtcccctgctgctgaccatctttgtggcttacatcatcctcctgttctggaagccactgagatacaaggcctggaaccccaaatacgtaggtccttccggtgggaacctgggaagtcctgggacccctcgggcttggtctggcccctacggtgccatccggtgcccgacgacccatgcggtgcacattcacgtgctagtgacaaggtggcgtggtcacttctgcctggcaaactgggaagccagggatgtgaacaggatgggctttgtgcagcgcccgagtgcccgctgggatcagaaatggcatgggggtgaccatgggcaagcgcctggtcagtggagtgaggacctgagcagtgcccagagcccagggaccccacagggccctggagctcctccttggggatgtggcttcatcctccctgcctgtgtcctgcccatgtggcatggggacgggcagccggacaacggcccattcctggtctgtgacaagagaggttgtgcacagacccctactgccacccagtgggtcagtttggctggaggccgtttccacacaaaagcctcccgaggagagatcagagtgccagccacactccgaaaacgcctcaggggctccaagcagcgccagcccctgacataccatctgagtccccactggtggccgctcaaaacctcaccatgccaccccttctcgggaatgtggacgccactcctctccaaatgtgtcttggaaagtccctccgtagcagaacaccaagggcaggtgaaggaggagtgaccatgtatttttgaagaatttccacggtacctgcagccgggtgggtggtgccacccagtgtataggggagaaagctggggacacggcctccaacgacgcccaatgggttgaggccatgtagcccctctggttccagaacacaacacctaggcctacctcggggaggccccagccccaggagaagctcagcccaggtccccaaactcctggcccggaggggcggtggtgagcggccacacggcctggccactgctctggccgtgccttttccattcccatccaagtccgggtgggcaggtggctcttgccccttggattgaggagcacgggggtcagcctcacggcccagggtggccggcgccagctaatgaggctgtggtcccgcaggagctgttcccctcgcgtcaggagaagctctacccgggctgggcgcgcgccgcctgtgtgctgctgtccttgctgcccgtgctgtgggtcccggtggccgcgcttgctcagctgctcacccggcggaggcggacgtggagggacagggacgcgcgcccagacacggacatgcgcccggacacggacacgcgcccagacacggacatgcgcccggacacggacatgcgctgaagccggccggagcggggcctgcatgggcgggtctgtgggggggcttggcctgatggtgggcggggccccgcccacagggccgaccccaatacaccagcgactcaaccttgatgccgctgtgtacgtgtggttactgctttcctgacgcccgggcagcgctgctgcttggggcccgcccctagggaggtctcgcagggccccggcatccctgctgagcccgcggcctgggcgtcctgcagcggctgaggtccctgcgcttggccgggctggctcagggatcttcgcaggtgcggggctcccggtctcacagactctgaacctagcctggctggtctctggggaagagcggccgcccgggtggctcagggggccgcctgcaccccggctccaggtcccaggcgggctgtccccctacagctcgcaggcggcaggggtacccaggacagatgcttcctcccgcctgggagcgggggcctggggtctggagtctgcggtctggctgacccttcctgaaatttctgagaaacactgtaggttgccacttttattttcccaaactgtcaaactgtattaaggaggtaccaaaaggctcctgctgtcccggggcagaggggcgacaggcaggagctcgctcacgtggggcagtcacccgcgccccgggcgccaagcgcactgtgcagcccccgtccagcccgccctgctccagagtaccccggctccaggcgccacgcgcgtgcttccctcctccctctccctctgttccctccgccctcctcctccctctttcctccccatccttttccct

SEQ ID NO: 10686 - DNA, 6000 bp, Homo sapiens
ggttgaactagtttacagtcccaccaacagtgtaaaagtgttcctatttctccacatcctctccagcacctgttgtttcctgactttttaatgatcaccattctaactggtgtgagatggtatctcattgtggttttgatttgcatttctctgatggccagtgatgatgagcattttttcatgtgttttttggctgcataaatgtcttcctttatgcagccaaaaaacacatgactaaagagcttctgcacagcaaaagaaactaccatcagagtgaacaggcaacctacgaaatgggagaaaattttcgcaacctactcatctgacaaagggctaatatccagaatctacaatgaactcaaacaaatttacaagaaaaaaacaaacaaccccatcaaaaagtgggcgaaggagatgaagtttttttcccaagctcctgtggtctgaaaaaagacatgcttctaagaaaatgtgtttgtgtgtgggatgggtgtttgtgtgcgtgttcacaagcttgaaattcaacaaacatgggaaagcaattgttgtaggccataagaaaaaaataggcaatttttattaaaaagtgatgctggaaatagatttaattgattagatttgaaatacattttgtggctgagtatgacctctggtgttaatctagggaaattctctcacttatatgctttaatggaacaaaaagaaggaaatttaattttctgaaagcttatcactggaagtcatagcccttgatctgcgtctttttttttcccccaatgtttcttcatttccttcctctctccttctctctgtactcacaaatataaataagtatctactatgtgcaaactactatccacgtggaagaatattgcctttgttgcttcatttaactttacatgttacatgtatctctacagtcctgtgtagaaaaaaaagaaatcatgttatgcacattttaaatgtctacatataaacttaaaatttgttgactttattaaaagaggaatgatgaaaataagaacttcttaaatgtgcctgttataacctaatagtgtaaaatgccttaaataatgaagttatgattcagactaaaaatgaaacaaaattatcttgtgttttttcatcatcatagtaatacaggtttaccacactctcaatatacagatatttattagcaagacggctgagtgtgtgtaatcagttgatttcttaacagaaagccgataaatgtctgattgatttgctctctgtccaatcacagtgagttttacattattaaattattttatgagctttttcaaaatagtgctagccggaagtagtattagtctgagttttggtgttccgacagtccctcatgttgtgaatcaaatttccattttcttctgaattttgtgcattctatcctcctgtgtacccccttgaagagaagtgagaactccatgcaacattgccataaatctcagtaggcaatttctgagatgattatttctacatgatttctacatgattaatagcactgcaactaatcccatattacagcatagagatatacatggcaaaagatacatttttgcctattattttggttttggagcctctgttgaagccgtgaatttgctatttgacaaagtcagtttgacacaagggatgcagccattatttttcttatgacagtttagtaactgtagaaccttatatctaatttaatgctggcaacaactattatgatatttcaggggtggaggctatgtaatcttttatctaaatttatgaacggctaataaaaatatttattaatttaccataatgttcctttgaagtatttagatttgtaaggatgaatcaaacattttcactcaatcgctacgtatagcaactggaaagctacataatttgttgaaaagcgtcctaatacatgtttgatggattttccgcatgagttgaatttctttttcagaccaggttagtaacttttcatagggaaactttcattttaattcaaattacttcgcaggattgttttgaatactcatgctttccacacaatttatgcagtatctactcagctgccccgaagactcaattagcttcgtgattctaaagaagttttattgaattgctattttgaagatacagaacaaaaatagtaatagatgataaaaacaaaatgctgtctctgattgttagccactaaattatattcttgaccaagaccattgagaaattcaattccggacagtattaattagctcaagtccagggctacgggactaaaagcagctgtgcaccccccacccctttttttctgctgaatgtttatttgcacacacaaaaaattaaaattaacatgtgtccaaagaacatcataaaatgaattattcattccatggcattgaaagcgcacacacgcacactctgaaaagcagataccaggtaagcaactttagggcagctgccgagtagaatatcaagaaattggatccagctgagaattccaattacctaatgacctaatgagggtgatccgctttcactctaattgctaggtctaactcgttgtaatagtctttatcatgaaaagcaggctttaaaataatttaaaatggaaacaaatattcaacgggccaatttctttcaccttctttagggggagacgggaatttgaattcacaaagaaatgcaaatgtaaagacttaagatggagcagaaacaaagaacataaggatcacctagtgcattgtgttggtacatctcttagaagaagacagcacagggaatttgtgagacaccaaatgcaatttttgttagtttattagagagtaaataaataaataatgataccgaactccaacaaaactccagcactgtccgtgggcagcgactattcagcccaagctatcattcttaatttccctgccaggctgcgactaccggggtgaatcagcccgcgccaggcccctttcccacccgccgctgcagttaggacttggcaaagatgctcgatatttgcgtatttgtgaccggtctttgctttgtgtctgcgctgcaggtgaggaggaggaagagaagcagaagagcagctggaggccggcggtggctgagcagcccccacacctttgagcgagccgcctgcctctccaccggcaaggaagccctgggacctccggattcgggctgccggagggcctgagcgccagagcccaggacccggcggccgggggcgccatcccctcatgttctggagaaggcgcaaatgtgagctggcggtagcggggaaagccctccgcccccgccaggggggacccgggaagcccggccggctctgtcggcagactgcggggatcccctcctccggccccgcccccacccacccccggccggggtgccgaggcggttaaccctacccgcgccgcagcgcacttgggctagagcgccgcgcacccaatccagattccagagcctgccggctgggaaagatccggtctcggggtcggctatgatcccgcagcggccaaggcagggctcaggccccgggattctccccacacgctgctgcactggcgcagccggtcgccaaactttttctccccaaagccagtgcccccgcagttacttggcgggcagccggcagcccactctcggcgggatgatctgggagaagcgggcgtgggacgagggggctgctgttttgcagccctgcgaggcgtgcagtcggagaagtggtcggggttccacaccgtccctgagcctgcccccggccaaggtggcccgacgtgctgcagtggctggcgcaggtgatccgggcagcgcgtccggcactagtcaagggggcagcggcacgggagggaggggcgcctttctcttttctcctccccctgcagcccagctgcactgcgtgggggctctccatctccacgcaatcagcaggcggaatccctgccctggagcgccctggctctggactgcacccccctagggtttgtcctgcagattcccctccccatctttctctgccacacacgcttccctaagccgcgcgcgccgcaaactcagtctcggtccccgcaggtgatgtcatgcccattgttttggtgcgcccaaccaatcggactcgccgcctggattctaccggagccggcatgggcccttcctcgcaccagcagcaggagtccccgctcccgaccataacgcattgcgcagggtgcaccaccgcttggtctccctgcagctttaacagccctgacatggaaaccccattgcagttccagcgcggcttcttcccagagcagccgccgccgccgccgcgctcctcacacctgcattgccagcagcagcaacagagccaggacaagccgtgcccgcccttcgcgcccctcccgcaccctcaccaccacccgcacctcgcgcaccagcagccggccagcggcggcagcagcccatgcctccggtgcaacagctgcgcctcctccggtgccccggcggcgggggcgggagataacctgtccctgctgctccgcacctcctcgcccggcggcgccttccggacccgcacctcctcgccgctgtcgggctcgtcctgctgctgctgctgctgctcgtcgcgccggggcagccagctcaatgtgagcgagctgacgccgtccagccatgccagtgcgctccggcagcagtacgcgcagcagtccgcgcagcagtcggcgtccgcctcccagtaccaccagtgccacagcctgcagcccgccgccagccccacgggcagcctcggcagtctgggctccgggcccccgctctcgcaccaccaccaccacccgcacccggcgcaccaccagcaccaccagccccaggcgcgccgcgagagcaaccccttcaccgaaatagccatgagcagctgcaggtacaacgggggcgtcatgcggccgctcagcaacttgagcgcgtcccgccggaacctgcacgagatggactcagaggcgcagcccctgcagccccccgcgtctgtcggaggaggtggcggcgcgtcctccccgtctgcagccgctgccgccgccgccgctgtttcgtcctcagcccccgagatcgtggtgtctaagcccgagcacaacaactccaacaacctggcgctctatggaaccggcggcggaggcagcactggaggaggcggcggcggtggcgggagcgggcacggcagcagcagtggcaccaagtccagcaaaaagaaaaaccagaacatcggctacaagctgggccaccggcgcgccctgttcgaaaagcgcaagcggctcagcgactacgcgctcatcttcggcatgttcggcatcgtggtcatggtcatcgagaccgagctgtcgtggggcgcctacgacaaggtacaggcttgaaccccagcccacgctaccggagtcgggcactgggtggttgggatgggcactggcggggaccctttgcgtgcggatccctagcctctccgggacgatcaagggagcccgccaggacagcgggcgcgtctaggacgcgcatccgtagtcagctaaacaactcggagatgaaccctttccgcgtgcagccaaagttctcgaggcagttaagagtgctcagcgcattcgggcaccttaagtaagtggttctggaagtcggtggggaaaccatctgtaattcatcccctcgtgaattatgtttagaagggccctttcaacccgctctcttgaactcagaagtaagttcctctggttttgctagcctggaacagcggcgctcgcttcggtcctctatggcgtggacccagcagcccagccacgcgtcttcccagtctttccaggtctactctcgtctcttttggttttgaggccgagtgatctgacagatcacagagccaagacaggtgcacccctctccccttatcttccttctgtgagttcaggtccacctgtgggggactgactgactctggggacgtggaaggcggttaaaagtgcttctttcttaaaagtgcttctg

SEQ ID NO: 10687 - DNA, 6000 bp, Homo sapiens
atggttagtgaacacttaaactatgggtcatggcactatgggaaggactttacatgtattcattcatttaatcttcacagaactctgtgaaatagatttcccaaattttacagaggaggaaactgagacttgctaagtgacttgcccaaggtctcacagctagtaagtgtggagtcaggattggattccaggcaatccatactgttagtggctcagatactgcctctgcatcagaaaggagtgctgtgagagagaataatgggaagacctaattctctttgaggagcatggttagggaaggcctaaccatggtgagaatagtgttaacgtcattagggtgagaagaaagagaaataagccgaggatgtctttgattgtgtagtaggggtggaaggtgattttgtcggaatgggaggtgattcctagggggttgtttgatcctgtttcgtgtaggaatagaaggtggagcgctgctagggctgtgataatgaagggcaagataaagtgaaaggtaaagaaccgtgtgagggtgggactatctactgagtagcctcctcagattcattggaccagatctgttccgatgtatgggacggcggatagcaggtttgtaattactgtggcccctcagaaggatatttggcctcatgggaggacatagcccatgaaggctgttgctatagttgtaagtaggaggatgatgccaatgtttcaggtttctaggtaaagaaatgagccgtaatataggcctcggccgatgtgtaggaagaggcagatgaagaatattgaggcgccattggcgtgaaggtagcggatgattcagccataatttacgtctcgggtgatatgggcgatcgatgagaaggcggttgaagcgtctggtgagtagtgtatggctaggaatagtcctgtggtgatttggaggattaggcaggcaccaagaagtgagccgaagtttcatcatgcggagatattggatggggtggggaggtcgataaatgagcggttaattaattttatcaaggggttaattttgcgtattggggtcattagtgttcttgtagttgaaatacaatgatggtttttcatatcattggtcgtggttgtagcccgtgcaagaataatgatgtatgctttatttctgttgagtgtgggtttagtaatggggtttgtggggttttcttctaagccttctcctatttatgggggtttagtattgattgttagtggtgtgattgggtgtgttattattctgaattacgggggaggttacatgggtttaatggtttttttaatttatttggggggaatgatggttgtttttggatatactacagcggtggctattgaggagtatcctgaggcatgggggtcaggggttgaggtcttggtaagtgttttagtggggttggtgatggaagtaggattagtgttatgggtgaaagagtatgatggggtggtggttgtggtaaattttaatagtgtgggaagttgaataatttatgaaggagaagggtcagggctgattcgggaggatcctattggtgcgggggctttgtatgattatgggcgttgattagtagtagttactggttgaacattgtttgttggtgtgtatattgtactagagattgctcgggggaatagattatgtgattaggagtagggttaggatgagtgggaagaagaaagagaggaaataaagtttgattatgcctttttgggttgaggtgatgatggaggcggagatttggtgttgtgagattgttttaggtagtagcttttctagtcaggccaggtctaggaggagtaggggtaggttttggcttgtaagaaggcctagataagggactgtgcggtgtatgatactagggtaaaatccgagtatattagagaagtaaaatgtatacagtggggattttattttgagtttgttggttaggtagttgagatctagggctgttagaagtcctagggaagtgacgcctagggctgtgagttttaagtaaagtgggattgtcatttggggggtggatgtggggagaatgctgttggtgatgagaaaccctgcaaataggcttccgattgttaggcgtttaatggggtttagtagggtggggttgttttcgttaatgttagtgagggctgggaagcgaggctgacctgttagggtgagaagaattattcgagtgctataggcgcttgtcagggaggtggcgatgagagtaatagacagggctcaggcgtttgtgtatgatatgtttgcggtttcgatgatgtggtctttggagtagaaacctgtgaggaagggtattcctgccaatgctaggttgccaatggtgagggaggttgaagtaagaggtatggttttgagtagtcctcctatttttcgaatatcttgttcattgttgaggttgtggatgatggatccggagcatataaatagtatggctttgaagaaggcgtgggtacagatgtgcaggaatgctaggtgtggttggttgatgccgattgtgactattataagtcctagttggcttgaagtggagaaggccacgatttttttgatgtcattttgtgtaagggcgcagactgctgcgaacagagtggtgatagcgcctaggcatagtgtgagagtttggattagtgggttattctctgctagggggtggaagcggatgagtaggaagactcctgctacaactatagtgcttgagtggagtagggctgagacaggggtggggccttctatggctgaggggagtcaggggtgaaggcctaattgagctgatttgcctgctgctgctaggaggaagcctagtagtggggtgaggcttggattagcacttaggagggttatttgttgtgggtctcatgagttggagtgtaggagaaatcatgctagggcaaggatgaaaccgatgtcgccgatacggttgtataggattgcttgaatagctgctgtgttggcatctgctcgggcgtatcatcaactaatgagtaaaaaggatataattcctacgccttctcagccgatgaatagctggaataggttgttagcagtgactaggattagtatggtgattaggaagatgagtaggtatttgaagaattgattaatgtttgggtctgagcttatatatcatagtgagaattctatgatggatcacgtaacgaacagtgctacagggataaatattatggagaaataatctagtttgaagcttagggagagttgggttgtttgggttgttgcccagtgtcagtttgagataatgacttcttggtctaggtatatgaatattgttgtggggaagagactaataacaagggtggatgcgataatggattttacttaatggggatatgagttttttttattagggttaatgagggtggtaaggatagggggaattaaggaagttagggctagggtgggtatagtagcgtacatggttattacttttatttggagttgcaccaaaatttttggggcctaagaccaacggatggctgttatcctttaaaagttgagaaagccatgttgttagacatggggatatgagttagcagttcttatgcgctttctcggtaaataaggggtcgtgagcctctgttgtcagattcacaatctgatgttttggttaaactatatttacaggaggaaaacccggtaatgatatcggggttgagggataggaggaggataggggataggtgtatgaacatgagagtgttttctcgtgtgaatgagggttttatgttgttaatgtggtggctgagcgagcctcattgtgttgtggtaaatatgtagagggagtatagggctgtgattagtatgttgagtcctgtaagtaggagagtgatatttgatcaggagaatgtggttactagcacagagagttctcctagtaggttaatagtggggggtaaggcgagattagtgaggcttgctagaagtcatcaaaaggctattagtgggagtagggtttgaagtccttgagagagaattatgatgcgactgtgggtacgttcgtagtttgagtttgctaggcagaatagtaatgaggatgtaagtccgtgggcgactatgagaatgactgcgccggtgaagcttcagggggtttggatgaggatggctgttactacgagggctatgtggctgattgaagagtatgcaatgagcgattttaggtctgtttgtcgcaggcagatggagcttgttataattatgcctcacagggatagtacaaggaaggggtaggctatatgttttgtcagggggttgagaatgagtgtgaggcgtattataccatagccgcctaattttaagagtactgcagcaagtactattgacccagcgatgggggcttcgacatgggctttagggagccataggtggagaccgtaaagaggtatttttactataaaagctattgtgtacgctagccatattaagttattggctcaggagtttgatagttcttgggcagtaagagtgagtaatagaatattcagtgagcctagggtgttgtgggtgtagattagtgcgatgagtagggggagggagcctactagggtgtagaataggaagtatgtacctgcgttcaggcgttctggttggttgcctcatcgggtgatgatagccagggtggggataagtgtggtttcgaagaagatataaaatatgattagttctatggctgtgaatgtcataattaaggagatttgtagggagattagtatagagaggtagagtttttttcgtgatagtggttcattggataagtggcgttggcttgccatgattgtgaggggcaggagtcaggtagttagtattaggaggggggtcgttagggggtcggaggagaaggataaggagcagctaaataggttgttgttgatttggttgaaaaatagtagggggatggtgctaataattaggctgtgagtggttgtgttgattcaaattatgtgttttttggagagtcatgtcagtggtagtaatataattgttgggacaattagttttagcattggagtaggcttaggttatgtacgtagtctaggccatacgtgttggagattgagactagtagggctaggcctactgctgccttgcaggcagcaaagactagtatggcgataggtacaatattggctaagagggagtgggtgttgagggttatgagagtggctataatgaatagtgatagtattattccttctaggcatagtagggaggatatcaggtgtgagcgatatactagtattcctagaagtgagatggtaaattctagtataatatttatgtaaatgagaggcatttggtaaatatgattatcataatttaatgagtcgaaatcattcgttttgtttgaactatataccaattcggctcagtctaaccctttttataatcattcgtaggccagacttagggctaggatgatgattaataagagggacgatgtgactattagtggtaagttagttgtttgtagggctcatggcaagggtaaaaggagtgaagggtattaagaatgacttccaggctgggcgcggtggctcacgcctgtaatcctagcactttgggaggccaagacaggcagatcacgagatcaggagattgagaccatcctggctaacgtggtgaaaccccgtctctactaaaaatacaaaaaaattagccaggcgtggtggcgggcgcctgtagtcccagctacttgggaggctgaggcaggagaatggtgtaaacccgggaggcagagcttgcagtaagccaagatcgtgccactccagcctaggcaacatgactcccagatttcgggcctggaggaaaggaggaaataggtggctggaagtgatatttactgagctggggaagtgtgggagaggaatgggtttgggatgcagggatcaagatttctggtttggacactgtttaaggagtgctgtgagacatccaaatgtcaacttccagaaaatttatgtctgaat

SEQ ID NO: 10688 - DNA, 6000 bp, Homo sapiens
acaggtatggctacatttatgtctcaaatctgtcttaagtagagcagttcttataaaactggtgtctggtttttaaattttacactttaagtgctttaaatatacaagttgagtatccctaatccaaaaatctgaaatctttaagatgctccaaaatcgacatgacacacaaaggaagtgttcattagagcattctggattttcaggttaagaatgctcaacaagtataacgctaatattctaaaataaaaaaaaaatcagaaatccaaaacacttctggtcccaagcatttcagataatggatactcaacccataccatatttttaatactttaagccattgtatattgcataagagatattttgctataattcactatttattatacagaagtttgatcaggttaaaggataaactattttcttgagtttatattctacccagatcaatacaaaatctttaagattattcaataatataccaaagggcctcaatctcaggggaaaaactagtgggctggaaattttcaaaaacacatacaatttaagtgattaaagtttagacaaatcctatttgtaccaatggcttcagaaatactacaatagtagagctgaaagagatcttggctgccatccgtttaatctcatttctccttcagaaaaaccagggttatggtactgaactatcgtttcctgtctcccctcaggtagctgaaaataaggtcataataattactgatattcccacattccttcagagtttacaaagtatctctttgtttattatctcatttgttccttacaattattttgtgtggtagacacaacagtcactactaccgggattttttttttataacaatagataaaactgagactcagagaaactaaacaaaattttaccaatttggcatggctcatggagccaataggtaatttgaacccaagctgtctgatactctttccatcactcatgctgcctccctgtagatgagatgataaagaatataacttaaatttgggccaggcacggtggctcatgactgtaatcccaacactttaggaggctgaggtgggcagatcacttgaggccaggagttagagatcagcctggctaacatggcaaaactctgtgtccactaaaaaaaatacaaaaattagttgggtgtggtgcacacctgtaatcccagctactcaggaggctgtggcaggagacttccttgaacctgggaggcggaggttgcagtgaaccaagatcacgccactgcgctccagcctgggcaaaagagcgagactctgtctcaaaaaaaaaaaaaaaaaaaaaaaaaaaaaagaatatgactttagtttgaatgaaatataattatctgattatcaattcaatgcatcattacattagagtttagaattctgaatggtataacaaaatagtactgcatgtcttttttactgagtttctttctgttgctgttgctttttaacattttaatatcaacatacaaatttcataataccttggtttgatttaataccttttttataatatttcaaatacttgaatttttgtattaatatatagcaaaagaacataaaagagcaccaatgtttatctacaaaccacagagcaaaaaagttttagagggagattcagtgaaactagaatgccagatctcggctatacctccaccaaagcttttctggaaaagaaataatgaaatggtacaattcaacactgaccgaataaggtaggatatgtatttctagacttactatagtttatttgggtgaatccagttatactttttaacatgcattataaatggcatgcatttatctcaatttgtctagtttttaaaacactaaagaataatataataaaatatatattagataaaaatgtaagaaaacttcagtaagccagattccactaatcagaaatgtaaggcataaagtagactaggatttatctttttatcaacgatgatgaaagatggcccaaggaaataaatgacataaacaagattaaagggggatgttttcttttcttttctttctttacaaaaagcttcagcctttattaaacaaaggaggaggtaggagacagataacggaacaggtcaggacccctccattcccctatacatacgcataaatacaaacacagacacacccgagtgaatgacagggaccatcaggggacagattgaagagcagagggagacagcacccaaggggggatgtttaattcaagaaaaccaatagctatttggcaataaatagatacagctttggaattttcaaatgtttttttcttcctagtctgactgttggtcagagacatccacttcacagaaataattcctgtactttcatttcttaaaaatttttatttcagcttatatcaagataacactggaagagttactttactgataaaagatgtaaacaagaaagatgctgggtggtatactgtgtcagcagttaatgaagctggagtgactacatgtaacacaagattagacgttacgggtatgtcatactattaaccaaagtattataagggatttaactaggaagatttaataagaaatgaaaatcccagcagagtataaaatttgagatattttccccatatataatcagttttggttcttttttcttttcctgtctgataataaatacctagtgtgaccaatttggttagaacaggttttctgaatcaacttttatgtgatctatttcagcacgtccaaaccaaactcttccagctcctaagcagttacgggttcgaccaacattcagcaaatatttagcacttaatgggaaaggtttgaatgtaaaacaagcttttaacccagaaggagaatttcagcgtttggcagctcaatctggactctatgaaagtgaagaactttaataactttaccaacattggaaaacagccaactacaccattagtaatatatttgattacatttttttgaaattaatccatagctgtattaacagattatggttttaattaggtaatatagttaatatatatttataatattatttatcctttgactcttgcacattctatgtacccctccgatttgtgaagcctacaggaaatctgggtatatggatttgtaactgcagaagactatcttaaaatacaggattttaacatttaagtcatgcacatttaacaattacaggttataaattagtatcaactttttaaacacatctaatgcttgtaataacgtttactggtactgctttctaaatactgttttacccgttttctcttgtaggaatactaacatggtatagattatctgagtgttccacagttgtatgtcaaaagaaaataaaattcaaatatttaaaacggactgtctcctcttcacaaaagtctagatctgtaaaataaaactccactcagcaaaacctatgaataacaagttccaaaagagcaatgttatattctagaacagtgtgaagctcacttacagctcagccaattcctctagaaactaagctagacttgccatggtttgcacttcaaaggcaatcacaagaacttaaatcatgactgaatctactgaatttgtgattttgttttaaccaaacaggtttctaattcttcaggatttttcagtctgttatgctcaaaggaataagaatagtctctagagattacctgcttaattctcatagttaatgtaaatttgacagcccggtagtcccagctgctgggagaggttgagctggggatcccttaagatcaggagtttgaggccagactgggaaatatagcgagactccatctctaaaaaaaaaaaaattatgtaaatttgattacctatatatgggtgtttttcctctaataatttcaatttcagataatctgttactttagaaagcataattttgtgaacagctgagagtcccagtacaggaaagcccaaatccttttgttaaaactattctaaagctttttttcctctcgggcttctagttcactggctgtcagccttttgcgaggcctctcctgttcctctcatcgatggtagtttttgaccctcactactgtgtggccgttttgctttttatctacacataaaacagcatttatcgacagcagtctacatctctttcagggaaataacaaaagtggctttatcttttactttcaaaactggttagtggttttctttgcaggtttccctggggcctttggactggattccattttattttcctttttatcaacacgagaatccgtcctggtcttacatcctggagggcttttggctgccttaatttacagccaaattagtttggccttttctatagctggtttaccaaccttctcatctttgcaaagcttctgggtcagatgtgggtctgggccccaggactcctgtgtcggcctgacctttcacataatcactgcagagtttttcatctatttttacatcacgggggcaggggagtggaagctacttccagcaacagctctcggttaataaccagtttctgcaagtagcagcagcagcagcagcgtagggtcacggttaggaatttgggcttgggcatccaagacttggccccaacttccagtgaattacttcatttctcagcttctcggtttcttcaggcctaaaatgaggacaaaaatacctacctttcacggaggtggatgtggagactaacaaggcgataaatgttaaaggtattcgagagagagaagcccgtgataatgaatgactacgatttttaagcccacagccaggttattcccagaagttggccctccgcaccagaccccagcagcccgcagcccgcctcgggcgaaaggcctcccgggctcctgcggcgcagccgcgctgacgacttgtcgagtagctcgccgccctggaggagctgggggctcgcgcaggcgtcagagccgggcagcgcgcgccgcaagactagcgcgcaagcgccgcggcctcaggcgaacgaacgggcggtgtagtgcaggtccgccatggctgaggcgtcacggtggcaccgaggcggtgaggggtcctcttaaggagtgggagggacaggggcgatttggcagttccagacaccctgaaaggaactctgcggccccaaattcgtttgagagatgtgactgccgacacctttagccctcacagcctcccctggggaagcggagagggacagatggtcccattgcacagacgggaaaactgaagccctgagcgaggtggcgctcgcctcttgccggaggctcgagctgggcgttgtcacctgtcgagtgaccgtcgctaggccggtctctaaagtccttggttgatctggggagtcgtgaccttgacagaattcaagccgaggtgtttttcccctgtccagcagaaaccagccttcccaagaagctgtattgagggtggagaaaacggttaggacagatgagaggttttacttgtttcgtattttgctttttcatcttaagactggcgagaagacatcatgatataaaatctgttagtggccgggcgcagtggctcaagcctgtaatcccaacactttgggaggccgaggcgggcggatcacaaggtcaagagatcgagaccatcctggccaacatggtgaaaccccatctctactaaaaatacgaaaattagctgggtgtggtggcgcgcgcctgtagtcccagctactcgggaggctgaggcaggagaatcgcttgaaccggggaggcggaggctgcagtgagacgagatcgcgtcactgaactccagcctggcgacagagctagactccgtctcaaaaaaaaaatctgttattaatagtatatagtaaaaaaattatccctgcctcgtaaaactaagaattgaaaaatagccagaagctattggagctttcctccccgcagtgtaaggactaaaagtggctgtggtttttccattgttgtcacttataaattacataataatgtaaagaaaaattttgtct

SEQ ID NO: 10689 - DNA, 6000 bp, Homo sapiens
ttaaaggttaggaggtcaacaaatgaaaatgtaaaaattgtgtctatttttctcccttagtggatatatacaatatgaagatacactatgaaataaaatctatggctaagactgaatgaaaccttaggatgtcagactttgtaatacatgttatataatttttcactgtaatttggatagccatcgaattatcattcttctttactcttcatagtatgttacttttggcaagcggacaaatctctttaagaaaaaccatcaatttaaaaacagagtggacaaatcaagcttttgctttgtgagcacttgctgaatgtaacaaaagatttttagtacactttgcatttgaatagtactttagcaaagtactatttttcaaagtagttatacacttattgtctcatttgatatgtgctatagcaaaccctgcatctagagggaaaggcttatcacagctattttagtgacaatagcaagagggaagaggatactgaagccacatctttacgcatctgttccatcatgttttgaaaaaatccaacttactgatgggactaatctaatgatatactaagaaacacagatgtaaaataattattttaaaagatattcttaaaaatgagagctgagaagccttagaaaacctttagtctaattcccatttaaattcttatagtcataatgtcagttgttttccttggggtgaggctctctattcgtttttgagaaaatatctgccaaatgctcaagtctgaataaccatagtttatcagttgttctttcaaataaaaatggtcttcatgaaataacagccagttcagcttgcacaggtgcttttcgtagaggcagtaattgtactttagtatgcagtaaacactaaatttcttcacaaagaatattaaagaaatatatgtactaaagggtcagggtttaataaaaagataattcttactgcttcctcaagagaatccttaaatgaaactgactgtctgccaactctctaacaagtatatagagtgatgaataatatgatgactactagaacaacttgatgccactaccttgattcatactcaggtaccagcagttttaccaatcaatacttttgcaacagcactgcaaatgttaacatacctaaaaaggtatatgatatcttagtattgttatgaaaataactttgactttaaagaatctcagaagagtctcaaggaccctctgtagtctacagcctaaattttgagagttgctgatacagaccaataaatttcatgtaaggaagaaaagtactgcaagcagttgattgtttcaaaggtggcaccatcattccatcttcaagaggaaaggtgagaatgacaatatcatagaattttactattttccttttctggcaggacctattcaggaaaatttctgacttgttcctgctggttttaaactaaaacatggtatggcagacacgatctttacaggctaaaacaacatgaaaagcagcagatactaaatcaatactctcataagtactctgtaccagtaacaaagacaaagcctcttaacatattgggttggttacctaagttcatggaaaacctcagatattccataaagatactaccaggtaagtcaaagaagaaaaaaaataacagctttcataatttaaaaaatgtgacttggtattatgatatatttcataagcatatctagaatacaatgtggaacctgtccaattttccatttatataactcaacagattatgatcaaagggccttttatacttttttgtttttgtttttttggtgaatggatctatgaatgatacttgtgaaacacctatagaggaaaccaaaaaatgttaaagctgacttcattatggcaaatgcagaactgtgtactaataacaagtcaagttaaaaacataaagacaatgcaagtaatatgctatttgcacctagattttcaccaatggagagctaaaagttattagcggatctttgttactaaattagcaaatcaaacaaaatattatttggttaacggagatggacatttaaaatgtcattagattgcagatctacttgaaggtacgcacagaagagtccagtttttacaaaataaatctcagaaactcaaatttattactgttaatacattaggcttcttgttttcccaggcatcatctataaacccaagtttatagcaataatggttatataatcacccagaataaaacttcatcactagtactgaagcaatgcttactggtacatgatttggttggaatgaaactgtgagaacagttggcaacaggtgctaaccagcaacaagttgtttagaatatctaaattgctgtgtggagaactgaaatgactgttaaagggaatgagactgtaagtcacaccttttaagtgatgcaaacgtggacaggacagaaaagaaaagaaaagcagaggcagataaatctcgtaggctgcaatctaaatggaatagctctgttgagttctaatcataaaaaccattcggataaaaacaggcctgcatagagagacaggttctccgaagctgtgttgctgctttaggcaaggatttattagatggactctggctctcctatacacagagcaatcaccaaaaatacatatttaggtaaataaatgaatggaaatacctcaatacaaattttccaactctgcccattaatttatcaaaagagataaatcctcattggtatgtaattaagtaacagaaaagagaaatgaatcacggggtattttgacatgctcactcccattgttcaaatgtgttaagttttagaggggaaaacaaagccttaaaatataccaaattaagcagactcaaagagactatatgttttagaaaggatagcctaaccaagacagacactattacagagccacagtgaatttgaattttgttttgttttttaaattcttgggcactctaatccaaacacattcctgtattgcatgtttctcacaaactgacagatacataaccttcccctgccctcatcgtggaacagtctttatgaggtttcaaattcgggatccatgatgaacatcatttaacacatgaattgtctgaagttatatatgcacatttatttgggtgtttgagtgaatgcatgtatttatgggaaagaggcccagttgtaataggattctcaaagagatccagaaccatctaaaaaagtttaagcaatcctagtataggaagctcctttatttgacaggaagctgataagattatctctagggtcctaagaaactaaggagatgatgttttaggtgagattgctagaaagccttcagttcatgtatttttgtcacaaacaccaggtactataaaaagatcatttaaaaaaaaatgttcagaggctaacggctttgagtcaacctcctcagtatgcaacttataacacgtgtggcactgaccataagggtttgagaaggaggagtaataaaaatgattatcaactgctgtatgaaaatcgcctgatgattcgtaataaggagcttacatcattaaataatgtcactaagcactttcaattagcactgataaaagtctcagagttggactgatttaactactaacaaaatactttaatttttcactggtcctatgaactaacagcctatctcctaggtacctgaagctcccatcatcttctaaatacagaaatactgttactagaaaacagttcttcaaacaagctacttttccattcatggtacacctgaagagtttgcagaagacactcaactcttaaatagaacaataccttcgaagccaagccagtgtcacatatctctctagaggaagaagattatgcatgaaagatcatactcctgataaaggacatgttcacatattgttttaggcagaaccaaatattctaaatatgtgttttcactgcaatgtagactaaattaattgccaaagatgaaaagttacttgctatagggtcctccacttcctccataatcataggactgctgtgactgatcatcgatgctgtaacttgtctggtagaaatccgtgtttaagttttcaaagcctgacattgcaaataatctgtaataaaagagaaatggcaaatattccttatgcccaaggttctactgaattcgttcctggcagtctgcttaagcaaatagaaacacaacaaatattttttcagtaattcggagaggggatgggggcggaaagtacgcagcatttgaacgacggtagcggagagagagtaagaaaatgtatattcttttaagttgcggcccagtaagacaactccaccttaaagagctgatatgccttccattaggggcgaggtcgtgggagttgtggttccataagcggtctaaaatatcaataacaacaaagatgatttttcaccttaggactgggctttacagctgacaaggcgactgcttccttgcaaaataaggcctgcggcctgccaggaaaaagtgcagaatctggaaggtcgcgcctgaggtgcaggggaccgcgtcagggcaagggcttgaatgagagcgagggtctgagcgaaaggaccagggcgcggcgccgaaagacggcaacaagcccatttgcacgggtgtggagagaagctgaacactgtgccacgggcctgggtcactcaccaaactctgaggctgcgctggcggcaaaggcagtagcttcactaatcccaaacaacccccaaactctgtttcagaccctgaaccagccccgttgctacgtgtcacagggccaaagaacggcttccggggcacgcccgctcgcgcaggcgtgttagcaggttgggcaccggtgggcgggaggaggagacacgagtatggagcttgcgcagtatctacccaacctgcggctggcccgtgccaaagaggaaagtgcttccggcagcctggttaggggtggaaccaggaaagcgcaggcgtagcaattgctgcttactcgtaggtaggaggaggagtttctcagacctaggtgatggaggaagactgggaggcgctaaaatgagacagacggagtcccctctcctgtccacaaactacaatgcctacaatgcctcggtgtcagcatttactgtgattcaagcactgtgctaaagtgtttgtatgtattatttaatctttacaacctaatgagatggttaccctatttcccttttgtaagtgaagctattaagtattcattcattctgtgctagctgctggggatactgtggtaaatataagctaggtgacatctacccacctggagttggtggtggagaggggtaatcgaacacatacaaatgcatgtgaaattgctactaatattctttagtgttccataattctttgaaagagtaacattcatctgggaagaagagtctgtaaagccactataagagggttatcaaagggtgagtgggagttagagaagaccagaaaagagaagaaagggcaacgggaaaggaggataagggaaaatagcctgaatattttaggcaaagagaacaatgtgtgcaagatctgggaagcatggtctgaggaaagatgaaaatcgagctctgaacttcagcattattaacattttgagtcaggatgtttctttattgggggctgccctgtgcatgatgcttagcagtagcatccctaatctctagccattagatgccagtactccccccaaccaaccaccaccaccatcaccaccaagttgtgacagctaaaaatctctccagacattgccaaatccaaatgtccttgggggcggtgggggcaacattagctgaatttgtcaaccactcttctaagtggaacctgagtgactggaacagcaagtgaggggagccacataggagttgaggctggaataacaggaaggggccaggaaatatcctgtgggatttgtgtgttggttctaaaagaagtgaagattgtgaactgatgagtgatgtttaaattgttttcttttgaaaatgattgctttgg

SEQ ID NO: 10690 - DNA, 6000 bp, Homo sapiens
tggggtgtgttctcaccacacacacagtctgtggattattttggagccttctgtatgaattgtgctagaaaacatgaaaaaatattatcattattattttttaaaacatctttaaaaataaggcctttctaaagccacagaggcaccctctctctgattgcatttttgccagttggttagctgtcagcaatctgttcttagatcataaatttgatggtccccccacccccttgaattgctttacactagaaacctaaaatgttaaagccagaagaaaccttggtgaaacacccatattttgcagatggagaaactagtccaagaagggaaggaacttgccaataccactatcacaggtaataggaggtagaggagagaatgggcctccccagacctgacatctgtcctttctctcccttaccccagcccctgctgtcaaatggagttacagagtgtcagaaccagaagggtctgtagccatcaccacatctaatcttgtcatttaatagatgaggaaacagtcttgtagaggaaatggacttggcccctaaattgatactgggcatgagaagtggttggactcttgtctccaggattccactggcactccgtggcctgtcagtcagatcaagctcagaggcactactcttaccctaccccttttttccctaagtcactatattccatatcccatatatgtgtgtgtatatatatatatattccatatttctacttttccttgagaaaagaatctgaggatctagccactctaggcctacaattcctcatggtaataatctgctgcctattgagtccctgtggccacctttaacagggcacagtctctctagttccgtttgtcttccccattctccccaacttggctcacttcattcatttccctgcctggctcaaggaagcatttgcatttgtaatccctgtccaacaccattctccttgatttgcggtgtcaaaacaaagccaaaataagtaaatcttagactgttttggctacatggtaagaggacttaaagtatgccaaaaatatgagctgggatgggtcataattaatttgaggagtaggtgccatgctgtctctagagcacaatttgagcagcatttggaggcttttccaatgggatgtcagccacctggagttcctccattagatacttaactgctggactttaatgagcacccatcttcagatatcccactttaaaatatgaaaagtcttaaaagataatcaacttaatttttcttcagtgtaatataatgggagggacgctgcagggtcctggtgcccagtccctggcatgccaatcactagtccccttaaggaaggttttttggcctcaatgctatttatatttggaaccagataattcttttttgtggggtggatgctctgtgaattgtaggatgtttagtggcatccctggccttcacccatgagattccaggggtacaattccataattgtgagaacaaaaaacatctctggacatttttgccaaatatcccctgggggagaaaattgctgtcagttgagaaccactgtcttaagctaatcatgtagccactttgaagactttgccactttgggaatggcaaataggactggggactctaaagagagacagcatgatgagctaataaaggatgacgtcaaataagttatttagggaaatgaagctgtttggtaggtagttctaacctttgaggatgaggaaatgagaaaatcaccttctaccagtggtcaatcttttctttctcatgcacatgcccgctattgtaactagcatactaaaaatgcccccatggctcatcatggtccaccaggaattcagtgggttccaaatcctgacactgacttcctctaagttccaagttccccagtacactcttcccagttatgcactgccggctccaggctaacagagcacgtggcattctttcctgcccccagcctttgctggggctctttccttggtttgcatgtccttcccagtcctcagttactgcctataatctcctcatccttcacggctcagttcttttgaagccttgctggatccccacagacagacacactgattgcatccttctttgctcccccgctgctgtgtttacatcttttagagcacttgtcatggtctttctgggtgacagttgtccgggttcgtctgtcttcttcttctgccacattcacctgccttgaggcagagactgtgtctgattcctcttcatattgcccagcacctggcaccctgtgagatacagaataggttccccaccaacatttgaaatgaagagaattataaagaaacatggaataaacattgaacctaatgtagtttgacctagatgcctacacttgaaatatgtaagttctatatttaatcagtgaacaactatgtatttaatagaccaaggggagctattgaccatacttgagcagggcaatgacgtagacctctgttttaggaagatctgcttgactatatgatttataatgaccatggaaaattcatctttttgactcccttaaaagtcccctccctacaaagtatgcaaaacaaatcttacctaatgcagggggacattgaggttttgcttgtaaagggtctaaagagcttcctctaaaaggtgattgcaaggtgtgaagcctttaatgacagcctaattattattattaccaggcacaaagcttagggaacctaaaagatccccaggtactattcaaagtagtaagatacaaaaactgaaaatggagaaattaaaagatggaatcattaaatcagagactcttaatgttggcagagaccttagaagtgatctttcctgattctgttctctcatcttcctatgctgatgcttattcttcctttagaaggttcctacccagtgcttgctgttattagagcctaagagttaagagctggggcctgatggtggcatttactgtgtttaaatgcccaatctctttcattagcagtgaaaacttggggtgagtttttagacctctgtttcttcatctataaaatgggcatgaggctacctacacaggtattgtacaaataaatgatgcaggtgcatttcttagcatggtacctggcacattcaaaatagtgaataaacattagccttaaaaattattttagctaattaattaatatatgtgaaagtgcataggaaatcacaaagcatttgacctccaagttgttcctattttggggcttcattgtacatggtcagatattttttacaaatcccagtccttgtagctgtcactcaagtccacatgatatacagtcctggtgagggaagtgaagagtctgtggataaaatggcctattcatatggcaaagcaaaatggagtccaaagtctattatttctttcttactaaagacaaagttgactttccttttcctggatcatctcctgttggacaggagtcctggccagggcagtaagtcaactggtaacggccaaagcactcaagtttgtaggttgtactgtacatcttagtaggtctgtgtctttatgacttaatcccagaagtcttatctttttcatctgtaaaacagggctcatggccactttacaggtttggagtgaagatagatggataaaaatctgtaaagttccttcaaaaactgtattctgtggcggctagtggctgctgctttgcatttaacactactatcctgaacacagctgatctctctacaggttatttcagcagaagccctggtctaggagagtctatgaagttccagcttacaccagacatgaccagcatccagaaagacctgaaagaagcttgaatcctctcactagaatccctgcaaaatgactcatgtaattgctctgtgtaagtatccttagtctttattgtacacccacacgattctgatgctatagactcctgtggaatgcagggaaagagagaagggggcccattttaaatgcctaggattgaaaagagaccaccgtttcacttgtaaaggtagacagggactgtcaaatacctggtcaaaatacctgccagtcactccagatcctcccttgtttgtctatctgtcattccttccattaggagagagaaagcttttttttttttttcctttaaatttcctaggagggatttctagggtctttccctcaggaattagttgtaggaataattgggccagtggagtgcaggagatatatccagcgcagcccatgcactcctagaaaaagtgacctagatcaagcagctggtggattgaggactattgtggggaccccctgccacctactgacttacagctgaacccacattcccagcagcttcagcctgggggctgggggagcgggcagaccgagctcagaaaggcaggggagggtaaagaggactgtggggttgcccctttcaggaccaagtgccacgtgtcacacacccccacctccacctttctgcacacacagaaaggaggataaggtgaggatgggaggaagggggaacaggtagggaggtcggctgtggaactccaagctagctcggtgggtattagcatagagcttgctgcctgtgtgagtgtgagggggagagcgagagagagcaagggagggagagagaggcaggctgcgaggggagaggagagggagtgggggagccagcgctccagctagcatgaggacgggcttcttttcccgtgctcagttaatctggctgtcagttggtgttaacgctgcagtttaagtgttcggattccaagggaaacagacaaacctcacgaaaggaaggaagcaagcaagcaaggaaggaactgcaggaggaaaagaacaggcagaacagcgagaagaataaagggaaagggggggaaacaccaaatctatgattggacctgggcttctttttcgccaatgcaaaaaggaatatgcagcacatttttgccttcttctgcaccggtttcctaggcgcggtagtaggtgccaatttccccaacaatatccagatcggtgagtgagggggcagcctggggagggactttctgggtctggccagggatttttttggggataggggttgtgtaccccctccccggtactgactgttttgcttggctccctaaagctgtgctgcggtaacagaagggagacttgggcttacagccagaggagggggcttctcctgatcggatgaggggcagaggggaagtgttcacacacgcacacataccctactcgcactccaggcaagagcatgtgaaatggaggaaccatcgctttggaggaaaaaaaaaatcaggctggaaagggtggtgggtgtttaaggagttaactctattgcttggtagatggtgcttgattccatttttaatgtaagtatgtatggtgtgtgtgttttcacgtgtgtgattatatattacatatgcacatatatatgtaattgaaggaggcagtgctttctctgctgggggacagaaaagagaccctcgagaagaaggagtgaggggtgctgggtatattgcagccactgaaataatgccagaaggcccccactccaaggcgggtaggctccctctcctgttctggactcctccagctgccttctctttgctgtctgccatgctgcgctggtggtctccactcccccgatcctggaacttcctcgcctgccttttctccgttccttccttgccccctcctcttagatttcctatccacagaggtctaccttttacacacacaaacacacacacgtacacatgctcctttctcctcctgttggctctccattatccttgttactgggctccatcctctcaacttggaggcaggtttcaacatgctgcatgctttttttgttccccatttccccttcttagttgttacacttctcaaaggccccgccaccctccctgtatttctgaggggactgacagatattgctactcctgataatcatgagggaaagcaaaacaaacagaagcaataacaccaatcac

SEQ ID NO: 10691 - DNA, 6000 bp, Homo sapiens
caaatatctatgtcctttttcttctccccagttatgtacttaatttgggagggaatagtttaatgagattagttctgctaatctactgtaaactaatctaagtttttggatgcagaaagatggctgatccaaatagcaggtacttctttgaacttagcctgcagagcctttagcacattttagttttaattatgaactctagtcaaattattgcatgttgcactcataatgttctcaactgggaaaaataactccccactataaagcattttaaaatatgaagagaatatttggttgttagcacgcatagagaacactagagacactccgtgagtaagagcaagagatcctaagtatgctgaaatgtgtgggactgtctcgcctagtgaggaattgcccttcttcaaatataaatagcatatcccattgaaaacacttcactgaatatcagtctgtaagaattcttaataatttatgaccatgagataaatttacaaaatttttgtttcatttgaattgaattgatttctcttaatcaagagaccaccttttatgtttcttgactattttcattgtgaattgtaaacttatatatatccatatatccattgaagttattggcctgctttttacttattgtatatttacatagcaatccttttgtaaatttgcaaatctaatctttatatttgtgttgcttgctttaactcccttaatagtgtgctcatttaacatccttatttgtctcagaaacataggtatgtttgtatgtttggacaagtagctaccctcaatatatcataagggggaaatacttacaagaacactatgctgtggaaatactgtgaaatgagtggacttgagaggctaaatcattcatcgaggaacattttactaaagtttgagtggttttattctagagcaagttttctcagcattggtactactgatgtgttttggcaagataattattttttgaggggactgtcctatgcattgtaggataacagcattcctggcctctacacaatggctgccagggtatataatcccccacttgtggaggaacacaatttctgtagaaagcacacttccaatgctgtttttgaaaagatcaatggagatttttagggagaaagtgcaagtaaatgttatccaagaggcaattctgtagctaacttgaatatttggtttgtttatatatgcatacatagacatattgattttttgtattataaaaagtgccatttagtgtctggtgccaagtttgctctttctgtgcaataattttctctaattaacactacatctttaataagtcattttatataaacaaagcagtgttagtgtgagtggtatatggaattaaagtacaggacacaaaaggaatgatttcacattattcttttacaaaatccagcatgttaatagcactatcgttgaagatgatggtagttctaggcttcccagtggagataaataacagagcatgcaagtgcttgtctaaggtgattcataaaagagaaaatattttggagaaacagctatgaaatatgcaggtataagatagatattctcaaatttgccaaacggaagtaattctctaaatgagagagctctgataactggtttacgtagtcaaaacgctacataaatatgaccatacatctcccaaagtcgtagccattgtcgaattcttaaactcttttttttttttttgctaattccacaggagaataataattgcaatctaattaacagtgttgctaatagatcttgtctgcccgaattctgacagagatgtgtgaacaagggacttcattacatacaaattctcagattacagaacttgagtatcttagatattgctaggtctatcacattcttttaaaggtaagctcagcagagggaaaatgactaagattacatagctcattatcccttctagctctactaatattttttcctattgagagtaaaaaaagtcttccttctcttacattaatttcttattaattaaaacctatgaaaaaataaaatcaagtgtgttaatcttttgtttagagacaactgtaatttattaagtgtttcttgttgaaaaaatcattttaatgagaaattctataggaatatttgtaaaactgtacaatatcatccacgattttttttacatgtgaaaaaatttctgacaatctgcagaatgggagacaacttttgcaatctatccatatgacaaaggtctaatatcgaaatctacctggaacttaaacaaatttacaggaaaaaaatattaaaaattgggtaaaggaaatgaacggacgtttctcaaaagaagacatttatgcagccaacaaacatgaaaaaaagttcaacatcgctgatcattagagaaatgcaaatcaaaacaatgagataccatctcacaccagtcagaatgacgattattaaaaattcaagaaacaacagatgctggcgaggctgtggagaaataggaactttcttcactgttgatgagaatgtacattagttcaaccaagatagcgtgacaactcctcaaagacttagaaccagaaataccatttggcccagcaatcccattactgggtataaaagaataaaaatcattctattataaagatacagacatgtgtatgttcattgcagcactattcacaataacaaagacatggaatcaacccaaatgtccaccaatgatagactggataaagaaaatgtggtacatatacaccatggagtactatgcagccatataaaggaatgggatcatgtctttgcagggacatggatggagctggaagccattatcctcagcaaaataacacaagaacaggaaacaaaacaaaacaccacatgttctcataagtgggaggtgaacaatgagaacacatgaacacaggaagaggaaaaacaacacatgctgtggcctgttggggatgtggggaaagggagagcatcaagttaagtagttaatgcatgcagggcttaatactaggtgatgggttgataggtgcagcacaacacaatggcacacgtttacctatgtaacaaacctgcacattctgcacatgtatcctggaactttaaattaaattaaatttaaaaaagaaaaaacaaaaacattcggtctgaaaaccctcacaaagctttctctctgatgacacaaatcagagatgagtggtaaacatttcgataggaaaaaaaaagaaacacagatctaaaaaagataacagggataaatatagggttctctggttgaaaaaaagttgtgattaatctgaagagaattatttcatagcatcatatataccagatatttaggggatttaagtaatagcacacttaatgtgagttgaaaatacattgtgatcaccagtggtaggaggtttaaaggagaataaaaagaatgagtagagatgtgaaaattggatcccataacaaacacgaaaaggttttaggggtgtttcccttaaattagagaaaacattgtaggtatcttcatttaattggctgccatgtgtctttccctgacaataatgtattcaaacgttcctcaaatgatttatgtcatgttctcaagtgtgactgttacggctgtgctagatgtctgcaatagttaccatggcctttgtagaatttgaattccaaaggtacagactgtgaactgggtgagtaaggaatgaatttggcaggaggatggtgaattgagacttttgatcctcaatcttatgttcctgaatttaaatatctgtgtgtatgtgtgtgtgtgtataatatatattataaaatataatattttatattatatatatttttataatatatatattatattatattatataaatatattctatataatatatattctatataatagatatacacacacatatctattcacaatgccttttaaaatttttttatttaataaattttttatttaataaatttttatttaaagaaaagattaaaagtttaaggcttaaatgaactttttttgactacaacttcctcctagcagaactgagaatagaatgctgtttcttggattcagacattttcctttcaacctgtggcaagcctgagaaaatagtgccagaatcatcaacattaaccacgtctatagatgctttatttttgcaacatttctgcatgaggagccttaacctgctatttctcaggcattgtctcctataggtggcattcaagaaactgaccaggtctctaatgatagcagtagatcccacttctgtcttagcttaagatgacacacctttgacaagaagggtcagcaaagtatctttaaaaaaatatttaatccacagcaagatggccgtgagttgttctgttgtgttacaagtgctggtaaataaatcatgagcaataatctttaaatacataagggtgtggctgtagctagtaatgctgatgaaaatcagaaagggaatccaagagggtcacaatagtgttagactttttaaacagtaagagctgtgtaggaatccttctgtgaaccataaaaataataaacgctgagcctattggaacataatctcaatcagcaagatgccaatgctttccagatttcctcacagggccctgctaattccatgccaaaactggcagtggatttcttccttctaatctcccttaatgccttattcgattattgtcactgctctccgaccatgcactgtcccttcagactctcctttcccaactgagtcagtcagaggagcctgggtgtctgcaggacataatctaagaccacaaaccaccttgttccacgtgagaaggaaacaagaaagaagggagccaggggaatcctgcaaatttttaggcaacctctttatctattggattactgacttgaggcaaacaaggaacagagatatgaagggtttgaaagatttctccagttgattggcagagaagagctggctagcagggaggacgaccctaggagggtgaattctgcatttcagtgcactgcaggatggcgtcgtctctgccctggctgtgcattattctgtggtgagtaagatcctttttcctgatttttctttttatctcagaggaaaggaaaagtatacatccattgggtgactcctatatcaaatcatgaaagaggccagaagtggtgttgcatgtatttgtaacagggtggaatagagtagattagacaaaacctcttctctgagcctgggagtaaggatcattgactgtctacacacaggctagaaaatgccctagggaaactcgaagttgaaggcaacttctactcagaaaacgtcagtcggatcctggacaacttgcttgaaggctatgacaatcggctgcggccgggatttggaggtaagaagctgcatctttgctacacaaacacctgtagtttccttcctccgtttctgccctttgaagacccagaagagtcagaaactaggtagtgggaaggggcagggtacgggagagagaccatgggtatgttcccatccagtctctgcctcatccaccattagtagccttgttcaagttatctgaactctctaagcctcatttcctaaattgtagtgtgggtatatgatcaatgtttgcctcatagagtggtatgagtgcaaaatgagattattcatgtaaaacagttttattagcactttcccattaaagccatcaatatacattagttattatcattttcgttagaacgaatctagcttctttcattctttaatgttctcccaattgactagaataaattctaaataaggccactgacatgagttttcagagttgagagacccaaggatccccactactggaatgcaataggacacattgcagatactggctatgataagtaaggggtttggtggtagagggctgagatcaatccccttaacatcagtggtgataattgtttcatccctctgggctaatttcaggtgctgtcactgaagtcaaaacagacatttatgtgac

SEQ ID NO: 10692 - DNA, 6000 bp, Homo sapiens
aacatttgctgtggttggctatatcctgtattatattctcttcaaatgttactggtttaacgtgtatgtaaaatactctatgcccaaggcccatgtaggaaaatttccccgactcaacatcttaaaaataaaaacatgggcctaggattaagatggcacaggagctagcttttcccactacctgtctaagtgaaaattttatttcgacagtatgcaaaatgttgacagtactatcagtattattagttatttaaacacgctgtagataatgcactaaaatgcagagaaaagaataattttatggcaagaaaaaagagagaggaaaattggcattcattagatgtctattaggtgtcacacaagagggctatctgattcacacttgttttcctatgtaatgccaccaccagcttataaaatatcattacttcatttgaaaacttcagaaaagttcagcaatctgcccacggccttacagttttgaaacatctgtgacttcaagtatatattcgtgcataatcatttattgtgccatgctaacctgggttctacttctgtaaagatcatgtgaaaacttacgtaagctttgtgacctgtcaaagtggttggggcaaacaatctctaaattccactagagtgccaaacacttatgactcaaatatacataaattttgtttttgctatatttaccatgtttctctgtatgctgaaataccaaacgagacttccagcctgggaaatataatttgcctaaataacccagatgacaaagatgtctagattaaggtacaaaaatgtaacctattacttaaaccacttttattttcttttactcctactgagctattatttcaatatcacttataaaagaagagacatccctctggatatgctagtatagtcaattaaacatggtggtctgtattatatacagagggattagaaaagtgggactacttaaatgagtgtaatgaaatattccatataaatattcatatatataatgcataatgctaaaacacaatttcattgtagatatctgagccattcaaatacactttaaaggatcaattttttctgagtttcaacgaaagtttatttgatattttattatttttacttatttcttttccttcaccctacattattttgtaaactataaaaagacacactgaataaatgagaacactcttgctatttttttctcatttggttcacgtttagttaaagaaagtaaaaacgtttctctgttgaatagaatcagcaccacttcatcaattaggtaagggcttcctgccatttaaaattgacagtaaaagcgaaaggtaccagactgcagcactggagatagagtgattaggcatccctaggatccctggttctagatttgacctcaaattctttctgccaagactttgtaactgctcagagggccttggccaccggcctcatgagacaaaagaaaagtagcttaaatctctgaaacgctaaagtaagcctgattctatgttgcagttggatgtactggatcatcaaaataaaactcttgccatgaataaataataataaatactcagagatgagctttatgtgactgacataaaggtggtcaagcatggatataaaatgaatgaaaaagattttactatgagctcacagtctcacagtaaggaaagagagtaatgtaggagtgtggttaagagaataggctttgaagtcagagcatttggatttgcattttagtgtggatattcactagctgtgtgaccttaggcaagtcttttgatctctctagtctacaatttactgaatgatttgtataacagaaatattaagaccatctctcatagagactcattttgagaatcaaattgaattattatgaaaattacttttcacattacttggcaccaagtaaacactctaagaatattaaacaccatagttattatcatttaaaaaaactgacatcattatatgcacacatagtttgaagtggttcattctggctaaaacaaaacacaagaatatcaaaaattatataaaatattgaatataaaaacacaatataaagtattttcttgtcattaatttattatattttatggtagtatgtgcatatattaatgacatatcagatggaacacaataaacacacccataattagagtatcaattgatgttttggagtattaaaatatcattatttttaaacactcacaatttatgaaaaatatagatgtcttaaagcaaattacatgtatgtgtgtatgtatacatacatgcatatacatattacaagctgatattcatagagaatcatctagtaaaatctaccttgtgagtattacattttaaagagagaatcatagtataggtatttccatttccatatacacactatagcccccaaattatttaatatttatttctttaaatgtttgaaaacgctgtgcaattgtatcctgtttcatagtcacataacattttttaatctgaagcagaatgtaattggcattgctctgagactattgttcacatgatgaagcttcagtgaatttgtttgcaaaaccaaaatcagtagagtgatttagttgtgtttcattagataaaggatataaatttattttcaatttgtagaagatcataaaaggacctgcaacagtttagccaggagaacactaaaaattcagatttttataactgttgactttcattaaaacaagacaaaactgtggaattgcattgtagatgaagtaaaagaataatgttttctaatcgttaactcaggatttcattattaattataaatctcattaaattcagttttattctccaaaccactcaataaattaattaatcaatggataagtaaataaaaattgggtaatgacacatagggaagctgtgatgtttcttcagcgaatatctttaagaatacattggcatttattatatctgaacataacaggcaattaactactgcccagaaacagggctatcttaacataatcttcaaatctctcttccaaaagtttatctctaaaatcacttcccagttgacacttgaccacaaaactcagaaggtaaccaagcccaacccctaatgtggtcttcagttttatattccttattattgcaatcaccttatttaagttttaatcattaagctgattgcattgctgcacaaggtcaagaagcacttgtagaatcagaaaccccaaagtggttatggactggctactcagatttttttcttcacttgctcaggctccgccccatctgaaacgtcttctctgctaggaactcactaggagaaaatgaccagtgagcttaccaaagctcagaccttatccaccagaaacattgtatggggcacctcaccttttcagcacctcctgccataacaggacggaagtgctgaagggacagctcccagtgttttaggtcttagtaagcgctcccaggaagacagcacccatcccctctctgctacaaacagccattcacaaaatccgaggaggaaaccaagtcatccctgattccttggaaatttagttagactgatgttgaaacacacccccctttcctagtgtataattatttgtgggtggagagctaccagggagggtaacagaagatgccggagaaggggggggaaaagtagatgcggatttcgtcctgacttctaaaaattcctcctctccctctcccattttcctaatccgagaatgatggagctcgaggcaaaggaatgattccggaaatggagatatgattctcaaacctagaaatgatcggagtgatttattagttaaatattcttcgtccaggaacccagcacaattcagaggtaacagcgcctgcgttttctccatgataacatagacaaacagttgcctccaaaggtaaaaacccggttccggagggtattcttgctgtcctctaagctacagaagaaggtggggtggaaagcgctcccaacctgagaaagtgcgaaagactctctaaatccagtagccaatttcctacctgccagaactctttcctaccatccgtcaccattcgtgactctgcaagacacggggacttagacatatgtgtgggagtgtgtgtgtgagggagagaggcgagacgagtgctctccccacacgtgtaaccctgcatctcccagtttcagagcttgcgttcattcatatgcaggcagtggtttaatatttgatcaaaggtagaatagttgcactaaatagttgtatttttaatgggctcaccttaaaatcgggtgttcataaattgcaagtgtgaaaagactctaagtgcagtccgtatgtctctcaccctttctacccttccctcccccattgccgctccccccaaaaagagaagcttgcagcagattgtagaaggatttgagcctgcagctagagagaaggggattagggccagagtggtgcaagttaaattgtgctgcatataaaaaatgggcggattggtctccagatccagaggctggtaccaccttcctttctaaaataaaatctctctggcatgaagtcaccgcctatttcacatccggtttgccctgggacgtattactactgtcttggtaaagagaaatcttttgttgtatagctgcagattggatattgggaagcaaatttgggtgtgaaatcttcagcaaaggagcacgcagagtccatgatggctcagaccaagtgagtgagaggcagagcgaggacgcccctctgctctggcgcgcccggactcggactcgcagactcgcgctggctccagtctctccacgattctctctcccagacttttccccggtcttaagagatcctgtgtccagagggggccttaggtaagtgcgactttggaccacgatacacagacagagctttgaacgtggcttttcctagctggagagacaggaatgttatagtcggggggggggggcggggggagacggggggagagagagagagagagaagaaggagagcgagcgagcgagcaagggagcgagcaggacaggagcctgatcccacagcaggtagaaacaacgaaatgtttttctttcagggtgaaaccgcagcaatataagagcattattattatttttttcccgctgtctttcttcttttcttctcctctttcttaggcatatttgaatgtattccgcagggtgggtggtggcatgttgttttggtcttttatttatttatttatttgcaagggggagctggggtgagttggggaggggcgtcgggggccatcatctaaagttaagacgctgggacggaaaacctgtctcactgttccatcatcctagggaaggcacgctcttgtcctggctgcaaaattgcctgtttttccctttccagtggacgctggtgaaatgccctcttgtgtaggggtctctcccattctgaacacgaaaactcaacttagtctttgatatggatggcatgggatggtaacgtttggagcgtgtgtctgggggagggggaggttgaaggtagaaagtggtaagactgcagcttagcctttcttttaaactattatgtttgtatttgcaagaaactttcttaacaactgaagtgccatgataggtttgtttttctcttttaaaaatgtcagaagagggcaaaaatctatggtgccttgtcaaatggttttgctgtgttttgtttacccattcagatattcaatctttttaaaaagatcaacaaaaattaatagggctaagaaaagttgtttttcccttgtaacaaacgatgaagattagtaaaagggtaaattaaaattttgcaatttagatgtagcattttaacataatatttatccaagatttcttgtcatagtcaactaatctgtttcaaaaccagtcactaaattactaaattaaggaaaagctatgacgaggctcagagttcttatctctagaccatttcgctctaaacatattatgtttcattgcttacaagcctgtttgtaat

SEQ ID NO: 10693 - DNA, 6000 bp, Homo sapiens
attcttctgattgattcctgttgatttttattatcaatattatgagttaaattatcgataaattaatcttggggaggattcattttatactctttcaggttggtcaatctcattttcgtccttagagtaaatccattgttatagaacagagaaaagttatggtccttctagggttttgaaggaatgtcagagaggtttatgaagaccccctcacttattggaattcaaacttcaaactctgtgtctcctgcagtgagtggcagctgaaatatttgctcaactttttaagtctctcaatttttgctttcatctgggcttcttgaagtcttttctccttttccacacaaaagcaaacaaaatttaaaggaagtttacatacagatgtgaagtcttatacttctatctgtgattttcctgctcaagtgagcagctctggtagccccaaagtttcctcttaaacctcaagccaataagattgctgccttctgctgattctaaccatcctgcatttttgggatggaaggacttcctggatgttggactttctgtgctaaaaactgggaagtttccacaggggaaaagccacaaaatcttagatctcatccaattcaattcaatttatttatttatttatttatttatttatttatttatttagacagagttttgctattgtcgcccaggctggagtgcaatagcatgatctcagctcactgcaatctccccttcccaggttcaagcgttgctcttgcctcagcctcccaagtagctgggacgacaggcacgcaccactacgcccagctaattttttgtatttttacgagagatggggtttcaccatgttggccaggctggtgttgaacctcagggtattcgcccacctcggcctctcaaagcgctgggattacaggcgtgagccacctcacccagcctcaatttcgtctcttattggccatatcgtcacactttctgcctcctttcagtagcatcctactacttcacatatttgcttatttaatattttgtccaatagtaataattattacctacaaaatggtcaactttgtcactaccagaagtagaatataaatgatatattttacttttccaagtaatgagagatttgatatcaacaaccaaacttgtccaacttataacctcataattcacttctgggtgtagtaactatcacaaaaatagtagtaataatacaatgtcaaattataagcaaaaaaaaaaaaaactttattcatagagaattgacttgtaaaacaattttccaacatattggcaaggcctgtttggatgagtggatttgggtggtagttttcttcttttactttccaatgtttttcaaatgttagtataattaaataaatacacacacatatacacatatatgcagcaacttggcatactgaggattttaaactgaaggaaattgagaagaccacagaagcaagaagatctttctgaccttcttctgcaccccttctctcctgaatcaggccatggaaactatagagaatttccttcgctccttttcccctgcagtgggccataaaacctagttgaccttccactgaaaataggtcataaggccctcaaccaagggatgtcctccctgtgcctggagaaaaacaatgtctttatctctgaagacacagagacatggagaagaatctgaactagcaggcctctctgagttcccccatttatgccctttagatcatatctgtttttgtccagtaatgtttctgcacaactatccacttctttatttgatttagcataaaatatacaattttccctgtttcttttgagctttcatttctaaaggctcccatgtcacatagaatttgtatgaaataaatatttatgcctttctattgttaatctgtcatttgttatagggatctcagacataaaatttgtatcggataggaaaatatattatatatttcctctataatatatacatatatactatgtgcaatgagaaggtagcatcatgtttatcaaataaaggttactttattgattataagtataatcttaaaaaggggcaagagtttacctcaaagttgataacaaaagtaattactagatctcttataaacaccaatgaatataacacatgttgtaaaatcttaggaaatatattaaaatacttttttttcagacagcagtcagcaaataagaaagatccacagaggcatactgacacctactagctatgaatggcacaattaaatttgtactcagatactataaatagtaaaattacctctatggtttctcttaatatgctggacaaaattccatcattcaatagcttctaatttataggggccattataagactgataagggattagtatatgaatcagtactttgtgaatgtgacagcattcattttcacagcttcgttatgcttgacaataaataaactcacttgagaaacttaacacaaaaaaattggaaatgtcatgtatggtagatattttatatagtgtgcaaaaattgcaaccttgtggcctggatgcctacttggtttggcctcctttgcattttaaaaattagaacattttattctgcaattcttatttccatttcttctggcaattctgactggaactgaacagtggcagctccatttggatggagtattggcacttcagtgtgcatggtttccaccactttactgattcataaactgccaatgtcttccatttatctcacttgcttgggttttgtaggcacttaagtaaatacacacatacacacacacacacacacacacacacacacatcttagcctacaaaagtgtgattgaataatttcactaagaaaatatatagagctataaacaaactaggctctttggaataaaaattgtgaacataagaaggggcatgacattagacagtcatagtgatgtagtcctatagtcccagctacttaggaggttgaagtaggaggattgcttcagcccacgagttcgaggctgcagtgagctatgattgtcccactgtactccaggctgggtcacagagcaagaccttgtcactaaattaaataaataaacaaataagtaaaaatcaaagaaggggaaaataccttcacggtgcagcaaagaacaagagcattatataaaaaggggattatgtttgctctgcctccattttagtcacaatggaaagaagtcaaaactgcatttgaatgtggttttcattggatttttgtctaaatgccttaagaataactctgcctaaggcagaattatgaagccatgcaggattccaggtgggtctgtcaggacttttttgcttcattgtcaggatgcatctcctcagcccatgtgatgggcagcagccactggtaattctttctgctttccttggatatactttagtgttagtgatggagtgtggacctgattttctcatgttctattcctatgtctcctagactccttacccaagttccattcctggaagacttttttcttgcaaaaaaggcacttattttgaaacaactccttgtcactttccacaaagagctaagattgttcctcatcactactactgcttcctgcatactttcaatgtggtatcttgactttaaagaaccatgaaacactcccccactttatttttcatgattaatgaaagggatttcctctgtggtggatgaactggtttggcataaagggggtatcttctacatattagtatctatagtaacattctaggcaagaaagaagcatactaataccactcatccaaactaaaaactttcgggattattaccaagaacaaaaaatcaaccccccacatgacaaacagaaatccctttgcattgttaaatgacctcctgattatacccctctgcccacccttccttcaaaaaacagccctcctattttgtgatgtgtaatctttattcaagcagctatccccacgcaattacatttgtcaaacttcaagcagttttgtgtctgtgcattttcactggggttggagaactgacaagggaggaatgaatcttgagtagcatagaatttctccatgtcctttaattctatcaatgttttcttctctcattcaaattgaattcaccaaatctgtctgcctacaggatgacttactgagacactcacacctcccccactgtctgctcccccagctctaacaatgcaaccatgatttctaagactgtacgagtttaaaataaggattcttggcagatctgacgaccacaaaccttctgtcattgatgatgtagcttctgggcttgctaaagcatctcttgtccccatgaatgccagtccttgcatgctggtgtgtgcagtaaagggttaaaaagctttggaaagacaccacgcatgtgttaattcgtgctgcagcagcgtgcatcacttccactttgacctcatagttaatctgcgtgatagttaatcacgcagagtctctagtgatttttttcctatttattttaaatacacacacccacagggctctgccccctgtaaaagaaaaaaaatcaaaacaaacaaataaataaccccaaagagatggacccaggggagaacgcgtaagtgtgaggggcatgagtatacacgagtgtgcgtgtctttccctctcccttatttgtctccgtatgagtctctccttgtaccctccccctgcctcgatgatattactcccccagacttggaagccgctgccagagtgacgctttgatggtatctgcaagcgtttttgctgatcttatctctgccccctgaatattaattccctaatctggtagcaatccatctccccagtgaaggacctactagaggcaggtggggggagccaccatcagatcataagcataagaataatacaaaggggagggattcttctgcaaccaagaggcaagaggcgagagaaggaaaaaaaaaaaagcgatgagttcgccaaatatatggagcacaggaagctcagtctactcgactcctgtattttcacagaaaatgacggtgtggattctgctcctgctgtcgctctaccctgggtaagatgtgccctttttggcgtcgttttgttctgaagaggtggggggaaggtgtggggaggggtaactcgggagaccacccagatttaaaacactctcctaggatgtgcggctttacaatttaggagagagcgaatatatggggcggggactggagggaggaaagtggaaggtcactttcgttaatgtattcatttattggattttattttattttttgtttggttttagagtggaaaaggtaacctcataaagactaaatatttagggagtagcattttgacattattgcaatctgatatcggagtgggctgtgctgatacacgccggcatttgaggccgtgttgcaagcattttgggtgggggtctgatggagaaatttacaaatgggtcctggcgcacaccggagagatatgtgtgagggagctggggggaggggcggcgggcggccctgttcctgtgtactaaggcatcgcatgcttctgcacctggcattcttaaggtcagtcagccaggttttgcatccagtcccattgacccaacagccaactacccgtgtgcaaacatggttcagcaccagggacagcagtcctggtgagggccaaagggatagaggcttgtctaacctgatagaacgtctctaaatatactcagggcatccacagagtcagagagaaggccaatgaagccacggggcactaatgaaatatacagatcctgatctgtttacctctactccctccttgatatgggaaggggactattgggcatagggtggagaacgtagttaaatgattgcataggggaatatacgtctggaaaagagttggccttgctgcagtgttggaaaatatgctgaaccaggtgaatgtgatgccataatcgtgaagtacacattaatgttttaaaaccttgctgcactgaatagaaaaaaaaag

SEQ ID NO: 10694 - DNA, 6000 bp, Homo sapiens
taaaggggcaagctcagtgtttgaacccaattctagcagcctcccaaattaatgctctcaatctgactctatgctacctctgtgcctggaaggaactactgttgtccataaggatgagaagaaacatggctaagggagcactgagtagggaggaaggaggcagcagggaggaagaaataaattaagaaagaaagagatacaaagaggaagaaaggagagggggagggagggaaagaacagggcttgtgtgttacataaactcagacaagcacatgcatgttttaacaggattcctgcaggtctgacaatctcactccttcctccctgaacaaccttagaggggttgcctaaggagtcctatatagaggcttatggcagaaggaaggccttgcgtccagaactttctgagctcatggattgacactggggttgcgcatcagtctgcttggaatgccttcaaaaaataccccagtctgggtggcttatacaacagaaatctattttctcatggttctgaaaactggaagtccaagatcaaggtgccagcagggttggtgtctggtgaggcctctcaccttgtgttgcaactgccttttccctgtgtgctcacatggtatctttgtgcgtggggggtctttggagtctctccttgtaaggacactaactctatcagatcagggccccacccttatgacctcttttaaccttcattagttccttagaggtcccttcttcaaatacagccatacaggggcttagagcttcaacacagggattttggagggacacaaacattcagtccacaccggggtgcatgagggaggggtcagagctggagaaagtgcatgagctagttcaccttccagagtaaagggagcaacagccactgaagctcaggttggatggggctggcaaggtcgctgtattgagtacatcatgggagggacaacaggacaaatggctcctgcagtcagggtgactgatgggaggcttcttcagcactccctctgcacattcattttgtcactccctctctccccatgcagttctttgctctctgttgcaagttcccaggaggcaggcagagggcctgttatcatcatctttctctcttgcccctcacacttacctgtgttcttctacttagacacattctttgtgagcatctcatgggtgatgttggctgcattgtacagtgggcacgtgcgtatgtgtgtgtatttatctgcaaataatacccatgtcacaaggcgtccgcaggaataaatgagctattgtgcatgtaaatatctggtacatggtagatacatgaatgaatgaatatttgttgaataaataagtgaatgaatgaatcttcacttggcagagcatgtgtcttcctttaaggggcaaggatgatctggtaatcatcagtttctgcttactaactgggtcactgagcaaagaaaagagactcactcattcatttattcagcataggttggctgcacccctgtcagaaaccggaggttaagcagaaagtagagagttaaatcagtatgtaaagcagttaaaacagtccagagggagagacaggcaaggaaaggaacaatgagaaacaaagtaaggagtgctctgataagaagccctgggtgctatggaaaccacaagcagggcaccgactcagggccagggagggatccctggaggagatgacatctgcagtagatattccagggtaagcagcaggtggccagaaggagaaagaggtgaggaacattccaggcaaggggaacagcacgtgcaaaggccctgaaggagaaccacaacacgcatctgagaaatagtgaggggtctgggtggctgagccacaaagggaacaccaggggtcagggaggatttgtagaagaagccacaggccacaaaaaagacctcataattcatgttcaatggtttggattttattttggtgacttcactttatacctactgttcagaggcagccaattgcaaacacgtccagaagcactttgctatttctgatctgcaaaatggagcaagtcatctgtactctgcttcttcagtgggttgtggggaagcagaaatgagaggatgacattctagccttttgtgacctctcaagtgctgtccttatggtcattcaggtaccatgaaaattagcagagccccaagggggaagtagcttggtgctcacccagtggtatccctgacaagttggcaaagacacccagggtggcttaactttctcctcagcaaagagctctcctctgttccctgaatcctggatatcccactgggtcctctagtgaccccaagcttcagcctcgcatgccctcttctcgaacagagaaggcaggagggaagcagggaccagcccctgctccatcttccaggattccaggcctccctggcctggacaagccctgagctggcagttaggagagcagaggttgtgaatctggtgggacccccagcaggtctttctggctcagtgccctcatctgtgagcaggggttccccaggagaccacgacagaggcctggaacccaagttctaatcccacatcctggctgggcaacttcaggcaaatttctaacacaaggtaagcctcaatttctctctggggtaatgatcaggcacctgcttaattcacaggggtttggtgggcatcacgtggacaatgtggttgcacagcagtgggcaatgcaaaggaaaggaagtatgttagtaagtgcccctcccctgttgcacaaaacaggacacatgctgggattgcagaaaagcaataaatgctgcacaggtgaagaaaactattcaaggaccctggccaagtcacaggctacctgtggccctgaggggacagctcatgggttggcattaggggaagcagctctcaaggggcctgtatcctggggattcaactctgtgcctatgtggcattgagcctgtgtgaatgtggtgactgtcatgctgttttgctgtgtgtgcgtctgcatgcctgtgtgtttgtgtgtctctccaccttcgtggggggcaactgtaggtgtattatgagccttgggtctgtctgtgtgtacaatagcaatgtctgtgcggacttaaggacctgcgcccatatgtttgtgggactttctgggcatgcatgcttgtttatgaggccatacatccgggtattctgtgaactgctagcatggtgtgtatctgtgtggcagacagaaaatggctgggtgggattgtagggggcagcttgggcaaaggatcctcagtgtcaatcaaaatgggtctcagtgggaacccaagcagctcagacttgggggaggggaagctcttcctccaccttccagggagcaaaccttgcaattcaacaccacaaggctttgagtccacaggcagggacgcaaactttgcccattgggtgagacgccactcacagaagggaaatggcttcctaaatctaatcattgccccttcaagcactaacaacccgtgcccaggagctgatggctaatgaattattgagctggaaagggagaagaggtagaaccaaggaggaaagaaacagaaaaatgagagagcaggccgggtggggtggctctcgcctgtaatctcagcactttgggaggccaaggcgggtggatcacctgaggtcaggagttcaagcccagccagcccaacatggcgaaaccccgtctctattaaaaaatacaaaaaaatttagctgggcctagtggtgggcgcctgtaatcccagctactccggaggctgaggcaggagaatcgcttgaatctgggaggcagaggttgcagtgagcagagatcgcaccactgcactccagcctgggcaacagagcgagactccgtctcaaaaaaaaaaaaaaaagaaaaagaaaaatgagagtgtaagggcccagaggggctgagggctcctttctcctccccaactccctgtcactagaaggtgggccctgccataggaggattctgcagaaccctcaaggacccgcggagcaggacggcaccttcttcccatgaccacccatttggatgtgtttttcacccctttctgggtggggcagactttccccctccccatgagttcaggcagtgggttaaataagatttcccttgaagtcgaatgaaatcacaatgcaccacacacagggacacacacacacacacacgcacgcacgcacatcacacacacacacacacacacacacacacacacacacacatacacacacacagtctccctggggccaatctactgccccctgaacctcacccatcagccaggtgcctggccccgggtctgtctcttagggttacatgctcccggggctcccgcacataccccggcagatgagggtgcgcaggggtgagggcgcagggctgggcgtcccccgcccccaccgtgcagccctcgcccccgccccgcccctccgtagttgcccgcccgccgccccctccgccgccccctccgccgctccgactctcgccccgagcgctggcagcaggcagcaggcagcaggcgggcgcgctgtggctccgcgccgcgcggtccgggctctgttcattcatgattggtactcggccctccgagacccagcccgagcgcagggaggggagccgagtgtgcggcaggaggggcgggcggacggcggctcccgcaccgcacgcggcgctggctcggcagcctcggccgggcggccgctctggccccgtgtccagtgccaggcaggcttcagggcaccgtcctcggccctgggcgagggaaccgccgggccgggtcctcgcgcggggaagcggttccgaaggctcgcggggagcggctagccctgagtccctgcatgtgcggggctgaagaaggaagccagaagcctcctagcctcgcctccacgcttgctgaataccaagctgcaggcgagctgccgggcgcttttctctcctccaattcagagtagacaaaccacggggatttctttccagggtaggggaggggccgggcccggggtcccaactcgcactcaagtcttcgctgccatgggggccgtcatgggcaccttctcatctctgcaaaccaaacaaaggcgaccctcgaaaggtaagccaccttcttccttttgttcccctgtctgggcttgggggtgctaggcgccgaggtgggctgtgccacctgcctcccttagtccggactctcctctccacgaggagcccggacaggtgcttgtatccaaaggagagagaaatcggcgggagggctggtgtgaacacccagaggagggagccggagtggacgtctgccccagcggcaactggacccctctggggcaccaggtgtcgggactctcctcctggggaaatctctgagagccgaaggaagcggcatgttcacaggtgggggtgaccggattctctggtggaagtgtggtgaagctcttcccattcccatgacagctggcgtttgagcactcagtgagggtgctgccacactcccacactcctcctaggcggctatgccaggtgcagacctgcgagtcccttcatcaggaagagtgctctgtctgcacccccaaaacctctgcaagccaaaaggaatcagctgctgccaggggtaaaactcccaggcctcatgtcctggtggctccgggagtcaggaggagcaaccgtgaagggctggctgcgagctgagcttacatcaaggattaaaaagcataatatcgtggagtctcttctgcctggacgctgttccttcaccacctgtccccagccgaggcatggctgatctcaccatccgtgggagagtcctcaaatgggtccaggtgaagttggaaccagtgtgttgggccctggaggacaatgcaggtctccttaccagcagttcaaaagttagtggttggaataaagagactggaagcagttaggaaacgggaaatgatgggttttgttttgtttaatgttcaaatgtcactacgagtggtaagattttaagcagcttgac

SEQ ID NO: 10695 - DNA, 6000 bp, Homo sapiens
gtgaaaccccatccctactaaaaatacaaaacttagcagggcacagtggcacatgcctataatcccaggtactctggagcctgaggcaggagaattgcttgaacccaggaagcggaggttgcagggagacgagatcatgccgctgcactccagcctgggcgacagagcgagattctatctcaataaataaaaaacaaagaaattagaagcaaatataagaagctcgtaatacactgctgttgcccaaatgtgcagataccattgatcgcatttgttcattggctcagtagactttttgaagacccacgatgtgatcaaggcactgacttcaatattggggatgaaacaattaacagaacaaagtacctgacctcaaggagccctagctaagccctagcttagtggtagagacaggtaggtccgtgactgttgagcccagtaaggcccagcaagagcactgtacaagggcagcacaaggagagaaagttaccaagggaagtcaaggcactccatggaggagagaacatcagggccagttttagtttagctaaagcttcgttggccaggaagaagatatcacagagcaaagttagcacaaactaggaatgaccacaatgcacagagtgttcgggaggaagccgcaagggacctacctggagagatgcacagcgttttccagagaaacaaggttggtcttgacctgctccgaacttaccattgccagcccccacataggatccaggccacagcggtattttttgtcacctgtccaggtttacattttttcagattggaatgtttttagccaaagaactctcctgtttaccacggttcccaccagtcgttacactcagccttcatgcatcacattgcctgcccagcccctgaagttgcccagcaactagggctggcaccctttgctacccactcacctcaacacagagctgaaatcagagaagtgacctgatccgctctgggtttttacgaagatcggcctggtgattgtcaagaggggaatatatttggaagttgaaaaaacagtcaggaacttcctcaatagcctggcccaactgtctccacactttgatcctatgtcctcaacctgtgtacattaatttatttagagactgtcttatgtcctaatatatggtatgtgtgataagatatacaaaaaaaaaagcatttaaatgggtgagataaagatgaaagatgacataacactactttttaagcttttattttgttaaccatacccaggaaaacccttttcactggaacaaatttttatgaaaactaatatttgtactgaggttgttatgttttatcatgtttgtattattttcatattaagcttctgcattatgatatttagaagactagttttaagttcaaattattttgatatttagttctaatcactttcagaattgaaaaaaatgatacttcactaaagtgcagaaatccaaatggaaaaggcactaactacattggctgtgcttgctataataataatttttctatcttaccaattatgcaaattgtgtctaaattcagttaggaaatgtcatcttctctgatgtcgatcaattgttcttccacatttgccattggcacttttatatttttaacaagagtttgaaaactcttcatttggaagatgtttaattaggtgacgatgagtgaagtgtcagtgctaccattttcttgctgtttccattactagtgttatctcctttcagtagttcatttttgcaataatctttttttaagccacacatcaatttagggttaatttggtgaaaacaaatcatcaatccatttaacctggtcccaaagcaaaggattgcaagaccaagccctccatgttgtaaagcccccactccatcctcaggttcacgtggcttggcccagctatacatgaccttggacagtcttcctatcacactggtgagcagccagtatccatgcacatagtaaatattagtaaagtacaatatctctcccattgtttgaagccatagaagttctaatattttctcctataattcaaaggctcatcttgcacagagccattcaggcctctttttggagatgcccatttctaagatgaggagttgctgagccaggcgttgggagataagacagaacaaggtatcaagagtgagggtccatcaggtgttgagggtgggggaagaaggaagatgagagggttgagattgtcctagacgttccagctgggattgcaggtgagaagggtattcagttctgacaggcagtatttcctgggaagcacaggtgcaaaaagtaatcttttcccactacagtgtcccaggcaaggggaagacccacaggttttctctgtcctctgctttagttgaactctgtttcactgtactccccaccattattgaatggacttgggtaagcggctgatttgaaattcaaagacctggattccagtccatgccgactccaccccttaatagctggctgactagcacagcttcctcatctgtaaaataacaattttttaaaaagccctgcctgcttcacaggattattatatggctcaaagataaagcatatgcacagccaaaggctctgaaaactgcaaagcactatacaaatgtacggtgttattatgacttagtatcctgcatgcattatgattgaggtacaaggcaagacatatctatgtcctcttgcctttgtttttccgggacacttaggagagagtatgaccatgtggagtaagaggtggacactgagatcagtatcctgtgggcagtacatctgaacatcctgaacgtcctaacactgaccttaggcctcctgagaccagaggtcacacttggaaatgaggtgtggtgcagaggttgctggggtttctggatccacggagcaagaatgcctgggaatactggagaagaacctagttttcctggaaattcccctcccaggcatttcttcacttgatctgaagaaaatctaagaagaagccaacactagaatgaagcattgtttgaaagtgggagataagacgccttatcatacctactttcacttaagatctggctttccctggccaccaggggtaatcagtctcttaacatatttactggatgtctacatagaagtacaattcaagccccttgcaatgaaaatactaacaatatgattgggaagattaaacacaggatagacagattgacagataatggtgatgaagatagataatagatagatatctggatggaggtttggatagataagcacaaacttgacaagacactacaccatcaggagaaaaagaacaatttgttgagcgtctacaatgtgccaggtcaaggtgccaggtgctttcagatgtgttaccacatctgtcattgctgactccttacagcaatcctgtaaggaagcatcagccccattggtcagataagaaatggagacccaaagaggttaagcaacttgtccaggaccatgcagctagccagcccatgttccttcatctaagtctcactgttcctgggtcagaggaaaccctcccacccccacctcccagctctgaattgtctttattactctggagcctttgttctgtgtgagaatatcttaggctttttgagaaaagccccagatcactgtctattcattgagaacctgaaaccggctcctcagccattcctgctctagccaccagcaaggttcccaagtgaaagtgagtcctctcaggagaaatgaaagcgctgtctctttaggtgcccactccttacccaccagcggagcaatgttttccaggctggccaggctccagaagctcactaaggaagttggcttggggccaaaggcatctatggttcattgtacactgtggccctccccttcctgcccctccatttgctccccttcctttctctctctcccttcccggctcctagactgggtctaggcaggagcttcgccatgatgtcaggagggaaggagatgcctctgggcctcgtaccacagcctcagctctctctctgcccctccatctgagtccctcctggctcccagctccctcagggtgcaaggccaagcctccaaggaatccctccccttacctgcatggctggagccaagagtgagtttggggccactggctatgatgaggggatgacccagagctcagtgagcactgtcgaagcacttctgttaggaggtttggttggccagggaggaagaaggcctccctctctgggatgctcctgaaaggactctgtgggaagttaaagaatcctctgtgtgagagcaggatgggggaaggtggagggttggagaaatccagcccagtgtctctgtgtctccccgcctcctcctcctgggcctctatcctctgtgctcttggcctctatgagtctttttgaaacttcccaggctggaaagcactaggtcctgggatatgaaagtctcttttaacatagaataggccttctgttgatcccaaagatgctcttaaaatacacaacaagaaatcggagttttacacacagtcagcttctcattttatagatgggaagctgaggcctaaggaggtgaagtggccactatagccattccattgcaccagggtggagggctgtccaccaaattcagagcccggcatagtgggtgggggtcacccactttatctgactctcatgggtccttgatctcaggggtcttttctggcagaggtctgggagcatgactgagacatgatctcagaatcaaacccctggaggcagtagctatagcaggagctgacgatctccagaaactcaggaccagacgatctccagacactcaggacaagtcagtgtccccaccaaggatggggctttgagaggctccgcccacctctgtttctgcacagcaggtttagcagctccattcttccccagagagccactccatctgagggtggctgcgtgtccacatacgaggggacagggctgaggatgaggagaaccctggggacccagaagaccgtgccttgcctggaagtcctgcctgtaggcctgaaggacttgccctaacagagcctcaacaactacctggtaaggaaactgctggcccctccaggtgtctggagagaggggagggagggagatccaaatacaagccctgctgggaccgagggagggggcaggcctggactctgctgaacacctaatgagcatcagggagcgccactgcaggacgagcagcagagccaagattagagcccctgctgtcctcactacagccacagtcattcacccctgtgcagcagctggccaagaccagcagacacagggcacgcgccgcaccactttatcttctgggattttcttaagcgggacccatggcaataatgcctttcctcaccttaacctaattcgggctctactcctgctttccaacaaatgattctgtctatgctgaagtgataaggataggaaaactgtgcctgcataggaaggaagctggaggtgacaagttggggttgggggtcactgtatttacatggtagaaattctgggaatagagtagaaacggtagtagaaacttgcacatattggaattatttctgcttccagcctgggaagttttcaaaagagacatagaggccaagagcacggagtatagaagcccagtaggccaagccaggaagaggcgggggagactgggagacattaggctggatttctggtttagaaaaaggtgccatcagctccctatgtgaccttaatgccctgtgcctgaccctgtacttcctgaggtggtgccagttagctcacactctgagtggcacctggggtgtatatagaaatagaaagagcttgagatttgggttctattagtcatagtggaatcactgaattcccatggaagacacggaaggcagaggagaatgaaaactaatgtttattgaatgctttctattcccatttgtcagatgggaaaactgagactctgagaggttaaatgactcgg

SEQ ID NO: 10696 - DNA, 6000 bp, Homo sapiens
ggctgtggagagggaagggctagaggtgtctgccttccaggagccattggctgctttgagaagctgaagagttattagagccgatttaggtgctagagtagtctatacaggtaatggacagaaagagctcagatatggtgagatcaatgtggactagagtagtcagggtggcttcctgaaggaggtagatttcatgtgggcctggatggcttaggagggtttggaaagctggaaaggaacaagagctctgatttgttccccagaagttggtgcggccccacaggagtccctggtctagtcagcactgattccttcaccatcgtctacacaacgaccaacctcatatactgagtgattactatgtgccaggcatcctgtcaagagcttcacacacattatctcatttaatcatcacaccaaccctgtgacatagggactcgtatccccatttgactaatgaggaaactgaagctcagagagatgaagtcacctaagttctcacagcttgaaaatgaaggtgtcagaatttgaaacccaggcagtctgactcctgagcccacatcctaactatcacactctagtgttccattataaaattccagagggagtccttatttgccttgtggtcttggcagacaaatgctgacaaataagctgtcactaatatggagccctgactttctgggtggctcatgttgcatgaagggggccatcaacaggattagggaatcatcttggtggtctgtatagggggcccaagacctttgctggcagagagggcctagaatctctcccttgaaccagacagatctcagtgtgtaccatctctctgctgagcccacccgaggccacctgttctgggaattggctcagatcacatacacagatgatagacactggggttcttccacagggtagtgagtgcaatctgctgtggttgcccccctggaggtgaccggggagtttcaggaccaggaccagctgcaaggaggccccagagtcttctggattcatccagaccaggccagggctggtgatttaataaggcttcatcttcacgcaaatgagcttgcactagtcagatgctggaaacaggactaagtcaggactcccaaggcttgagggttgttggagcagatgagctccagctttagatttgggcagtcttaagtttccatctctgccgtgccacttactagctgtgggaccccaggcagattgctgaccctctctgagcctcagtctccccataggttaaatggatgtcatacgcaggcctgccctgctctgttggagtgcagtcgagatgaaccactgtaccctagtgaagagcttagaacagcagcctggtgcattccaagtgtctaatgggtgctcttgaacgagatatttttcggaagttgttaggctaattggctcttcatgtaacgtcatgtaaatcatctgaatgttctcatggcctgagcccacttaatcatggctagagctgaaaatatacatttcctttccttttctttcaagctcctttaacatgaaaggcccacgtgaactctgaccttttctgacagggagacccttgaaatgtggcatttccagaaaacgtctcaaaggagccccagatggatttagtaaattacagcaaggagaggttgtgagcggcgtctcttcctgctcaccagcccgcctggcatcctgttggggcttgcccaaagccgccgggaggctgggctgctggctctcggcaggagcacttcccatggagcatcctctcagggcaaaacccggttacaggtcctagaggtagactgtggtttgttactagaaacacggtttgctttctggaaactctgtgtagtttcactgtttgttggggcgtgtgtgtccatgtgtgtgcatgtaggtggttgtgacctacagaaaggcaagcacacacaattgctgggatgctgctactctgcatcaggtaccaggcagctgcccttaaaatgaagcaagggggctttggggtcagttctttcttcataaggaaggaaggactcttctgtgggttctcccctcctgctccatccctcggacttcatacaataaccaagaattgttattaaaataaagacttaataacaaaattggcagttcatatttcctgatgaaatcctaaggaaacttggccaaattggcttgagaggtgatgggcaaattatgagaagagctgccccagagcttcacagggcttgttaggactattcccatgggttatttttcccacattgtgccagccattgttcctgatgaatgggtttggggttccctcaccagaaggaaacattaggcttgaatttccccaggaaggagtctagagtcagagacaccaaggtggcgacagcgaaggcaaacgtggagtggccactgtgtgccaggtcctaggctgccgggtgtaccagttgtccaaggggtcgggagtgccagcctgtgtcctagtccctgacccaacactggcttgccgagtgaagtcaagtcagtcctctgccttctttgggcccaaattcacctggaagctgcagatgcctctaagttcttttttttttttttttttttttgagatggagccttgcttttattgcctaggctggagggcagtggcacgatctcggctcactgcaacctctgcctcccaggttcaagcaattctcctacctcagcctacccagtagctgggattacaggcacctgccaccacgctcggctaatttttgtatttttagtagagatggggtttcaccatgttggccatgctggtctcgaactcctgacctcagctgattcaaccaccttggcctcccaaagtgctgggattacaagcgtgagccaccgcacctggccaggtgtctctaagttctaaggatgccatgaagagcttatggccttgagaccagaggtgagagacaagcggcgtcacaaatgcagcagaaggtggagcacaccaaggcctggtgttcatgtgggggtcacctgcagcttcacagaggaatacgcctgcactaaatcctatgtggcctggggagacagcctcagacacactgagagaggaatgtcttattgagaaagaactattcaatatcgctttttaagacagggctatacagggctttgttgcttatccctagggcctggcacagaactggcaacctgcggtgctcagaagtttttggatggatggctgaatggaaggatggatcgatcatccatagcagtgatcacttagaatccaggaagtagttagcaggccccgtacctgccgtcaggcaactcaccatcttgtggaagacatcaggcgctaaagaggctctgggagccaggggttcagaaaccctcctggctgttttatgcatgtcatggcacacaacatggcagttagggagggcttcctggaggaaggaggtcctaggtcagcctaggagagaagagggattaaagaggatgtggccttttccgggtggggcagtaagccacactctgggtgatggtggactttgaccccatagggtccctgggacctaggtgaactaggccctgggggagagtttggccatccattgaaccttgcctagaatggcaccttttcatgtctcagttcctgcagtcctccaacccctgccacctaggacaattcctccaagtattccctccccaggacactggctctccctgtctgccctctctcctagaatagactacctcccagtatatgacccactgccttgcatggggcttcaagactttcctggctcagtgccccgaggaaagctcaccctcttattccatattcacccctctccagcccaggacaacaggggtagtaggggaaggagcaacgggatgtggtgggcagggtaaatttgaagaggacctgtaccagatcctgtagtcactgctcaccacagctctaaccaggcctcccgcctgcccaaatggattctcacttcttgggatcatggcaccttcatctgtggccctgctggatactaacatgggccaagcatactgtggcacttaataaatgctttctgcccaggggatggggctgttgcataatggtccaatgtgtttcttcaggctcccagggtgggggttgggagtggggacggacgggtttccagttcgtttgttagctgggcattctgcagtctgaggcgtctttttctttttaaggcccattcctggtctcttcctaatccaggaagcctccccgcctccccaggtctgcagagatactttctcctttcaggagtcccattgcctttagaattgaagccaccatcatatcctgagctgttggcctctgtttcctgtgagtgagtctcctgtccctctgctactgtgtctttgttttctgttggtcaagagctgagcttgaaactcatagcctgggtgtgaaatcagcttctccacttactcagtgtgagcgggaccttgggcaagccacctccttcctggagccttctttttctcatctgttaagtgggggtaagagtaatatttgtctcaaagagctgggaagatgggatgagttcctgcttgtagagtacttagcccaatgtctagggcagagtagatacttgctgagtggtgactgttgtcacttattgttcccaggcagcagggctgagctcaggaccaggcctgtcatggtgcgtagcatctgttgcctgagcaagcagctgcctttgcaatcctgcaatcttgcaggggtcatgggtggagagtggggaccagggtggggagggcaccaggaatcctgctttctgaggccaggctgaggctgccaggacgttcagcctgagtggtgactcctcttgccaagagatggccatctccagatgtctgcaggttggaggagccggctggccatgtaggggcctgggggcagagacaggactaatgggaggaaattacacagagagatttcatctcggcttgaggaagcacgtctagcagtcagagctggccagccatggcccggccgggctgcagcagaggcagtgagctccctgtcaccagaggtgtatgagcagaggctgggggctctctagggagggaagccacggaggggctgtctgccctcctggcccctctgaggctgtgagcagtcccttctacttcctgtgcggctttgcccatcacttggcccggttgagcctactgcaggcatctgaccagctgcaggctctgaggtgagtgtgagggcaaaggtttggacacctctggctccaaagtggggctggaggctagagcaggggtggtctctgtaagagtctgatctcaagggggcctcataccaacaacatcaccttctttttggagaggcagcctagtggagtggctggtagccttaggccttctggggccagggaggacagagaccagagggagggattattcttaagccagccacccctcacaggcttcaactttttctaaaaccaggaactggaaggagaaagatgggaagaaataggagagaagagagcctgggtttccattttgctcccgccacttggtagctctgtggctttggcaggtcacttacccttttttggttcgtaagtcacttaccctctttgtcacttaccctctttggtatcatctgtaagataggatgacgggccaggcgcggtggctcacgcctgtaatcccagcactttgtgaggctgaggcgggtggatcacgaggtcaggagttggagaccagcctggccaacatggtgaaactccatctctactaaaaatacaaaaattagctgggtgtggaggcgcgcacctgtaatcccagatactcgggaggctgaggcaggagaatcgcttgaactcaggaggcagaggttgcagtgagctgagatcatgccactacactccagcctgggtgacaggatgagactccatttaaaaaaaaaaaagaggatgacaacactgcctgtctcactggaatcttgtaaggattaaa

SEQ ID NO: 10697 - DNA, 6000 bp, Homo sapiens
aaacagcatggtactggtgccaaaataggtatacagacaaatagaacagaacagaagcctcagaaataatgccacacatctacaaccatctgatctttgacaaatctgacaaaaacaagcaataaggaaaggattccctatttaataaatggtgttgtgaaaactggctagccatatgcagaaaactgaaactggaccccttccttacaccttatacaaaaattaactcgagatggattaaagacttacatgtaagacctaagatcataaaaaccctagaggaaaacccaggcattaccattcaggacatagtcatgggcaaagccttcatgactaaaatactaaaagcaatggcaacaaatgtgaaaaatgacaaatggtatctaattaaactaaagagcttctgaacagcaaaagaaactatcatcagagtgaacaggcaacctacagaatgggagaaaatttttgcaatctgtccatctgacaaagggctaatatccagaatcaacaaggaatttaaacagatttacaagggaaaatcaaacaaccccatcaaaaagtaggcaaagaatataaacagacacttatcaaaagaagacatttatgtagccaacaaacatacaaaaaaaagctcatcatcactggtcattagagaaatgcaaatcaaaaccacaatgagacaccatctcacgccagttagaatggcgatcattaaaaagtcagaaaacaacagatgctggagaggatgtggaggaataggaatgcttttatactgttggtggaagtgtaaattagttcaaccattgtggaagacagggtggtgattcctcaaggatctagaaccagaaataccatttgacccagccatcccattactgggtatatacccaaaggattataaaccattctactataaagacacatgcacatgtatgtttattgcagcactattcacaatagcaaagacttggaacccacccaaatgcccatcaacgatagactggataaagaaaatgtggcacatatacaccatggaatactatgcagccataaaaacggatgagttcatgttctttgcagggacatggatgaagctggaaaccatcattttcagcaaactaacacaggaacagaaaaccaaacaccacatgttctcactcataagtggaagttcaacaatgaaaacacatggacacagggaggggaacatcacacaccagagcctgttggggggtgaggggctacgggagggatagcattaggagaaatacgtaatgtagatgaccggttgatgggtgcagcaaaccaccgcggcacgtgtatacctatgtaacaaacctgcaagttctgcacaggtatcccataacttaaagtatatttaaataataataataatggcaccaaatctatatctactcagtttgtatagctgagtgacactaaaccttgtttgttttcctgtacattcattatggcttattcattaaaagattactaatatttattaatcacagccaaatactacacctatatgtacctcattctagagcaatccagtggagagggtattcttttccttctcagttttccagaagaggaaactaaggcttagaggttaaatgacttgcctgagttacaaagttactaagtatttgacctgggttttgaacccaaagatttacctccggttcttttatgctctcagtttacactacacaattttacttgctgacatgcaagctattttaactctttgcccctctctttcttaactttctgtatatagtagacctttaatatatacttgtttcatcattccctgggccattattattattattattatcattatagatgggtgacagtatttgtggtttgttctgtctactgaattttgttctctcaacttacactgaagcgagcctaggtagaaggggctgatggtgcagaaagaaaaacgtgggtaactgagggtcagaaggaaaaccctattttgagatgtgttagaggttcgaggggaaggggagcattttaggacttcatcattttgttacttgagactaaactgctttaggaatcttctggacatcatgctgataatgccctaaccacccccccaaccccgatcctccccctacccatcattctactcagctggtgcaaaagattctcactgtgtataggagtaaagagaaaggaaaatcagcagttttccttggctatagttctacattctgaggtaacgctaaacccaagtaactgcagatgggagacttacagaccttcctcccccaccctcgtgtgtatgtgtgtgtgcgtgtgtgtgagtaagcgcgcgtctttggatgggctcctatgagcctgggagtctatagagcgccgcgcggtagatcagcagtatgttcatggtgctgggctttacctgttcctaacctagaaactcccttggtcggtgaaggaactcggctttcttttcctgtttatcatccatcccagaggagctgtcggattccccccttttaaagccctcccgcctccacacttcccccggagtcatccccacaaactacccccagatgaccctctgaccaaggtgggggaggggaaaggttatcagaaggtaagtgggtcaagagtgcagcacggaacaggaccctgaggagcccccagggctgccggggtcgcaagcctgtggagctacttccgccgcctgccgccaactctgcgggccggcgacccctcctctccgcagacaccggccgggtctagctcgtgcggtccgcgctcaactccacccgcagccgccgcgggctcctcgggcgccaggagcttgacccgccacagcaaagcgctggcagcgggcaaggtcgctgactcaggagacttcggagtgtaggctgtctagttcagtggttaggaacgctggctctgaagtccaatcctggtttcacctcatgccatctgagtgaccttgggcgagcttcttgacttcagtgagacaatttctgaatctataaaatggggacactgaagtgatagctaaacgctagaactgttgtcagaattaatgaatgcagcgctctggcacgaagtaggaactcacttaatagtgaccatgattggcagcagcagtgagaggctaagcattggggtccagaatagagatttgagctctggcctttccagttcttcacccagggtggggttgggggaggggtagcgggaacgtctactcttcccgcctcttccccagttccaagataaactcaggagtacccggagagccgctggtgtggactccggttccttcggacggccttgtgtccccagactcgtagcacctcacgccgcccgtggctcctctctttccctggagcggagggaagacttcttttgtgaattgagtatctccctcccccaatttccccaccccaagcttgctgcctcctccgggtcccggcggccacggcgaggcggcctgagcttcaggaggaagggaagaggcagcctctgggtgtgcgagtcccctgggcgcggggaagggaagaagaggacgaggtggcgcggagaccgcgggagaacacagtgcctccggaggtgaggggctcttcctcattttgcctgccttctagggaccgctccggcttcttgtatccagaggtacagcccctgaacagccgggagtccccgtcccctgtcccggacgaggggccgggggcgccagctccgcacgccgcgggagtgggcggcgagcgcgggcctgcgaggtaaggagggatggcggcgggtggggagtgcgcctgcacgtgtgtgcgcgcgggtgcgcgcagcggagggggcgctgggggaccggccggggcgcgtcccacccggccacctgcccttcctgctctgtgcggtcgcccacgccctccagtcccccgcacctgcgctagggcgcccgtcacccgcatccctcacgcctccacgtcccatctccccctcatgcaaaccccaccctgcccactaataattcccactgcagaatcagaccgaaacctggagagacagcattgcctttctgctcccctcgcccccctcccctcctgctataaataacccggactagcgggtcaggaacgtcacacggcgagaaaacaggaccccgaggttttcttctctgggaatagggggcaaagggtgaggagaggagaaagaaatcgctcgtgagtagtgaagaaaagcttgctctttgactactagaagagaccagccattattttattcttttctttctctttcttccttttttatttttccgtgcctttcttattctgtacccgcctccccaaccccccgccccaaatccaacgggttgctcagcattcctcccattggttttttccctccctcccgcttcgactcccaacgccccctcccccctcctcccacccgctgcacaacccccgccccccccatcccagtctcgccccaggcagggcatgctatttgccaaggaaataaagttcaaactccttgccccgtgtccggctgagaccagaagtgggcttaccggcacctatcttccgctggcacgccacacctgctctcctctaattttctaatctggttttgcatatttaaaaggacacacacacacaccaaaaacccacaacccgctcggtgcaaaactgcctcttgcaactaccgaaacttaccagacgctgtagttattttgtcttaacgaaaggataacaacaaaaattttattctggatgctgctgtggggtgacttttctatattattcaaatatgtatgtattatacatatacatgtttttcctttttcccttttaatttttttttttttttttaaacaaggaaatctgctcggtccccggcagccgccgcttcccctttgatgttttggtacgccgtgcgcatgcgcctcacattagaattactgcactgggcagactaagttggatctcctctcttcagtgaaaccctcaattccatcaaaaactaaagggatgtggagagtgcggaaaaggggctactttgggatttggtccttccccttaataatcgccgctgtctgtgcgcagaggtaagtgtgcccagcgtttctcttttccgttctcactttgaagggttctgtctgcatacctctgtgagcagggaaatgtagtagggatccgatgctgaaaacgctatgcctgcttccttattgatgcctgcttattgtcatttctttctttagtgtcaatgaccctagtaatatgtcgctggttaaagagacggtggatagactcctgaaaggctatgacattcgtctgagaccagattttggaggtaatggggttgccttgcaaataagtccagccacagccgaagctgtcttttgagctttgtgcgcgctctcttccctctccctagttgtgggtgcatgtggtgtcctgaatgtgtctctattttaccatattgagaaactgatcaaaacttaagctggattattgctacccaccacttccgtggtctttcaatgagaccctcttagtgtgtactcaaatttggtgactgctgtctttcagcttcactgttatgaatcctttgcttccctgcctttgctttgttgagacacaaacctcttaagtttagttaatggtgtgccgagagaacccggcttgcggaaggccaccgttaacattttttaggacaagacgtgcaggcagttggttgagaggtggcgttaaccccctgtgcctgcctactttggaagagttcttctggccagggttacagtggctcatgtctggatataatccactcctcccagcctcacagaaatggggaggactgggggatgggagggtagggagaaaatgggagggttagagaaggtaggggaaagaagaatctctctctggctgcagccctagatatgctgatagactcacttaatattgcttcagactcttatgaagctcaaagagttaaaacctgtgcacagaagggggt

SEQ ID NO: 10698 - DNA, 6000 bp, Homo sapiens
gaggctccatctcaaaaaaaaaaaaaaaaaagaggaagaaaagaaataattggacagactcagttaacattgagcaggcacagccctgcaggctcccggcttgggaaaaccccagcagtggggtttgcaggacgcaagggcagtaagcccttgccgggtgtgaggtgcatgcataaccacctaaatgtggagcacgtgagaccagctcctcctcacacgcttctgcggggaccatgggtacccacctggacactgcaggcctgggaccggcttgggtgtaaccttctgcctgctccatcctgatttatgcagacgataaactcctttgcgcagaagagggttcagcagaggatgggaattgagccgtagggtggggaaggtgtggggttttctgacttcagggtgctgctaaggaaggagaggctgggggtgtctggcggcgctccctcctccaaccccccattctgcaccagtgaccacctcagacgtgggtgagggcggggcacctctgaccatgggcaagccgtcgagcactggctggtggcatcgtagggcagaggcagctgctggccgtgcccacagaggggtctgcttgaggaggcacccatgaccaggagggagggatcgggccctggcaaggggaggccgggcacctcgcagcacaccatctgttcgggtagcagaacgtacagaaagcttagcgagttgaagcccagctggtagcagcagtgacagctgtctctggccttggcaggttcaataaggacatcgagttcatgatcggccacaagcccaacatcttctggcaagtcacgtggcgcgtggtcagccccctgctcatgctgatcatcttcctcttcttcttcgtggtagaggtcagtcaggagctgacctacagcatctgggaccctggctacgtaagtgtccaggcagtcgcctggggtggggagaggaatggggaaggggaaaggaggacactcatccacacacatggcgcatgcacacacaatacacacacccacacacatgggcacacacactcacactcaggtgcagtccagccaccaccccacgcatcttgctggttcccccctccctgacaccaatgtgtcacaccatcccaggagggaggtgggtgggctgggagttgggaggtaggggaaaggggaagctggaggagccccaggccaccctgcctgccccacaggacaggaggtgagagtcatggggtgaggggcctttgcctcaaagtgaaccccactggctcccgggatgcctactcacccatggggctctctccccaggaggaatttcccaaatcccagaagatctcctacccgaactgggtgtatgtggtggtggtgattgtggctggagtgccctccctcaccatccctggctatgccatctacaagctcatcaggaaccactgccagaagccaggggaccatcaggggctggtgagcacactgtccacagcctccatgaacggggacctgaagtactgagaaggcccatcccacggcgtgccatacactggtgtcagggaaggaggaaccagcaagacctgtggggtgggggccgggctgcacctgcatgtgtgtaagcgtgagtgtatgctcgtgtgtgagtgtgtgtattgtacacgcatgtgccatgtgtgcagatatgtatcgtgtgtgcatgtacatgcatgggcactgtgtgagtgtgcacgtgtatgcacacatatacatgtgtgtgggtgtgtgtattgtatgtgcatgtgccatgtgtgcagatgtgtcatgttgtgtgtgtgcatgtacatgtatggacattgtgtgagtgtgcaagtgtgcatgcatatacatgtgtgcgatatttgctgcccgtgtgtgtgcatgtatatatagacatacatgcctatgttgtgtgtggtgtgcatatgtgtgaacacacacgtgtatacatgcatgcacatgtgctcgtacaatgggtgtccacatgcacgtgtatatgtatatctgtgagtgtatatacatgcatgcaattgtgtgtatgtgtgttctgtgtgtgcgtttgcaagtatatatgcacatgtgtatatgtacatgtatgcctgtgtgacgtgtgtatatgtgagcatgtgtacgtgtgtgtatacgtgtgttgtgtatatgtgtgtgtctgtacctgtttgtgtatatgtgtgtgatgtgtgctcgtgtgtgtgcatattcaggcaggtgtgcatttgtgcatgccagtgtgtatgtatgtgcgcatatggacacgcatggacacgcatatggacacatatggacacacatatggacacgtgtggatatgtgtgcgtacacgtcgctgggacacatgcctgccactcggggcccagctgccctctgtgtttgtccttgccacagtcacggggtgcatgtgcagaggggagcagaccactggggacgtgctgtgccctgcacgtgcccgggggaagcggaagctgcagctggggtgggggcagcacctctatgcttcatctctgtgggtggcaggagacaaaagcacagggtactatcttggctcctgggagcgactcttgctacccacccccacccatccccttccccttggtgttgacctttgacctgggggttcccagagccctgtagccctcgacccggagcagcctctcggaagccggagtgggcagttgctggcgattctgagaaaacttggccgcatccaccggggccctgcctccagtcggccgctgccgagtctctgcgttctggccgcttcccggcttaatgaatgccagccatttaatcattgctcctgccaccacaaatagatgagcagttaaataaaactcaacttggcataattcaaggcaaataccactctgtgcattttcttaagaggacatgagctgtgtgaatttttagccagcctttggaaaagatgggttacagggtaactcaaccctggctgccatccttgggcactgtgtgtgtccagggcaccttggaggaccgtgcagcccccagaagcttccagctcccgcaccactcagtgaagcccagcctggcgcctgccctgcccccgtcacgggatgggcccccattggggttcaacattccatcgcagccaaaggcagtcggcacttgggacatctgcttccacggacaggtcacctccgctttgcacggaagaatctggatgcttacattaaactggtgttctgagagttcctacggacaggtcacctccgctttgcatggaagaatctggatgcttacattaaactggtgttctgagagttcctacggacaggtcacctctgctttccatagaagaatctggacgcttacattaaactgatgttctgagaattcctacaggcaggactgaaagcctggtgtgtgccagtatgatgttccacccacagaaacctggtcacaatcgtcccttccagcaccccatccagcagtgactgcacacactgagtcccctaccagcccctttcaccctgctgactgtcactgggccctgggatgcgcaagactccacagcagcagaggtggggggacatatcacagcctctgcccccggctgtgatgccaccgaggggctcgcctgctgatggcttcaacagggtctcacctcatcttttcctgctctttggccctggatcgagaaaatttccatcagtgccccattaatatgctgccctgtggcatctgcccaggaggccctgccaggcgtgcacaggtgtgcattggtgtaccctggcatgcacaggtgtgcactgatgtgccctggcatccattggtgtaccctggtgtgcctgccataggaccctgggcgggagctcccatctcatctacatctcctgattcatgcgttgtttcataggtttcaatgtctctgtaaatgtggtagaaatgcaggctttatgggcataaagtgtacatttctaaataaatcccttctattgagtatgctcaccctagaagttactgttgtccagacgtagagggatgagtgagccagtgacctcagacgggatggtggggacggcaggtccagctcctgcctcctcctggggggtctggctttgggggcttgctccgaagaggccatggcccaggcctgtggcctcacaatggggaccaaccagctcttctcatcttcttccctcacacttcctctcactcaaataagaaccttccaaaaatgtgtccacctgggcccctgccctgggactcatggatttggagttgtggccacacggttgaggggtgcagtgtccagtggaatggggcaattgcgggcctgggggcccttggcctgtccgtggcgggagcatctgcaaggaggagccccagagtccagggagcactgtggggagctccttagagctgaactcacccggcgtcaactcatcaaccctccacccatggacaggggtgcccccagcacaggagaggactcagccctctgcccccacgcacggtgggtgcctgtcaccctgtcctgcccagcggcccgagggcagcagtgggtgtgagggcagcccccggcctcccaagagcagctgagaggatccctgcgggaatccgggcttcgggtgcatgcgatctgatctgagttgtttctgacagtgacagagtgacaatctataagtatctcaagatcaaatggttaaataaaacataagaaatttaaaacgattaaaatatgcctcagtcttgggaatcctggtgtctgcaacaaaaaaacttgaggctgtccttgcaaacggtcctcatggtgctgggggtggtgccaggcccggcgtttgcctggaacacagagcatgcgagaaggagcagaggacgtgggtgccagggaaggaccctggcgtcagagccagggcctggacctgagttacccattaacggcactccactggttttcctttaaagaaatgaataaatacaactgcagtggggctgcttgtggtttccaaacgtcggcagaggctggagacggctctctagtgctgggtgtggagtgaggcaccacccttgccctgaagcctggggcactcagtcaccatggctcatgccccagaaccggacccggccgcctgcgacctcggggatgagaggcccaagtgggacaacaaggcccagtacctcctgagctgcactgggtttgccgtgggactggggaacatttggcggttcccatacctgtgccagacctatggaggaggtaagcacccacctgcgtcctggggcagacccctaagcaggggaggccgtctccaccctgacctgccaggcgcctgccacgcatccccagtgcttgggcagagtcactcctcctggaaaccagggtgcaccattgcccacggcagagtcagtcccctcagggcccacctgcagtcttctgggacctcagggcagcttcaccactgcccacagcacggaggatccagtcccctcggggtccactatggtcttccgggacctcagggcagcttcctgccaggcgtcaggttgaatgggccgccctgcccgacacacacaccctacaaacagtgagcgctcttccatctgaatgtcgtcagttctttaaagaacacacaatccgctctgggtttcctcaccacagccttggtgtgtccagacatgtgctcaggtgcccttctccgaggttctttgcaggaatttgggggcccacccctcgcctccctggctttggttctctgggagagccctgtggggggtgccaggatgttcagaactgtctgggtgactttagtgaccttggactcaccacccccagaagtgcattggtgactgaaataggctcccacgcacctcgagcctcccctcaccctgtgcctgcttctcttcatgcaggggtcacactctgctctccatgtggcgacacaggatgtagggacaggcatgaatcactgctctcagggagccgacgtacaacatcacgcatggacacccaggtctt

SEQ ID NO: 10699 - DNA, 6000 bp, Homo sapiens
ctattttaatactaatgtctttgtgaaaattatgtaaaaatgtatttctgtttgttggtttttaatttctcaagaaataatcttttcatacagtgaatatatccactgccctaaaaagtctcatcagtctacctattaatccctttcttctctattctgcccccataatcccctggcaatcactgatcttttcattgtcttcatatttttatctgttttaacatgtcatatagttgaattcatagagtatgtacccctttcagattggcttctttcacttagcaatatgcatttaagattcttccatatctttttgtggcttgatagctcatttctttttaatgctaaataatccattgtctgaatgtactacagtttattcatgtactcattagagggcatcttggtggcttccaagtttgggcaattataaatataactgttatagacatttcatgtgtaggtttttgagtggacataagttttcaagtcatttggattaatacctgggagcatgattgatggatcatatggaaagaatatgtttagttttgtaaggaactgaaaaactgtcttccaaagtgacataccattttgtaattccaccagcaatgaatgagagttccttttctccacatccttgtcagcatttgtttttgcaacaacaaatactggtaaatacaaatcaaaatacaatgagataccactatgtatctattagaatggccaaaatctaaaaagaatagaaaggatcaattttggcttttctagtatgtatgtagtggtatttcattgttgtttggatttctgtttccctaatgacagatgatgtggcgcatcttttcatttgctcatttgccatctgtatatcttctttaatgtggtgccgttcagatcttttgcccattttctaaatcgggttgttcattttcttattgtagagttttaagtgttctttgtatctcttggatactcccagtctgtggcttgtactttgtgtcctcagcagagaagcttttaagtttaatgaaggccagcacaatcaatgttttcttccgtggattgtgcctttggagttgtatctaaaaagttcttggcaaacccaagtttacctagattttctcctaatatattttccaggatttttatagttttgcattttacatttgagtctatgatccattttgaaggttttgggggtttttttgtgggtagaaaggtgtaaggtctgtatatagatgctttttttttttttttttttttttaacatgtggatgccctgttgttctagcatcatttgtggaaaagattgtcctttccctctgttgatttgcctgtatcaatgatcagttgattatacttgtatgagtgtattttctacctcgcctattctgttacattggtctatttgtatattttttcactattaacacactgtcttgattaatggcacattatactaagtctcgaagtcaaatagtgttattcctctaaacttattcttctccttcaaaattatgttggttattctggctcctttgtttctccatagaaactttagaatcaatttgttgatatccacaaaataacttgctgtaattttggttgggattgcactgaatctttagatcaagttagaagaactgaaatctcaacaattgttagcttttctgtctatgaacatagagtatttatttagctcttcttggatttctttcctcagtgttttgtagtgttcatcatagaacttgtacatactttgttagatgtacaactattattcatttatttgctgctaatgtaaatggtgttgtgttttttattttaaattctatttcattgctgatacatagaaaagtaatagacttggatattatctttgtatcctgcaaccttgcaatacttacttattagttccagtgttcttgtcccttccttgggatttacagagaaaattgtttatctgtgaaaaagatggttttatttctcccttctcaatctgtgtactattttttcttgtctttattagctagaactttcagtacaaagttgaataggaatgatgagaacagacatccttgccttgttcctgatcttaccaggaaagcacctagtttcttaagtgtgatattaactgtaattatagctgtaggtttttgtggatgttttttaccaagttgaggaaattcccctctattcttagtttcctggtagattttaccatgaatgggtgttagatttttgtcaagtgccttttctgcatctattgatatgattatgtaatttttcttttttaacctgttatgtggttgatggattacattgattttcaaatgttgaactagccttgtatgctcagaataaattccgtttaattgtgatataaaagtgttttgtactttaagtaaacttgctaacattttttgaggatttttgcatctacattcatgagagatattggttgatagtcttacgtccttataatctctttggttttggtattagggtaatcctggctttatacaatgagttagaaacttacccccccatcccggcttctgtctctagaagacgttgtagagaattagtataatttcttctttaaatgtttgggagaattcaccagtgaacccatgtggtcctggggctttctgttttggaaggttattagtagttttctggatttctttaatagatatgggcctctttagttactttttttttcttgtgtgatttttggcagattgtgttgttcaaggaatttttccattttatctaggttgtcaaatgtgtgggcagaatgttgttcataatattactttgctatcctttaaaccttatggaatcagcagtgatgccccctctttcatttctgatgtttgtaatttttgtcttttttccttcatttgcttgtcatgaaatttatcaattttattaatcttttcaaagaactagcttttgatttttctgattttctccattgacttactgttttccacttcattgatatctgctctaattttttaattcttttccttttgcttatcttggggttaaacttctctttttctcattttctaaggtggaagcttgaatgactgattttaaaacttccttcttttctaatatatgtgttcagtgctataaatttccttccaagtactgcttttggtgtatctcacaaattttgatacattgtattttcaatttcatttactttaaaatatttttaaatttctcttgagaattgttctgggacccatgtactatttcagagtttattgtttagtgtccaggtatttgagattttccagttatctttgtgtttttgatttctagtttaattccattttggtctgagagcacatattgtatgatttctattccttaaaaaattttaagttatctttcagggcccagaatatgtctattttagtgaatatgtgtgcttaagaaagtgtattctgctgttgttgtgtaaagtattctataaatgtcagctagatccagttgattgatggtggtcctcaattcaactacgttgttactgattttctgcctgttggatctatgaattactaacagagagatgttgaaatctccaactatgatagtggatttgttcttttctccttgcagttctatcagcttttgctttatatattttgatgctctgttgttaggcccacacccaataaggattgttatgtctccttggaagattgaccttttaacattatgtaatgcccctctttatctctaatcggctcttttgctttgaagtttgctttgtctgaaattaatatagctactccaactttcttttgattagtattaccatggtatatcattctctgttgccttacttttaattcatatgtgtctttattattaaagtgggtttcttgtggacaacacatggttgagaggtgacagcgtgctggcagtcctcacagccctcgctcgctctcggcgcctcctctgcctgggctcccactttggtggcacttgaggagcccttcagcccaccgctgcactgtgggagcccctttctgggctggccaaggccagagccggctccctcagcttgcagggaggtgtagagggagaggcgcgagcgggaaccggggctgtgcgcggcacttgtgggccagctggagttccgggtgggcgtgggcttggcaggccgcgcacgccgagcagccggccagccctgccggcccgggcaatgaggggcttagcacctgggccagcggctgcggtggttgtactgggtcccccagcagtgccagctcaccagcgctgcgcttgatttctcactgggccttagctgccttcccgcggggcatggctggggacctgcagcccgccatgcctgaacctcccaccccctccatgggctcctgtgcggccggagcctccctgatgagcgccaccccctgctccacggtgcccagtcccatcgaccacccaagggctgagtagtgcgggcgcacagcacgggactggcaggcagctccacctgcagcccctgtgcaggatccactgggtgaagccagctgggctcctgagtctggtggggccttggagaacctttatgtctagcccagggattgtaaatacaccaattggcattctgtatctagctcaaggtttgtaaatacaccaatcagcaccctgtgtctagctcagggtttgtgaatgcaccaatcgacactgtatctagctactctggtggggccttggagaacctttgtgtggacactctgtatctgtctaatctggtggggacgtggagaacctttgtgtctagctcagggattgtaaacacaccaatcagtgccctgtcaaaacagaccactcggctctaccaatcagcaggatgtgggtggggccagataagagaataaaagcaggctactggagccagcagtggcaacccgctcgggtcctcttcaacactgtggaagctttgttctttcgctcttttgcaataaatcttgctactgctcactctttgggtccacactgcctttatgagctgtaacactcaccgcgaaaggtctgcagcttcactcctgaagccagcgagcccacgagcccacagggaggaatgaacaactccagatgcaccgccttaagagctgtaacactcacggcgaaggtctgcagcttcactcctgagccagcgagaccaggaacccaccagaaggaagaaactccgaacacatccgaacatcagaaggaacaaactccagacggcgccaccttaagagctgtaacactcaccgccagggtccggggcttcgttcttgaagtcagtgagaccaagaacccaccaattccggacgcagttgggtcttgcttttattcactctgacagcctctttttactaatgtattcagaccattgatgtttaaagtgattattagtatagttgtattattatttatcatatttttctttattttctgttcattgcccttgttctgttttttgttaatttttttgtcttctgcccttcttctgatttctgcagtattaattgagcataatatatgatttcactttttatcctttttagcatatcagttatactactattttttttctgtttgggaggtttctattgaaatatcttcaagctcagagatttttttttccttcgctataaacagtctactactcataagcccatcaagacattctttatttttgatagtgttttgatctctagcatttctttttggttttttcttacaatttctatctctctgcttaccttacccatttattcttgcgtgctgcctctttttcctttagatcccttaacatactaatcatagttattttaaatcccagtctgataaccccaacattcctaccatatctgagtcaggttgatgcttgctctgtcttcacacttttttatttggaatgccttgtaattttgtgttgaaagccagatataagatactgggtaaaaggagctgggataa

SEQ ID NO: 10700 - DNA, 6000 bp, Homo sapiens
tgatgtttgtgatctctaactcaaaaaatttgaagtgttttaagttgtttctgggtaagggagatgttaggagaaaggaaatgctgtaactaaagctcaattattatcagttctatgctaacgtatacattttaatcatagttacctaagcagcatgcattaattgaaccttaaaatgttcccagcaggctgggcgcagtggctcatgcctgtaatcccagcactttgggaggccaaggcgggaggatcacttgaggttaggacttttgagaccagcctggccaacttggtgaaaccctctctctactaaaaatacaaaaaattagctgggcgtggtggcgggcacctgtaatcccagctacttgggaaagctgaggcatgagaatcacttgaacccgggaggcagaggttgcagtgagctgagatcatgccactgcactccagcctgtgcaaccagagcgaaactccatctcaaaaacaaacaaaaagaagtattgaagtgtaaaacactgttcttgcccacaagttgattctagtctagttcaagacacatgtttagtaaagagacaacatgtaatttaaacaaactttttttttttttttagacaaagtctcactctgtcacctaggctggagtgcaatggtgcaatcttggctcactgcaacctctgcttcccgggttcaagcgattctccagcctcagcctcctgagtagctgggactatgggcctgtgccatcacacccagctaatttttctatttttagtagagatggggttttgccatgttggccaggctggtctcaaactgctgacttcaggtgatccacccgcctcagcctcccaaagtgttgggattacaggtgtgagccactgcgcctggcctaaacaaactttttgaaaagctgtttctaaaagattccttaaattcagatatgacagctaattacctcatcataaattacttttatactaattgtttccagggttttagagtagttgaatgtttatttcacaaggcaccctaaattctatagaaataaaacctcagatgagtctccttcttagagtgttacaatgaatgggagtttacaacttttatgtgtcatgtttccaacagctgtgtttggggtggtcactggcaggaggggaccgtatctcagaatggcacattatttctattttacacatgagcaaattgaggcatagagagttagataacttgcccaggttacacagattgtaagttgatgaagctgggatttgaatcttcacatgtgtgtacttataaatacaaatgtaaggaaaactctagtgagtccacctcttatattgagttattactgtgtgagtgccaagtactgttttagatgctttacatatactattttgtttaatatcctttttaaagaataaactaggttggtgcagtagctcacgcctgtaatcccaggactttgggaagctgaggcaggtggattgcttgagtctcaggagttcgagaccaggctggttaacatggcgaaaccctgtctttactaaaagtacaaaaaattagctgggtgtggtggtgcgtcctggtagtcccagctactcggggtgctgaggtgggagaatcacctgagcccaggaggtcgaggctgcagtgagctctgtaatcatgccactgcgctccagcttaggcaatcagagtgagaccctgtctcaaagcaaaagaaaaaacctgaggctctcaataacttgctttccttcatgcagcttccagtggctggaaccaggctttaaatttactccaaaacctttatgtgggatggcaccctgccctgcctttgcaccatggcccagctacatggggttcccctggagggaaatgtggagcagagccattccctggagaggaggttcaagtatagagaggatcagcctcaaaacactggtgctgccaggtgcgggggctcatggctggaatcctagcactttgggaggctgtagtgggaggactgcttcagtgagtcgtgattgtgtcactgcactgcagccggggtgacagagcgagatcatgtctcaaacccccaaaatcagaaaaacaaaacaaaaacaccagtagtgttgagggaaagtgaaaaggggaaggaagtgatcaaagaccagctgaacagcccaagctaagcatggttccactacagagcatgtggccagtaaatctttgctaagggacttaaatcctattaattggggagctacatgtgtgggcagacaattcacagcccctgtgatgtgatccactgatgtcatcatttccctgggccctagcatctgccgttcgctgcttttttgactagatctgcatgatcaaatttattttatttttttgaggtggagtttcactcttgtcacccaggctggagtgcaagtgcagtggcccgatcttgacctctgcctcccaggttcaagagattctcctgcctcagtttcctcagtagctgggactacaggcatgcgccaccatgcgcgactaatttttgtacttttttgtagcaacagggtttcaccatgttgcccagcctagtttcaaacttctgggctcaagtgatctatccgcctcagcctcccaaagtgctgggatcacaggcgtgagccactttgcctggccagtgactatatcccagatgccagtttcatacagtggtattaaggaaggaaaatgattaaatttactgaaaataatgaaggttcacttgtttactcacatccactggttcattttttagttcttactttaatgagcgaatctgagtagtagttttcatgatcataaacagtcaatgtaaatgttggaaatataacttttaattctttaggaccagcaacatttgataagggcccccagtgtgattcctcccgagttttgcttttgaaatggttacatcttttttttttttgacagagtcttgctctgttgccaggctggagtgcagtggtgcaatctcagctcactgcaccctccgcctcccgggttcaagctattctcctgcctcagtttcctcagtagctgggattacaggcacgcaccaccatgcccagctgatttttgtatttttagtagagacggggtttcaccattttggccaggctggtctcgaactcctggcctcaattgatccacccgcctcaccctcccaaagtgctgggactacaggtatgagccgctgcacccggcgaaatggttacattttgtcaagtgggcaaatgggaagaacagaagcccgtgaattttgggctactttgaggcaaaatgctttattttttctaggtccatatggatggactgctaataactgctaagttgaagttaaatggactcttgttcttaaaaaaaatattttgccatatcctctgcaaaactgcttattaatttgcataaacttttttttttatttttgaggggggtgagggaaagggtattttgctgtcgatggaatgcagtggcgtgatttcagctcactgcagcctcccgggctcaagccatcctcccatctcagcctcacggatagctggaactaccagcacgtgccaccacgcgtggctaatttttgtatttttaatagagatggggttttgccatgttgcccaggcagatctcgaacatctggcctcaagtgatcctcctgccttgtcctcccaaagtgctgtgattacaggtgcgggccaccatgcctggcctgcttaaactattcagttaaaaacaaacaaaaaagaggccgggcgcggtggctcacgcctgtaatcccagcactttaggaggccgaggcgggcggatcacgaggtcaggagattgaggccatcctggctaacactgtgaaaccccgtctctactaaacatacaaaaacaaaattagccgggcgtggtggcgggtgactgtagtcccagctactcgggagactaaggcaggagaatggcgtgaacccgggaggcggagcttgcagtgagccgagatcgcgccactgcactccagcctgggcgacagagcgagactccgtctcaaaaaaaaaaaaaaaaaaaaaagatacaagtgagtattcttaatagtatgtcaattacatctcaaaaaagtcaaaaaaaaaaaaaaaaaaagaatgaaagaatacctccccaaaaatgatacaagaaaagattcacctaaatctgttcacagctgtctgcagagctcctactgtgtgctgagcctgggggtaaacagggcacggacacgtttgggaggggattacaggccgggtttccacactttttggtccaggcaaacccagacgagccagctggctcaagaacttggcagctgcgtgatgactgaacagaggctgcgttcgaacccactactgcaagacttaggagcccccgatgggaactgccgtggttcactgccccagccccgccgctcaactgccccgccctggcctacgacatcctcctgcccgcatggactgcgcgcagcgccgccaagcggggagcccagctcggtgctagcgcccgcgaagcggaggaggccggcgcccgaggctgggcgaagttcctcctagcgcagcgaggaccggagggcaaggccagcgcgcgccgggcgacctgcgtcccgggcacagacgcgacgggcccgcacggggcggggaccgcgcgcgcctgctgggcctacggctgtggggcgcgcagagtccacctggcggccaagggcgctggcgaccgctgaagctcctgggggtgttcggggtccgggctgcgcctgtgcccgcgggaaggctgggcgcttcccacacacagaccccgctccgggccagccccgcagggagactaccagggctggcggtagctgggcgtggtcgggtcgggggcggctgtgggcggccggcaggcagcgcgcggggcagccctcggcagacggccaatggcggcggtgctcggggcgctcggggcgacgcggcgcttgttggcggcgctgcgaggccagagcctagggctagcggccatggtgagtgcacagcggccgcgtgggtgggggtccggggtcggggggcggtgcgaggcccggcggcgtcggctgagggaccagcgggactggggcgaacccggcgtgggccgagccttggagctcgggcgtcgggtcaccgcgtcccgggactgaccacctgtccggtgcgccgctcagagaccggggtggccgcagcctccgccacttgcccttgactttacacttccgccgaagcctacgaacttgccaaccggaaacaaatgggaacgaattttgttcagcaactacaaaaggcagatgtgaaaagtagttgcagaacaattcggtgcccgctgccgctcgttgtgctgaggacgaacggcgctgcgggcctggctccctatggcggctccctgctcgcgcttcactccaaggggaacccacagaggttttggaggagttattaataaattgtcttttttggtgacatattgacttttctttccttttccaaggggccgtcagttttcctgctgtagaaattaatattttggagtaaatggagggaaagttttaacatgcagcaccacctagtggaaaagtggtgcgttaaactcaccatctcattttaagttgcattttaaccgcccatttcagtttgaaatgttttgttttgttttgttttttcgacacggagtctcgctgtatcgccgagcccggagtggagtggcgcgatctcggctcactgcaacctccatctcctgggttcacgctattctcctgcctcaccctcccgagtagctgcgattacaggcgcgtgccatttcgcccaggtaattttttatatttttagtagagaggggttttcgccatgttggccaggctagtctcgaactcctgacctcaggtgatctacctgcctcggcctcccaaagtgctgggattacaggcgcgagccactgcgcctggcctgaaattctttaatagaagaattttttttt

SEQ ID NO: 10701 - DNA, 6000 bp, Homo sapiens
cactctgttttagaaaaattacgcattagatcaggaagcctcatatatatgtgcctctgggacttcatttgcagtcacatttagccagaaaagcaatgacttctatattccttatggaaaccaatgtaacataaattaatgttctaaatatagaaattaagagttcataaagagactgaggttgcatgtaaaagagttatggtttgagacagtctaaaaatactatgttaatttcaaggatcttatttccaatgttttgtttaaaaaattataaatacttttgagctcttgctttgcatttcaatcgcaaacccactcagatacgggaactgtttaaattcatatatggacaaataggtttcagtgatgcaatactttaaaattctgccatctccttgtgtttttctttctaggtgagtggactgccagctcctgatgtgtcatggtatctaaatggaagaacagttcaatcagatgatttgcacaaaatgatagtgtctgagaagggtcttcattcactcatctttgaagtagtcagagcttcagatgcaggggcttatgcatgtgttgccaagaatagagcaggagaagccaccttcactgtgcagctggatgtccttggtaagcctccaaagagacccttgagaattccttaaaatccagaagtattgaaaaaaagaaagtattttaaaagaaaagcccagcagacttcatatttaaggttaatgtctatacaacctattggaatgtccatttttatctacaaaccacaggaaaaaatatatatatatacacacacatacatacatatatagatatgtgaaggaaagtcagtgaaactagaatgacagatctatcaccaaagcttttctggaaagaaaataaatcatacaattttagacaaaccaaataatgaagcataagcatttctagacgtaactatagagtctcaaaatgaaaatcttagtctaatcatttctctggtctttgtttctccaaaatgaggataataaaaataaccaatctgactcacagtattacagaattatcataatctgtcaaacgttaaatacatagtttaaaagtgaagagtaggctgggtatagtgactcaggcctgtaatcccaacactttaagaggcgccaaggtggaaggatcacttgagccaaggagtttgagaccagccagggtaacaaatagcaagatcttctttgtctctacaaaaaataaaaaaattagctgggcatagtggtgcacacctatagtcccagctactagagaggctaaggcaggaggataacttgagcctggagtttgaggtttcagtgagctatgattgcaccactgtactccggcctgggtgacacagtcagaccttgtttaaaaaaatttcttaaaaaatcaagagtaaatatcaacttttagccttagactatgtcctttttactaggaaactaatgtctaattataaccaaaacaggcctacttgctttagaaaacaggtatggctacatttatgtctcaaatctgtcttaagtagagcagttcttataaaactggtgtctggtttttaaattttacactttaagtgctttaaatatacaagttgagtatccctaatccaaaaatctgaaatctttaagatgctccaaaatcgacatgacacacaaaggaagtgttcattagagcattctggattttcaggttaagaatgctcaacaagtataacgctaatattctaaaataaaaaaaaaatcagaaatccaaaacacttctggtcccaagcatttcagataatggatactcaacccataccatatttttaatactttaagccattgtatattgcataagagatattttgctataattcactatttattatacagaagtttgatcaggttaaaggataaactattttcttgagtttatattctacccagatcaatacaaaatctttaagattattcaataatataccaaagggcctcaatctcaggggaaaaactagtgggctggaaattttcaaaaacacatacaatttaagtgattaaagtttagacaaatcctatttgtaccaatggcttcagaaatactacaatagtagagctgaaagagatcttggctgccatccgtttaatctcatttctccttcagaaaaaccagggttatggtactgaactatcgtttcctgtctcccctcaggtagctgaaaataaggtcataataattactgatattcccacattccttcagagtttacaaagtatctctttgtttattatctcatttgttccttacaattattttgtgtggtagacacaacagtcactactaccgggattttttttttataacaatagataaaactgagactcagagaaactaaacaaaattttaccaatttggcatggctcatggagccaataggtaatttgaacccaagctgtctgatactctttccatcactcatgctgcctccctgtagatgagatgataaagaatataacttaaatttgggccaggcacggtggctcatgactgtaatcccaacactttaggaggctgaggtgggcagatcacttgaggccaggagttagagatcagcctggctaacatggcaaaactctgtgtccactaaaaaaaatacaaaaattagttgggtgtggtgcacacctgtaatcccagctactcaggaggctgtggcaggagacttccttgaacctgggaggcggaggttgcagtgaaccaagatcacgccactgcgctccagcctgggcaaaagagcgagactctgtctcaaaaaaaaaaaaaaaaaaaaaaaaaaaaaagaatatgactttagtttgaatgaaatataattatctgattatcaattcaatgcatcattacattagagtttagaattctgaatggtataacaaaatagtactgcatgtcttttttactgagtttctttctgttgctgttgctttttaacattttaatatcaacatacaaatttcataataccttggtttgatttaataccttttttataatatttcaaatacttgaatttttgtattaatatatagcaaaagaacataaaagagcaccaatgtttatctacaaaccacagagcaaaaaagttttagagggagattcagtgaaactagaatgccagatctcggctatacctccaccaaagcttttctggaaaagaaataatgaaatggtacaattcaacactgaccgaataaggtaggatatgtatttctagacttactatagtttatttgggtgaatccagttatactttttaacatgcattataaatggcatgcatttatctcaatttgtctagtttttaaaacactaaagaataatataataaaatatatattagataaaaatgtaagaaaacttcagtaagccagattccactaatcagaaatgtaaggcataaagtagactaggatttatctttttatcaacgatgatgaaagatggcccaaggaaataaatgacataaacaagattaaagggggatgttttcttttcttttctttctttacaaaaagcttcagcctttattaaacaaaggaggaggtaggagacagataacggaacaggtcaggacccctccattcccctatacatacgcataaatacaaacacagacacacccgagtgaatgacagggaccatcaggggacagattgaagagcagagggagacagcacccaaggggggatgtttaattcaagaaaaccaatagctatttggcaataaatagatacagctttggaattttcaaatgtttttttcttcctagtctgactgttggtcagagacatccacttcacagaaataattcctgtactttcatttcttaaaaatttttatttcagcttatatcaagataacactggaagagttactttactgataaaagatgtaaacaagaaagatgctgggtggtatactgtgtcagcagttaatgaagctggagtgactacatgtaacacaagattagacgttacgggtatgtcatactattaaccaaagtattataagggatttaactaggaagatttaataagaaatgaaaatcccagcagagtataaaatttgagatattttccccatatataatcagttttggttcttttttcttttcctgtctgataataaatacctagtgtgaccaatttggttagaacaggttttctgaatcaacttttatgtgatctatttcagcacgtccaaaccaaactcttccagctcctaagcagttacgggttcgaccaacattcagcaaatatttagcacttaatgggaaaggtttgaatgtaaaacaagcttttaacccagaaggagaatttcagcgtttggcagctcaatctggactctatgaaagtgaagaactttaataactttaccaacattggaaaacagccaactacaccattagtaatatatttgattacatttttttgaaattaatccatagctgtattaacagattatggttttaattaggtaatatagttaatatatatttataatattatttatcctttgactcttgcacattctatgtacccctccgatttgtgaagcctacaggaaatctgggtatatggatttgtaactgcagaagactatcttaaaatacaggattttaacatttaagtcatgcacatttaacaattacaggttataaattagtatcaactttttaaacacatctaatgcttgtaataacgtttactggtactgctttctaaatactgttttacccgttttctcttgtaggaatactaacatggtatagattatctgagtgttccacagttgtatgtcaaaagaaaataaaattcaaatatttaaaacggactgtctcctcttcacaaaagtctagatctgtaaaataaaactccactcagcaaaacctatgaataacaagttccaaaagagcaatgttatattctagaacagtgtgaagctcacttacagctcagccaattcctctagaaactaagctagacttgccatggtttgcacttcaaaggcaatcacaagaacttaaatcatgactgaatctactgaatttgtgattttgttttaaccaaacaggtttctaattcttcaggatttttcagtctgttatgctcaaaggaataagaatagtctctagagattacctgcttaattctcatagttaatgtaaatttgacagcccggtagtcccagctgctgggagaggttgagctggggatcccttaagatcaggagtttgaggccagactgggaaatatagcgagactccatctctaaaaaaaaaaaaattatgtaaatttgattacctatatatgggtgtttttcctctaataatttcaatttcagataatctgttactttagaaagcataattttgtgaacagctgagagtcccagtacaggaaagcccaaatccttttgttaaaactattctaaagctttttttcctctcgggcttctagttcactggctgtcagccttttgcgaggcctctcctgttcctctcatcgatggtagtttttgaccctcactactgtgtggccgttttgctttttatctacacataaaacagcatttatcgacagcagtctacatctctttcagggaaataacaaaagtggctttatcttttactttcaaaactggttagtggttttctttgcaggtttccctggggcctttggactggattccattttattttcctttttatcaacacgagaatccgtcctggtcttacatcctggagggcttttggctgccttaatttacagccaaattagtttggccttttctatagctggtttaccaaccttctcatctttgcaaagcttctgggtcagatgtgggtctgggccccaggactcctgtgtcggcctgacctttcacataatcactgcagagtttttcatctatttttacatcacgggggcaggggagtggaagctacttcca

SEQ ID NO: 10702 - DNA, 6000 bp, Homo sapiens
ccaggctttacgttaacaagaaagatcactgtttgctgccttcttcatctgtttcttacatagcaaattacttcctagaatgtctgaagatttgacagctgtatttgatctttattttgtcattggccatgatatctctttaaggggagatggtttcattttatagatatggaagcagaggccatctgaggttaaatggtttgtcaaaatcatacgtgaactatgtaacaccaaaggctaaatacggcactagggatatttctgaaaataaaaggcagtgcccaagaatctataactttgttttctttttgaggtagggtctcactctgttgcccaggctggtgtgcagaggcaccatcatagctcattgcacccttaaactcgagactcaaggtattctcccccctcagcctcccaagtagctgggactataggaatgcaccaccacaccaggctaatttttctatttcttaatgtatttttgtagagacagggtcttgctgttgcccagcgtggtctcaaactcttggccttaagcaatcttcccacatcatcctcccaaagtgctggaattacaggtgcgagccaccttacccagccaatgtaactttaaattttttcccccattggtaggattttgagtttgtgtgtgcatttgcatgtgagtgtttgagtcagagactatatgaaatcgggctttgcatctcaactacctagaagtgtgctggacacaacataggcacttaataaatccatgtagtataaatgaaaggttaccagggaaataatcttgtctggcaaaagacagtggcattttcatttttaaccactgcgatactgattattttcagttccccactctgccaccccatctccctcaccaaatcctgaaattcccccatgaataataaatacatttataacaagcaatggtgttaacctgaattttcatactggaaagagtaatgattttggatgtagaactcaatttctatgtttgggcatcttttgtaatttctttatgcctcaattggagtttaacaacaatgaatacagatattttaaaccactagcatgaacactaatgacatttattaagcacttgctaaaagccatggaatgtgccagagagctcacatgcatcttcatatttagtccacgcaacacacctgcgaggcaggtctttttattgccaccataccctggctcagagacatgagtctcctgttcaaagtcacacagccagccaggcagaactggaagagggataacgactgactgtggtgaggacttgatggtcatccctccataaacagcagctattaagataatggtgataatgcaggaatccttgggagcacataacacgatgagtgtgcagcatcttagcataagtaagtttatgaggtctgtttcctccctgatagcgaaggctgtcagcatgaaagctatctctgcttgagggcagagaaaacttaaggatgtgttaggagtgagaatgtagagagtgatcacattatttcaaaattaaaatagtccttttgagaatatacccttcaatatttggctgtgcatgtgaaagcaggaaacagaggcgaaaacatattttatcaatttcacaatttacctaacatacgtcttgatttgctatatgcttgaatattacaaagaacaggatggagcattcttccttgctcttcctctaagagaaatctgttgccgtatgctgttcagccttcagtccgggagtgccatcccacagtgtttcagcggagagctgccaagagagaataataacactagcggtgttatttgctgacacgaaggctaggaatacacttacagcctagacttggcttcttgcctcttgttaaggcaccaaacagccgggcttaccgacaacttccctgagacattcgcttactctagcactatttaaatctctttgtagagtgtattgctttatttccttcaagtcttttatctttttaatctcacctctcattcgttttcatccctgagactaaagaaacaagaaggagtacagatctggggatgttaacctgaggtctatgaaccccaacatgaatgggcttcaggccaatcttgaaccaaacccctgatctctcagaaggtgagggaggcctagaccatcttgcttttctgaggttccatttagattaaaaagtagatatgcccaaatagagttagcaaagcaagtgtttatttttaactgcttactataataaacaaactgttttagcacacaacaattaacaatatgatgcaatataattgtgcaaaacaggatatttacagtgtttatgaaaaataccaattcaaaatgtttcaggtggtatgatcaaatcatgggttgcaagattaaggttgtctggtgaatgttttccatttttcaattctcagagtgtgtctctgtgaatgtatgtgtaatctcacttcaaaaagaagtttcatagtcaaaatttgaggaattctgcttatgtgaatcatcaactacatggcccccgcacctgttcctctttttactcagcctttcctgagaggttctgccttgacagtgaatgcaaacttttatgcttgtggattcatttcctaggttttattagattctctaagcagtccattttccaaaaaaggttaagaatctacttgtctcaaaagtaacctaacctataaaacccagaccaatgaacagaactcctcattttaaaaattcagaatattcttcttttatattataaaatcttttaactctgcaatttaaagtaatattaatactctttttaagagtattaatattaatattaattcttggtgtgctttttaaaaacatgtttagtaatcttgaaatttgttgtttcaaatttcaagaaaatgtcttgcaatttgttgtttcaaaaaaaatcttgtttcttaaacttgccgcctctctattcctattcaagaatatctaaggttaaaatgaggatggttatcctgaagagtcagtggtctaaagcccatcctgttactctggaatcgtgtgaccctgaggaagtgctgaacctctctgttcctcagttctgcatctctaagaagagatagttaattttcattcctcaagtccgttttagctctaaaagattataatttttcttactctgtttctccacctactgccatactgtccctgcagtgttttcatacctgagctccaaagctatcgtcatgacgttttgacctactctcttagaaataaaacatttgcttactttacaaccaaaaccagtacttaataggtctgaattcagatttattttgtctttgacctgatgtcaacgaaatatttattttgttgtcatggtgagcagtgcatgccaagtaaacttagatcactataaaaacttaaaaataaaagaaaatctaaatgttttggccctattaagttgccagatacagagctgcactgatagcttagggcactagatggcgatataagtgcatcacataacaaacatcttgcttggtccagcattaaaatcctaatgattgaggccagaacaggttaatgcattagttaacgaaacaaagtcaaatataatcaggtgtaggaatgttagctaacgctctgaatatgttcagtaacccaatgcttattgaaagaaaagattgttaaagtagaaactaatttatcctactgttgagcgtatcttcaagctaattttttgggcaagagttggcaataaacacgtttctcataaaatgtatataattcctaagttcacctccatttttgtttttcactttttaaaaatagcaattgtttgggatggcgtgtgcctcacatatattattcattgaccaagcactatattcttatcagggatgtgagccctaagacactggtgttttaaaggggaaatggccgacttactgtaagctgttggctgggccattattgactgtcaggctcaactggaagcactttgttagtggattaggttgccctggaaatgccttcctgaaactctaatgatgcacttaagggagccctctggaacaggagtaaaatgtcttttagcagcagtgccttccaccagagtcctcttgggatgacttgggaggggctgggggcacgtccaaagagacgcgcagtaaggaaacaaccccagaaaaaggttgcaggtatcaatttcttacaggtgagctaagataatgacttatggatgtaaactgtgggctttctgtgggtgccggtgcttcacgtcttcattttgaaagagcatcattaatttcagagagagtgtttatgtatctacctatttacatatatattcatatttatttatttgctaggggttgtggtggcaggcggatgaaatagaaaaggaaaaaaagggagaatttgagtgaatatggtttaaatcaaaggattaaaaaaaacactgtgtagtttgaacactggggtcatttggtgtgcgtgtctgtgttttaaaacaagcattagagggatatttgcccttcagcaggaaggaattccgtgaacgaggaggggggaggggggaagatctgtagatttttcaaataaaaagtcagttgtgtttatctcacaacttacctcttgggtagggggcagggatttgctgtgggatggtgatggaggtaaagacaaggaagaaggaaaaggcccttggaaactccagactccaggacaggacagggagggaagtggctgcgcagcactgcgtccccgccccaagccccgcgcgcctggcaatcgcgtgcccaccgccggagcgcggcgtccccgtgcagtcctggcaacctgtcaccgaggaggacgtgactcggagctgcctccgctttctccaagccatattcctttaagatgatgtaatagtcatttccctggatggtttcttgcctgcactgctgaaacaacagcatccgaactgcactgggaactgtggaaccacccagctccgccgccagagaagccggagccccgggccccccgccggcatctctgcgctgcgttggcctctggctcgcaccggctcccacctggctgggaacatgggagtccgtttgcccttgccggcaggtggggtggctacctgggaccctagcagggcacatctctccatctttctgcttctgggctttctgaaaagcttctaagtcctggtacctcttgcaactctcttctaaggatcctttccaaagatttctttttccatttttcttttcccctggggaagctttggttgaatattttctctgctttacttcttcaacccaacctcctctcatcagggcttaactttttttgcgacttgttttaacttaagatacggaatgaacacatatgtacctacatacatacataaatacaaataggcatttatataaatgcatatatataatagttattttccaagagcacacctctctggcacttttcattgatacctcggtcgtttacctgtttgggatttgacaagatccagactcagtttggctgtggattttgattgctttacaaatggttattattatttttttcacaagaactgggtctccagcactcactaaggtaagctctaagacttattgcttttcctgtccagctgaaaaaaaaattcccatttggaagttgaaaattgcatgtttctttttaatgtagacttacaagtaaattgtttttcatactaattgctggagacagaggcttatagataaacatgtaggcacaaaatagcatgagagaagctatgatttaattgaagaatggctgagatcagtagttccagagctgcttatgtaaaataatctctctctccctccctctgtttttccctccctccctctctctctctccagaggactctttttctgactcattccaggtttgaggaaataattttttctcttttccttcagacggacatctgagtaactggggaattggcctgccttgcatgtgagcttgatggaaga

SEQ ID NO: 10703 - DNA, 6000 bp, Homo sapiens
gtgtcctaattcttgatctttattctagtaaatccttccatttcatatcctttccacaaatcctatggccattcagggcatgatgaatgattttttaaatgctgctttaatgttgatgtcatttttttgtaaacaaatatgtaaatgcagctgtccagcaggataatgataccacgttaaactcttcaaatatttaaactagacatatcctaacatgccagcaggttatgaataagctgaatgcagtttcttgctacaaatatgcctaatggttttcattatttttgatatataatctctgtaagttgactctctcacttagatctatgtttctttctgcaagatagacacttagtcgttgttactgattggatatgtattcattctgttaactttaacaatgaaaaacataagtaaacatacattcttatggtttaaaaggagtttacacatagactatgtgtgtgcatatatttatgcactttaattttaccaaaggagacacataaacatcctgaatgcctgattttagctataaattttttttaattgcatgtttcctcaatcaagttatataggatacagcattttaaagtatttaatctagagagttgtgacagcattttaataaattatatttattttcttacctcccttctgacttacattagtcatcgtgttaccaattttatttggagagtcaaaaaattcttcttcaaggatttcaaaaataatttatatattatttgaacttttaaaataaataattgtttctaatcatcagcttattatcatttttcctaactctgaataaatctgcatttaccttcttgggttgatgggttagacatctgtgaaaagaaaagtctttgaaagaaaatgggtgaatctgggttacatttgagttgctgataaactgaaaactgccaaaagaggaaaattggatagtgccctatttacattactgttaaatagactctgattctcacatacatatttttattcctgatgagtatttgttgcatcttatggaaaaataatgtaaatgtatcttttgggaagcctgtggttgactgtactagctgtggttcgaacatttgctgtggttggctatatcctgtattatattctcttcaaatgttactggtttaacgtgtatgtaaaatactctatgcccaaggcccatgtaggaaaatttccccgactcaacatcttaaaaataaaaacatgggcctaggattaagatggcacaggagctagcttttcccactacctgtctaagtgaaaattttatttcgacagtatgcaaaatgttgacagtactatcagtattattagttatttaaacacgctgtagataatgcactaaaatgcagagaaaagaataattttatggcaagaaaaaagagagaggaaaattggcattcattagatgtctattaggtgtcacacaagagggctatctgattcacacttgttttcctatgtaatgccaccaccagcttataaaatatcattacttcatttgaaaacttcagaaaagttcagcaatctgcccacggccttacagttttgaaacatctgtgacttcaagtatatattcgtgcataatcatttattgtgccatgctaacctgggttctacttctgtaaagatcatgtgaaaacttacgtaagctttgtgacctgtcaaagtggttggggcaaacaatctctaaattccactagagtgccaaacacttatgactcaaatatacataaattttgtttttgctatatttaccatgtttctctgtatgctgaaataccaaacgagacttccagcctgggaaatataatttgcctaaataacccagatgacaaagatgtctagattaaggtacaaaaatgtaacctattacttaaaccacttttattttcttttactcctactgagctattatttcaatatcacttataaaagaagagacatccctctggatatgctagtatagtcaattaaacatggtggtctgtattatatacagagggattagaaaagtgggactacttaaatgagtgtaatgaaatattccatataaatattcatatatataatgcataatgctaaaacacaatttcattgtagatatctgagccattcaaatacactttaaaggatcaattttttctgagtttcaacgaaagtttatttgatattttattatttttacttatttcttttccttcaccctacattattttgtaaactataaaaagacacactgaataaatgagaacactcttgctatttttttctcatttggttcacgtttagttaaagaaagtaaaaacgtttctctgttgaatagaatcagcaccacttcatcaattaggtaagggcttcctgccatttaaaattgacagtaaaagcgaaaggtaccagactgcagcactggagatagagtgattaggcatccctaggatccctggttctagatttgacctcaaattctttctgccaagactttgtaactgctcagagggccttggccaccggcctcatgagacaaaagaaaagtagcttaaatctctgaaacgctaaagtaagcctgattctatgttgcagttggatgtactggatcatcaaaataaaactcttgccatgaataaataataataaatactcagagatgagctttatgtgactgacataaaggtggtcaagcatggatataaaatgaatgaaaaagattttactatgagctcacagtctcacagtaaggaaagagagtaatgtaggagtgtggttaagagaataggctttgaagtcagagcatttggatttgcattttagtgtggatattcactagctgtgtgaccttaggcaagtcttttgatctctctagtctacaatttactgaatgatttgtataacagaaatattaagaccatctctcatagagactcattttgagaatcaaattgaattattatgaaaattacttttcacattacttggcaccaagtaaacactctaagaatattaaacaccatagttattatcatttaaaaaaactgacatcattatatgcacacatagtttgaagtggttcattctggctaaaacaaaacacaagaatatcaaaaattatataaaatattgaatataaaaacacaatataaagtattttcttgtcattaatttattatattttatggtagtatgtgcatatattaatgacatatcagatggaacacaataaacacacccataattagagtatcaattgatgttttggagtattaaaatatcattatttttaaacactcacaatttatgaaaaatatagatgtcttaaagcaaattacatgtatgtgtgtatgtatacatacatgcatatacatattacaagctgatattcatagagaatcatctagtaaaatctaccttgtgagtattacattttaaagagagaatcatagtataggtatttccatttccatatacacactatagcccccaaattatttaatatttatttctttaaatgtttgaaaacgctgtgcaattgtatcctgtttcatagtcacataacattttttaatctgaagcagaatgtaattggcattgctctgagactattgttcacatgatgaagcttcagtgaatttgtttgcaaaaccaaaatcagtagagtgatttagttgtgtttcattagataaaggatataaatttattttcaatttgtagaagatcataaaaggacctgcaacagtttagccaggagaacactaaaaattcagatttttataactgttgactttcattaaaacaagacaaaactgtggaattgcattgtagatgaagtaaaagaataatgttttctaatcgttaactcaggatttcattattaattataaatctcattaaattcagttttattctccaaaccactcaataaattaattaatcaatggataagtaaataaaaattgggtaatgacacatagggaagctgtgatgtttcttcagcgaatatctttaagaatacattggcatttattatatctgaacataacaggcaattaactactgcccagaaacagggctatcttaacataatcttcaaatctctcttccaaaagtttatctctaaaatcacttcccagttgacacttgaccacaaaactcagaaggtaaccaagcccaacccctaatgtggtcttcagttttatattccttattattgcaatcaccttatttaagttttaatcattaagctgattgcattgctgcacaaggtcaagaagcacttgtagaatcagaaaccccaaagtggttatggactggctactcagatttttttcttcacttgctcaggctccgccccatctgaaacgtcttctctgctaggaactcactaggagaaaatgaccagtgagcttaccaaagctcagaccttatccaccagaaacattgtatggggcacctcaccttttcagcacctcctgccataacaggacggaagtgctgaagggacagctcccagtgttttaggtcttagtaagcgctcccaggaagacagcacccatcccctctctgctacaaacagccattcacaaaatccgaggaggaaaccaagtcatccctgattccttggaaatttagttagactgatgttgaaacacacccccctttcctagtgtataattatttgtgggtggagagctaccagggagggtaacagaagatgccggagaaggggggggaaaagtagatgcggatttcgtcctgacttctaaaaattcctcctctccctctcccattttcctaatccgagaatgatggagctcgaggcaaaggaatgattccggaaatggagatatgattctcaaacctagaaatgatcggagtgatttattagttaaatattcttcgtccaggaacccagcacaattcagaggtaacagcgcctgcgttttctccatgataacatagacaaacagttgcctccaaaggtaaaaacccggttccggagggtattcttgctgtcctctaagctacagaagaaggtggggtggaaagcgctcccaacctgagaaagtgcgaaagactctctaaatccagtagccaatttcctacctgccagaactctttcctaccatccgtcaccattcgtgactctgcaagacacggggacttagacatatgtgtgggagtgtgtgtgtgagggagagaggcgagacgagtgctctccccacacgtgtaaccctgcatctcccagtttcagagcttgcgttcattcatatgcaggcagtggtttaatatttgatcaaaggtagaatagttgcactaaatagttgtatttttaatgggctcaccttaaaatcgggtgttcataaattgcaagtgtgaaaagactctaagtgcagtccgtatgtctctcaccctttctacccttccctcccccattgccgctccccccaaaaagagaagcttgcagcagattgtagaaggatttgagcctgcagctagagagaaggggattagggccagagtggtgcaagttaaattgtgctgcatataaaaaatgggcggattggtctccagatccagaggctggtaccaccttcctttctaaaataaaatctctctggcatgaagtcaccgcctatttcacatccggtttgccctgggacgtattactactgtcttggtaaagagaaatcttttgttgtatagctgcagattggatattgggaagcaaatttgggtgtgaaatcttcagcaaaggagcacgcagagtccatgatggctcagaccaagtgagtgagaggcagagcgaggacgcccctctgctctggcgcgcccggactcggactcgcagactcgcgctggctccagtctctccacgattctctctcccagacttttccccggtcttaagagatcctgtgtccagagggggccttaggtaagtgcgactttggaccacgatacacagacagagctttgaac

SEQ ID NO: 10704 - DNA, 6000 bp, Homo sapiens
cagtcctccaatgctagcttaacaagtctttatgtgaagtcctctctgttaaactggctgctgtggtctttttctcccggctggacagtgactgatcccttgtctagtcattccctgcctcccctcccacgccacagctctggccttagagggaattatttccaggacaaacatcttcaatctctctccacgatgcatccagggatggagagtgtatgatttaatagacagctgctaatttcttccaatatcgaggcaaaatatacctctctaacactgtgagtcactttcattttgagccctggtgagatatcaaataagtttttgtaaattttagagtcaaatgtcaaatgatctcggattcaaattcagcttcagctgtgtgaccatcaagaagttactttccctctccgggcctgtttcctcacctatagaatatataatatcgtaatagctacctcatagggctataataaatatttaaggtgtgtatgcacttagaacagtcacctgcacggggaagaaacttggtgaatgatgctgtcattatcatcattgaggaggacagcctttcaacttttgaaggacagcatgtttgtcctctcttagccttgcactcgaagtcggagcactttcccaggcccagacaccagctggagcccccatctgcttgtcctacttccgcctggaactggggtgtgaagattcccataaacgcttcaggtggagagaaaactctgacttcccaagttcctttggataacgcacatctgtgacccagaggctgactaacacatgcctgctgatggtctcatttctagggtctcaggtgctatgtaaatcctcttccctgttctttatttgcaggatagcacattccttgagcagagcacgattctctcctgtactctcctgtcatgaagtgcatactggcacaccttgccttcctttgatgggaatgttcttggcacactgagtcccttgcccatgtattggggggatattgctgtgtggtgttttggatattgctgaccctctctgggcctgacttatttgtccaaggctgagagttcaaacacatgatgccttgcagagatcagaggagaatccaaaatgcttactgctaggagagagaaaaatcaaagagctggctccataatttcgaacaattataaagtctcacctgcacagcctctatttattttcaccttcctttttctgtgcttgcttggtttccacctctgtgagttcttttccacttaccacagcttcagtgatctcaatcttctcttcctcttctggaattctctacccctcccttgataaaaacagtgttttataatggtttcatgtgagagcaacgatcccatctcacacttcctttggagccctccacagcatttgcctggcactgggcacacaacagctgttcaggactccagaccgatagagaatgtttcttgtctagtcacatagatggtaggtggtagttttggggatggggcaggaatggcatcagcatcaacagtaggagaggtaggagcagcagcaataacctttgccgttgacgtaataacctctgccatgtactatgccagccactatattaagcacattaatttcatttaaaccttccccagaccctatgagataaggattattattcccattttacagaagaaaaaactgaggctcagtgaggataacctgtttgttcaacagctgctgagttgaactcaaccctaggattgagctcaaggctgtctttggcctttgtgcttgttatcctctcagccttaactattcttccccccctcagagagctgtatggctggtttgagtctctgttcaaatgtcatcttaatagaaaccttccccagtggccctatctgaaatcggaactcctgttactctctatccatttgatcagttttctttttctttaaagcactatctcttgtatagaggcccatttgttgactatttctgtccctggaccacatgaatataatgtcaataagcccagggactttgtctgttctatctaccactgtatcctcagcacctggaacagagtccatgataatcgtatactttcaatatgcatgtgtaggatgaacaagtgagtcagtaaatacctagtgcgaagatctgtgctcttatccattatacatctggcttggaggagttatgggatgttcataggatttgtcaggtcaaacaacatatgcttttgtttctttcccaaaatatggtcaaatgttgggattccagattcctgagctggggcccaaatgcagatccaccctggacatttcttatcatccctgaacagaggctgctaactgtcttgtgggagccattcctccagcaggattcctggccagatttccaggctgaagactgagctctggatcaccttatatcactatggtcacagccttttttcctttggcttctcagtttttagtcttaccctctctggtgggatggaagagaggagaaactgggcatagttgagagtcctatgtcctgcaaagtgaactcacctattcagaggacagtattattgttggtaaaatgatcagatgggtcccacaccctcccttccaaactttctgtctctgatccttctccatggtgcctaggttgtctgctctttgcccactccttgcctgccaggtcgtgctccatgaccgtcttaacacctacctgcctcatgcctcaattccactaagattctgcaaagtgaaagaagttagttagataaactgattctcaacaaggactgagtgtctcgtggtgaatctcctcctctgtaagtccatgagggctctgactttgtcgtcttatttgtctggctcagccctttctgcatcctgggtgctcagctctttcctacacactgggagctcagtaaatattggataagtgaatgagtgaaccaaagactaagtgccattaacactctcagacaccgtgtgcctttttttttttttgagacagagtctcactctgttgcccaggctggagcgcagtggtgcaatcttggctcactgcaagctccgcctcccaggttcacaccattctcctgcctcagcctcccaagtatctgggactacaggtgtgcaccaccacacccggctaatttttttgtatttttagtagagatggggtttcaccatgttagccaggatggtcttgatctcctgaccttgtgatccacccacctcagcctcccaaagtgctgggattacaggtgtgagccaccgtgcccggccaccatgtgccttttaactgggaccttcaactcttaagacagagagtgcataacacggcaattttaagccctaagacatctagcacaatggggtatttcctgctagagctacttctgttatatatgctctgactcctaccatgctggcaaggcttgagggcttcggggttttgaggaggctctgagtttgcagactgtctcccaggcctcttttcagagctgaaatttgttgatgagcactctgaaggctgaagtttctttcttcaagattcacttccacattgactcccagaacacggggtaaaaatcagacctgatacatgagttctggcttatctggcatttgtcaactcagtctccattctctgtctcttaagcaacggattcctcttgaacatcccagagaagcagatcaaagggagacagtcgaggcagaagaagagactttccaaggcatagccttattcagatgaaggtgtttcatatctgctattcacaagtagccacactgcattcacagatgtacccatggccagggcccacaaggactttctgaggaaagcaaagcagggttgttttgggggaggttcacacctggtgaagagggtggaatgagatgtccctgccaccagggtcccttccaactcacggagcctatggtactgaatggcagccaggttttttatggagcaatagctggacttcacatttgcataatgccttgcagtttcactgttaagagtactgcattgtattctaattatatgaatctcggtcattcctttatgacatttctgaggaatactatctcaatcaagaaaagccctaattgcactcctctcctatcccggtgagagagcacagactcgtgcctgctccgcaggggtggaggctggaattcagtagtctgagtcggggatgcctggagcaggaggtggtcaggggcattgtcctttccaagtcaggaaggcagacagcacctgctgttggtgccaaggttactggacaggctgcgagggctctgtctgtctgtccgatgttcacaggccagctccccggaggctcagcactcagcccagcttctccgagatgcaaaccaggccactctgaggctgcctacaaactttctgctgagtgccgacagctgcttcctgctctgcggggagttcttccagatcctgatcaaggcacagagaattgatctatcagattaaccaggaaggaaagagtgggagagcgagtgtgggaggctgtggggctgagtgttttctgcgtagcagtcccctcccttctgacttgagtattaattgctacattaccgctgccatgtaagaaagacagtcagcaaagcctgggagagctccagctcctccctccctgctctgctcaacttcactctcctcctcggttcccttggagtaccttgtgccccggcagtgctgtcccggccctggcatcctgaggtcctcccgtggtgaggacttaagtggacagcaggagtgggtggagagagggagggagagtttgccctgcaggctctctggatgcagaagccagactcgctgcagaggcagctgtgctgttcccggagcctggcttcaggggtgcatccgtcactcagggttcattcacccaggcaggctccaagttcctggggtgcacaaggtgggcactgtcccttctgggtgctgacagcagagcctggctcccctccgccaccatgagcggctgctccaaaagatgcaagcttgggttcgtgaaatttgcccagaccatctttaagctcatcactgggaccctcagcaaaggtatggaaactggccttgacccttgctttctgtcttgatatggcctggctggtcgcattgcctcggtgtggtgagcgtgaccattctggtgcacccaggtcttggaaaaagctggggaaattggtggctgggattcgaggttgctgacaacctgcgtcctggctttgagtaggcgggcacccagccagggaactcagctggctgtaattgcctggaactttggaaatggagttggtggtgtgtggctgatacgttatgggcgggcagagggatagaaccctttccagagcattggaagtggcttagcgtgactggagtttcaagaagttatccatggaaggttgtattttgttgataaaagagagatttgatgcagtgggttgtgagtaattctgcagaacagagacgcttgagggggccagtgggaggtggtgatgggccggcatctgctttgccctggtggcttcagaaaccggatcagctctgcacctcaagtgccaagagcctcctctcatagggttccagcgtctcgtgcttctggggcttcattcatcgttctgctttcttggatccctgtccctccacatttcatgcctatgtccatgcctgtcttttctgcttctccaggaactggggtggcaggtggtttgcaggagtaactgtctgggcagatcagaaagtgtggctatggaccagaattagggctgcagccccagatgggcccacagccgggaggcagaaagaaggctaactcctcagggcccagtcctgtgtcttaaaccccattttacacttggcaccagggaaggtgaggccctcagaggggtctggccaactttgtggagatgatgtcaagggagagcagcagcatgatgtggttccactggctgaaaaaacgtctttaaatattca

SEQ ID NO: 10705 - DNA, 6000 bp, Homo sapiens
gaagatgcaacagaaggacctggtttcgtttctgcccagaagatctcctagttttgctggggaggtggcacatctgaattgtacaaggtgattgatttttttcagcttaccatgttagtcaggtactagaatgtgaagtgctgtgctaataagccacaggaggtgcacttcagggtggctgctgcctggagaaggggagttttgagttggttcttgaagatctggtatgtggttgtaagggaaggcactaagggaggggttagcaggtgacataggtctaggacagggagtaagaggacatactttgtctgcagtgtgttgggaaataagggccctaaaatgggttcagtgagctgggccacagagtacaggggggttcctgtggcgtactctcctggggtagctttcccaccagtttagggtgtctgaaagcaaactcttgtctctctaactgtccttcaaatggcttgttcctctcagtagccacaccagcatcctctcaagcacctagacctgaaacggaagaattatcctggtgatttgttaccaagaactggtcagtcgtcctgtagtgcctttcacaggactgtgctgctggcctggatacagctgccttccctctagagttctggtaggagcttcctggccacatgttacctttaggctcttcctgcttccactggcctgcgtgccactttgtcatgaccaagttggtctctgctcagataatctcactgccttccaattatattttatagggcatgcttcatcttctcagaggttttcaaagctgcccacagcccagccctaagcctacctcgcattactctgcaagaagcctctttgctcagagattagaactgcaatgttcatgagaggtcacctactcatccctttcactgaagaagtggggaaaacaaggctcagacagggtgagtaccttgaccaaggccacaaaaattagtgtccatgcaggaattggaaccaaggcccttttcatctcagttcagtggtttttttgtttttgttttgttttgtttttagagatggggtcttgttcggtcacccaggttgcagcctggaactcctgggctcaagcgatcctcctgcctcagtctcttgtgtagctgggattacaggtgtgagccaccacacccagctcctcagttcagttcttttcttcctttattcaaactgttcttctcctttccatgccccatctcacactatcctgccccttctgttcacatcccacctatttctagaaagtttttcttgatttttatgcacttaacaataaacagttatcaaacacttactgtaggctagacactatgccagacactggggtatcagttaacaaagccgatactgtccttatcctcacagagcatacagtatagtgggggagggagaatgtaaacaaagaaaaaagttaatgtatcattacaagttatgctaagtgccaggaaggaaaatctttttttttttttttttgagacggagtctcgctctgtcacccaggctggagtgcagtggcgtgatctgggctcactgcaagctccgcctcctgggttcacgctattctcctgcctcagcctcccgagtagctgggattacaggtgcccgccaccacgcccagctaattttttgtatttatttatttatttttttagtagacacggggtttcaccgtgttagccaggatggtctcgatctcctgacctcgtgatccacccacctccgcctcccaaagtgctgggattacaggcgtgagccacctgcccggccctaggaaggaaaatcttaacagcaaatggttagtgaacacttaaactatgggtcatggcactatgggaaggactttacatgtattcattcatttaatcttcacagaactctgtgaaatagatttcccaaattttacagaggaggaaactgagacttgctaagtgacttgcccaaggtctcacagctagtaagtgtggagtcaggattggattccaggcaatccatactgttagtggctcagatactgcctctgcatcagaaaggagtgctgtgagagagaataatgggaagacctaattctctttgaggagcatggttagggaaggcctaaccatggtgagaatagtgttaacgtcattagggtgagaagaaagagaaataagccgaggatgtctttgattgtgtagtaggggtggaaggtgattttgtcggaatgggaggtgattcctagggggttgtttgatcctgtttcgtgtaggaatagaaggtggagcgctgctagggctgtgataatgaagggcaagataaagtgaaaggtaaagaaccgtgtgagggtgggactatctactgagtagcctcctcagattcattggaccagatctgttccgatgtatgggacggcggatagcaggtttgtaattactgtggcccctcagaaggatatttggcctcatgggaggacatagcccatgaaggctgttgctatagttgtaagtaggaggatgatgccaatgtttcaggtttctaggtaaagaaatgagccgtaatataggcctcggccgatgtgtaggaagaggcagatgaagaatattgaggcgccattggcgtgaaggtagcggatgattcagccataatttacgtctcgggtgatatgggcgatcgatgagaaggcggttgaagcgtctggtgagtagtgtatggctaggaatagtcctgtggtgatttggaggattaggcaggcaccaagaagtgagccgaagtttcatcatgcggagatattggatggggtggggaggtcgataaatgagcggttaattaattttatcaaggggttaattttgcgtattggggtcattagtgttcttgtagttgaaatacaatgatggtttttcatatcattggtcgtggttgtagcccgtgcaagaataatgatgtatgctttatttctgttgagtgtgggtttagtaatggggtttgtggggttttcttctaagccttctcctatttatgggggtttagtattgattgttagtggtgtgattgggtgtgttattattctgaattacgggggaggttacatgggtttaatggtttttttaatttatttggggggaatgatggttgtttttggatatactacagcggtggctattgaggagtatcctgaggcatgggggtcaggggttgaggtcttggtaagtgttttagtggggttggtgatggaagtaggattagtgttatgggtgaaagagtatgatggggtggtggttgtggtaaattttaatagtgtgggaagttgaataatttatgaaggagaagggtcagggctgattcgggaggatcctattggtgcgggggctttgtatgattatgggcgttgattagtagtagttactggttgaacattgtttgttggtgtgtatattgtactagagattgctcgggggaatagattatgtgattaggagtagggttaggatgagtgggaagaagaaagagaggaaataaagtttgattatgcctttttgggttgaggtgatgatggaggcggagatttggtgttgtgagattgttttaggtagtagcttttctagtcaggccaggtctaggaggagtaggggtaggttttggcttgtaagaaggcctagataagggactgtgcggtgtatgatactagggtaaaatccgagtatattagagaagtaaaatgtatacagtggggattttattttgagtttgttggttaggtagttgagatctagggctgttagaagtcctagggaagtgacgcctagggctgtgagttttaagtaaagtgggattgtcatttggggggtggatgtggggagaatgctgttggtgatgagaaaccctgcaaataggcttccgattgttaggcgtttaatggggtttagtagggtggggttgttttcgttaatgttagtgagggctgggaagcgaggctgacctgttagggtgagaagaattattcgagtgctataggcgcttgtcagggaggtggcgatgagagtaatagacagggctcaggcgtttgtgtatgatatgtttgcggtttcgatgatgtggtctttggagtagaaacctgtgaggaagggtattcctgccaatgctaggttgccaatggtgagggaggttgaagtaagaggtatggttttgagtagtcctcctatttttcgaatatcttgttcattgttgaggttgtggatgatggatccggagcatataaatagtatggctttgaagaaggcgtgggtacagatgtgcaggaatgctaggtgtggttggttgatgccgattgtgactattataagtcctagttggcttgaagtggagaaggccacgatttttttgatgtcattttgtgtaagggcgcagactgctgcgaacagagtggtgatagcgcctaggcatagtgtgagagtttggattagtgggttattctctgctagggggtggaagcggatgagtaggaagactcctgctacaactatagtgcttgagtggagtagggctgagacaggggtggggccttctatggctgaggggagtcaggggtgaaggcctaattgagctgatttgcctgctgctgctaggaggaagcctagtagtggggtgaggcttggattagcacttaggagggttatttgttgtgggtctcatgagttggagtgtaggagaaatcatgctagggcaaggatgaaaccgatgtcgccgatacggttgtataggattgcttgaatagctgctgtgttggcatctgctcgggcgtatcatcaactaatgagtaaaaaggatataattcctacgccttctcagccgatgaatagctggaataggttgttagcagtgactaggattagtatggtgattaggaagatgagtaggtatttgaagaattgattaatgtttgggtctgagcttatatatcatagtgagaattctatgatggatcacgtaacgaacagtgctacagggataaatattatggagaaataatctagtttgaagcttagggagagttgggttgtttgggttgttgcccagtgtcagtttgagataatgacttcttggtctaggtatatgaatattgttgtggggaagagactaataacaagggtggatgcgataatggattttacttaatggggatatgagttttttttattagggttaatgagggtggtaaggatagggggaattaaggaagttagggctagggtgggtatagtagcgtacatggttattacttttatttggagttgcaccaaaatttttggggcctaagaccaacggatggctgttatcctttaaaagttgagaaagccatgttgttagacatggggatatgagttagcagttcttatgcgctttctcggtaaataaggggtcgtgagcctctgttgtcagattcacaatctgatgttttggttaaactatatttacaggaggaaaacccggtaatgatatcggggttgagggataggaggaggataggggataggtgtatgaacatgagagtgttttctcgtgtgaatgagggttttatgttgttaatgtggtggctgagcgagcctcattgtgttgtggtaaatatgtagagggagtatagggctgtgattagtatgttgagtcctgtaagtaggagagtgatatttgatcaggagaatgtggttactagcacagagagttctcctagtaggttaatagtggggggtaaggcgagattagtgaggcttgctagaagtcatcaaaaggctattagtgggagtagggtttgaagtccttgagagagaattatgatgcgactgtgggtacgttcgtagtttgagtttgctaggcagaatagtaatgaggatgtaagtccgtgggcgactatgagaatgactgcgccggtgaagcttcagggggtttggatgaggatggctgttactacgagggctatgtggctgattgaagagtatgcaatga

SEQ ID NO: 10706 - DNA, 6000 bp, Homo sapiens
ccgcttcagtactgccattatcaatagctttcgggtttgcactgcagttttgtccatagttgtggtgctttagggccatgacacagaacttgcatttagatgtgtcagaatacaaatattgggtgcctgatggagcagctgtagtggctgagcagtgctgcactcacattcctgtggctgggtagcggccagttgctttctgccctcaggagggattcggtccagcggtgtgggcaggtggctgaggttcttcttcctggctttgagctctccatgttttgctctttttcttacatccttttaaacaaaacaaagcagtaatattctctcccctgtgttgcagagaattactattatgttgcgcttttgatctaggttagagtggggcattctgactcatttactgaatttcgcagaaagacactaaacaagattgagatcatggaattacttgtggtcatactgggtcatgtcacagttaccagatgcaagactcacatccctggttcccacagcaacatttttagatcctactgtgacatagaaaggttgtttttttgattttgttgttttaggcgagatcttgttttccaaggactacttgctggattagttttctcccttaaatgggttttaccatacttcccagaggaagggaatattcgccagctgaaacaaacaaagctgtacttgtttgggagtagcccaggtatcactgttgagcaatcaaaggtcatttaattgtatcattaaaatcaatcctatcaaaacagcaaatgctgctaatgactctgtttgcttgtgtgctctctgccaacagggcaggatggaggcttttttttttttttgagacggagtctcgctctgtcggctaggctggagtgcaatggtgtgatcttggctcactgcaacctccacctcctaggttcaagcgattctcccacctcagcctctcaagtagctgggattagaggcacctgccaccaagcctggctaattttttgtatttttagtagagatggtgtttcaccaacatggccaacatggccaggctgtacttgaactcctgagctcaagtgatccgcccgccttggcctcccaaagtgttgggaatacaggcgttgagcccagctgctgaggctttttgctatatcatacatcaaactgacttcaagtgccctgtcctcgccatcgcagccctgtcggtggacatgcaccaggtgggtggagcagccccaggctggctgggccaggagtcacatggtgtggttctgtcaggattcgtgaacccagcagagctgttgggcttatatccactgaggggctagtgctggtctggatccaagaggtggaaggaggaagatgcaacagaaggacctggtttcgtttctgcccagaagatctcctagttttgctggggaggtggcacatctgaattgtacaaggtgattgatttttttcagcttaccatgttagtcaggtactagaatgtgaagtgctgtgctaataagccacaggaggtgcacttcagggtggctgctgcctggagaaggggagttttgagttggttcttgaagatctggtatgtggttgtaagggaaggcactaagggaggggttagcaggtgacataggtctaggacagggagtaagaggacatactttgtctgcagtgtgttgggaaataagggccctaaaatgggttcagtgagctgggccacagagtacaggggggttcctgtggcgtactctcctggggtagctttcccaccagtttagggtgtctgaaagcaaactcttgtctctctaactgtccttcaaatggcttgttcctctcagtagccacaccagcatcctctcaagcacctagacctgaaacggaagaattatcctggtgatttgttaccaagaactggtcagtcgtcctgtagtgcctttcacaggactgtgctgctggcctggatacagctgccttccctctagagttctggtaggagcttcctggccacatgttacctttaggctcttcctgcttccactggcctgcgtgccactttgtcatgaccaagttggtctctgctcagataatctcactgccttccaattatattttatagggcatgcttcatcttctcagaggttttcaaagctgcccacagcccagccctaagcctacctcgcattactctgcaagaagcctctttgctcagagattagaactgcaatgttcatgagaggtcacctactcatccctttcactgaagaagtggggaaaacaaggctcagacagggtgagtaccttgaccaaggccacaaaaattagtgtccatgcaggaattggaaccaaggcccttttcatctcagttcagtggtttttttgtttttgttttgttttgtttttagagatggggtcttgttcggtcacccaggttgcagcctggaactcctgggctcaagcgatcctcctgcctcagtctcttgtgtagctgggattacaggtgtgagccaccacacccagctcctcagttcagttcttttcttcctttattcaaactgttcttctcctttccatgccccatctcacactatcctgccccttctgttcacatcccacctatttctagaaagtttttcttgatttttatgcacttaacaataaacagttatcaaacacttactgtaggctagacactatgccagacactggggtatcagttaacaaagccgatactgtccttatcctcacagagcatacagtatagtgggggagggagaatgtaaacaaagaaaaaagttaatgtatcattacaagttatgctaagtgccaggaaggaaaatctttttttttttttttttgagacggagtctcgctctgtcacccaggctggagtgcagtggcgtgatctgggctcactgcaagctccgcctcctgggttcacgctattctcctgcctcagcctcccgagtagctgggattacaggtgcccgccaccacgcccagctaattttttgtatttatttatttatttttttagtagacacggggtttcaccgtgttagccaggatggtctcgatctcctgacctcgtgatccacccacctccgcctcccaaagtgctgggattacaggcgtgagccacctgcccggccctaggaaggaaaatcttaacagcaaatggttagtgaacacttaaactatgggtcatggcactatgggaaggactttacatgtattcattcatttaatcttcacagaactctgtgaaatagatttcccaaattttacagaggaggaaactgagacttgctaagtgacttgcccaaggtctcacagctagtaagtgtggagtcaggattggattccaggcaatccatactgttagtggctcagatactgcctctgcatcagaaaggagtgctgtgagagagaataatgggaagacctaattctctttgaggagcatggttagggaaggcctaaccatggtgagaatagtgttaacgtcattagggtgagaagaaagagaaataagccgaggatgtctttgattgtgtagtaggggtggaaggtgattttgtcggaatgggaggtgattcctagggggttgtttgatcctgtttcgtgtaggaatagaaggtggagcgctgctagggctgtgataatgaagggcaagataaagtgaaaggtaaagaaccgtgtgagggtgggactatctactgagtagcctcctcagattcattggaccagatctgttccgatgtatgggacggcggatagcaggtttgtaattactgtggcccctcagaaggatatttggcctcatgggaggacatagcccatgaaggctgttgctatagttgtaagtaggaggatgatgccaatgtttcaggtttctaggtaaagaaatgagccgtaatataggcctcggccgatgtgtaggaagaggcagatgaagaatattgaggcgccattggcgtgaaggtagcggatgattcagccataatttacgtctcgggtgatatgggcgatcgatgagaaggcggttgaagcgtctggtgagtagtgtatggctaggaatagtcctgtggtgatttggaggattaggcaggcaccaagaagtgagccgaagtttcatcatgcggagatattggatggggtggggaggtcgataaatgagcggttaattaattttatcaaggggttaattttgcgtattggggtcattagtgttcttgtagttgaaatacaatgatggtttttcatatcattggtcgtggttgtagcccgtgcaagaataatgatgtatgctttatttctgttgagtgtgggtttagtaatggggtttgtggggttttcttctaagccttctcctatttatgggggtttagtattgattgttagtggtgtgattgggtgtgttattattctgaattacgggggaggttacatgggtttaatggtttttttaatttatttggggggaatgatggttgtttttggatatactacagcggtggctattgaggagtatcctgaggcatgggggtcaggggttgaggtcttggtaagtgttttagtggggttggtgatggaagtaggattagtgttatgggtgaaagagtatgatggggtggtggttgtggtaaattttaatagtgtgggaagttgaataatttatgaaggagaagggtcagggctgattcgggaggatcctattggtgcgggggctttgtatgattatgggcgttgattagtagtagttactggttgaacattgtttgttggtgtgtatattgtactagagattgctcgggggaatagattatgtgattaggagtagggttaggatgagtgggaagaagaaagagaggaaataaagtttgattatgcctttttgggttgaggtgatgatggaggcggagatttggtgttgtgagattgttttaggtagtagcttttctagtcaggccaggtctaggaggagtaggggtaggttttggcttgtaagaaggcctagataagggactgtgcggtgtatgatactagggtaaaatccgagtatattagagaagtaaaatgtatacagtggggattttattttgagtttgttggttaggtagttgagatctagggctgttagaagtcctagggaagtgacgcctagggctgtgagttttaagtaaagtgggattgtcatttggggggtggatgtggggagaatgctgttggtgatgagaaaccctgcaaataggcttccgattgttaggcgtttaatggggtttagtagggtggggttgttttcgttaatgttagtgagggctgggaagcgaggctgacctgttagggtgagaagaattattcgagtgctataggcgcttgtcagggaggtggcgatgagagtaatagacagggctcaggcgtttgtgtatgatatgtttgcggtttcgatgatgtggtctttggagtagaaacctgtgaggaagggtattcctgccaatgctaggttgccaatggtgagggaggttgaagtaagaggtatggttttgagtagtcctcctatttttcgaatatcttgttcattgttgaggttgtggatgatggatccggagcatataaatagtatggctttgaagaaggcgtgggtacagatgtgcaggaatgctaggtgtggttggttgatgccgattgtgactattataagtcctagttggcttgaagtggagaaggccacgatttttttgatgtcattttgtgtaagggcgcagactgctgcgaacagagtggtgatagcgcctaggcatagtgtgagagtttggattagtgggttattctctgctagggggtggaagcggatgagtaggaagactcctgctacaactatagtgcttgagtggagtagggctgagacaggggtggggccttctatggctgaggggagtcaggggtgaaggcctaattgagctgatttgcctgctgctgctaggaggaagcctagtagtg

SEQ ID NO: 10707 - DNA, 6000 bp, Homo sapiens
aaaaaggaatatcaagtaatctattatttaaaaattgtaataagagtgttttttgaaggaattcaggaatgtactactaacgagattatgatgcaggtatatccatccatgaagcatttgttagtcccttgaagcatcatggtagtggaatttaacatggatcatctttgtaaacccacctctctttaggggccagagaaatcactgtttgttacaacaagcaaacctttccctctccatgtcacccttgccccaaacctgagaaacatatgggaacatggcacagaggctgagctctctgaagccagttcctggctggttttgctggccagggagaggcaggtgtggtcagttgccctgtggacatgtggtgtgcagggagagaagagggaaaagagccactcaggctctctggctgccaggggatccagactcttagcactagaacttctgtttcttagaattcttcccaaggaaaagacaaaactgtgtttttataagctggtttcctatagtgtagatttgggacttttatacattttattaccaaatatttttagttaagtgcttcaattttcaacattaattctttaaaattttcttttgagaatcatcacctggatttacatgaattttttaagcatgaaaaaatttaaacatattcaaaagtacatgaatagtacattgaagccttatatacatatcacccagatataaaaattaccaagattttgtcccagttgcttcattttccctgtttccttctttgctaaagtatttaaaagcaaatcccagatagcttatcatttcacccctatatccttcagtaagtttctatggaaaatatggccattttcttgtataaaccacagtacctctgttttttttttttgagatagagtctcacactgtcgcccaggctggagtgcaatggcgtgatcttggctcactgcaacctctgcctcccaggttcaggcgattctcctgcctcagccccccgggtagctgggattacaggtgtgcgccaccatgcccagctaatttttttttgtatcttcagtagagatggggtttcaccatgttggccaggctggtctcgagctcctgacctcgtgatcgcccgcttaggcctcccaaagtgctgggattataggcataagccacagcgcccggcccacagtaccatttttatacctaacaaagtgattccttggtacacttaatacctaggcaaaatcaaattgtcctgaaggtcatgaatgtccttggacagtaatctggttctaatcgaggatctatatgaagcccaccaatcgcatctggttgttgtgtctctttagtctgtcagtctggagcaagctcccctcccttcctcagttccccatgttatttatttattgtaaaaactgggtcagttgtgctgtagaatattctgctttctggatttgtttgtttcttcctgtggtgtcatttaacttgttttactataccctaaacggaacccttttcctctgttttcagcagaagtctgagaggctaaacttgatggctgtgttaacatatgtcacgtgtagcacagtggagaaagcaggatatggctcataatgacagtggtgaagacctgcgaatgaagttgctagttatcacctacattagggtttgacataggtctatgttatgggtcgctgcatctgctggaactcacagactttactatagagaatcaaagatcccgtatccgaagtctatggaaatgctcatggtggtaaattccaacagaatgaaacaccaaacttgcttaaagtaactcacgtttcaatttgaaagagatattgtcaaaattggaggcccccaggttcctgtctgttccaaatctttgcatgatgacagtggtttctctgatgtggtaagctttggctttcttctgttttctttctaaaagatcactggagtagagaggagttaaacagacatgacctttgacctcttgcatgacctccacagatagcaaaccgggccgacacatggttgacgatgtccttttctacaatgaagttaatgaaagttctgaaaatagtgattactttctgacattgataggatttaggaaacctctggataaatagcttaagcatggctgtttatgtttttgctatagacaaaaagcagcagcatgtacattgtatttggacacaagcctgcctcggttaatatattgaactattggaccactagggttagtagggagcggtctgtacactttctgattcagcattcagaaacattctaggtggactctgtagctttcagttttgtaaagttatcagaaaaacatcgggagggtttggccatcatatgtgagctttgtgtttcaatgccagttactcaggattagtaaattaatgactgtccagaggacttcagggtcaccaagctgctgcacctgccattggctgactctccccggctatctgtggctgagatggtgctgcttaggtcacgcagagcatgagctgctgctgaaagggcacaggagatggcccttgggcttctcatcccaggatgcctgccctgcccaccaatccatgagaagatatgtatgatttcagtaggccctggatcagcttgtcacctctggtttcctgtttgctttccactcactcagctggagtttcatttccagactaaagtcttcatcattggcttcagaaacagcattcatctgtggctgtgctgatgtagtacaccaagaacaactgggctcttctctgtcactttcagtgggctaccttccctcacctctccaagcagcatgaaagaattctttacatttttaatctcttttttgtttttccctgaaagtatgctttggtgcttaaagagagaagtcacaaaagtatactactgagtttcctggagatgaaatcctgttgtccctagctatgtgaatgagcacagggatccctgatgccattattttgtatattcatacggcacacacttactgagggccttctgtgtgccctaggggattgagcacagtgacatatcagggcaggtagaaacagatggagagctgatgcgggctgtcttagagcagctgccccaggaggcccctgtggatggatgttgggcaggagccctgagacgttaggggcatataactaaaggacatagcaggagttataggaggagctgatccctgagggaaacaatgaagacggagaagatggggctaaagtttgaattgtggggacattaatcacagtgattcttaaaactttgctgttgatgattttaaatggagaaaatgagtacgtaagatgttatttcccagttcagtatattggttgcccacaaagtattttcctaccatgaatggtcatatatacttgttgtagaataccagggacagcagagatggtggggtagttacttccttttcttacagcccaagaactttggtgtccaggagattgaccaatttagccactgagcatttaatacaacacagggctacccagatcccactgtcctgatttgccctgaaagccaaaggagttaggagaaggtgagtggggagaatatattaatcctgagagttgaacagagcaaaaatccctattacttttgtacttaaaacatctctgccacatgtgctcactctttatattctgtttaggtggtttatatgtgcacatcccatcctatgcctgcagttagccaactcagggtttatattgcctcctttctttttttctttttttttttttttttaagagatggggtctcattctatcatgcagactggagtgcagtggtgtgatcacagctcattgtaacctccaacgcctggactaaagtgatcctcctaccttggcctctctggtagctgggactacaggtgcatgccaccacacccacctaattttttttatttttattttttgtagagacagtctcactatcttgctcaggctagtcctgaactcctgggctcaagttatcttgctgcctcagcctcccatgggtaatttttatttcctttttttttttttttggagatggagtttcgctcttgtcgcccaggctggagtgcaatggcacgatcttggctcactgcagtctccacctcctgggttcaagtgattctccatcctcagcctcctgagtagctgagattacaggcaactgccaccatgcgcggctaatttatgtatttttttttagtaagagatggggtttcaccatgttggccagactagtcttaaactcctgacctcaagcgacctgcctgccttggcctcccaaagtgctgggattacaggcatgagccgctatgcctcgtcgctgatttttatttcttattttttttttagagatgggggtctcactatgttgctcaggctgatctcaaactcctggcctcaagtgatcctcccaccttagcctcccaagttgctgggattataagtgtgagccactatccctacctcactattaccttctttgcttctcttgttttcttttgttctaagtcaaacccatcacaatcttttcttgtccttccaggtgttttccagtgctgtgccctggatgtgctctctttctcttagagcccagagaacttgcttttcccccttatatatgacccttaactttttctaacacattattaagggcctgtgtctatcagctgggggcacttcttgaagggagggcctttgtgtggtctgtttctagtgacttccagctttaacccagagcctcatgattgctgggtgcccatagcctttttgctgaatggaggcactcagtctccttgggaagagagaatccatgatagacccacttgggagctccccacttcaggggcctacacactggtaatgcaacagaatgcccaagagtgacctcataaagcaaggattcccttcgtggccccttctctgctgcctctcagaatccagacgctaaggaaaatccctaagcagagattttctgttggatgctaaaagcaaggaataaaagttgaaaatttggaaaatgtctcaacaccgtcaccagcgccactcgagagtcatttctagttcaccagttgacactacatcggtgggattttgcccaacattcaagaaatttaagtaaatattatctatctccattgcctgttaagaaatgtgctagtagaagtgtgagggcagggtgtcagtgttctctcagcctcttccctcagatactcgtctgcttaccaaaataagttgcatgtccttgacaatctggtttctatgattggtgaggctggcatgctattacctttatgtgccctgtagacttgaatgaccagtttgaccagtttgactgttagataatctgaaggcttttctctttttttataatagaccccatctcaaatcagataatgaaaattacatatcttgatatattagaaaagtatatacattctggctgggcacggtggctcacacctgtaatccctgcactttgagaggctggggcggatcacttgaggtcaggagtttgagaccagcctggccaacgtggcgaaaccccatctctactaaaaatacacagattagcccggagtgatggtgtgcacctgttgtcccagctactcaggatgctgaggcaggagaatccctttaacctggggggcgaaggttgcagtgagccaagattgcaccactgcactccagcctgggtgacagaacgagactctgtctcagaaaaaaaaaaaaagaaaaggaaaaagaaaaatatatattctatatttttttaacttatgagaatgtgttcatttcatttgtaacatataatgggaaacagtaatacgtactctgagaaaaattgcaaagcacagataaatggaaataaacaggaaaaagaatcacctataacctcaccatccatagacagacactgttaaaattttggcatatttcctgctgattttttctactgctgatttttgcacaggtg

SEQ ID NO: 10708 - DNA, 6000 bp, Homo sapiens
cctctctagaatgaggttctttgtacccacaatcagtttgtagtctcaccttgaacaggtaaaaggaggccaggagatcagagagagagagagattgtttcctggggcctgttcctgaggcctaaagcaccccaacattataacaaaagactgtaacaaaggctaagggaattacgaggcaggaactgtggatgaaaatcaatatatatattaagtcataatatcacatacggctaataagaatttttagtcccttctataattttcttcaagatactatttttgagtttggacagtaaattgcccctctttgcttgttgatgggtgggatatcacctctgggtctctggtttccggaagcctttggtacccaaggagaagaaggcaggatatggattctggctgaatccaaatttcctttccagtaccaaaatccagtcactgaaatgtattagctttgcttaggtgtgtcttttgtcctcaagcaaaactcttactgatgtgtcatgtatctctgttctatttggcttctcaaaagcatattcactagtctaacattaaagttaagtactatttcaaaaaataaagattcttcacttttcattctaaccctgtgtccagctataaatcatctatttagtctttggcctctgaagtctggagacatatttcctctacagctgatgccatccttctttttattagggacagtgacagactcattttttttttccttttgatcattttgcaaagcttcagtggttaacatacttcaagcccttcctggttcagatatataggtgttcacttcaattgtttcccttttccaaggatcaaaaccttgtgttgccagtttctcaatgtctgaaaccatttttttcataaatttagttgaggaggtaggagaacaagtctgacaccagttaccacctcacagcaagatacattactaagattttcaagtgtcttattcggatatcagagtaatgcaaaatactcaatttatgaaaaaaatagatttttaaaacttatggtctaaaagcagttttaatagaaacagaacgactagtttctttgggagttgaaaattatcatgtgaaatcctctggtccttttcttagtcatagtttttccctaatattctcatagtttttatttttacaagtttattagacttcttaactcaaaattcttcttgtatcaattttggtgatttgtgtttccttggaagtagtatccatttcacctggatttaatttgttagttcacaaagacttactattttaatttactctttaattatgatttcttcccctttcttagtcataattacttgacttttttttcctctgccatttcctcttctctattagactgtttatttacctattttattatagtcaaaccaatccccaacaggggaaaaaaatcatgtgatgtatttttttaaatttagagttccaggatacatgtgcaggatgttcaggtttgttgcataggtaaacatgcgccatggtgctttgctgcatctatcagcccacatgtgatgtagttttaaaattaattctactgtttctttgctttccatttttcccaattttttgtttgtatatttcttaattcattctttctgatgtttttctctaacttcttggttgattctttttctttttaattgaggtacaatttacaatgaagtgcacacaatttaaatgtacagttcaatgaatttgtacagtcttagttcttggtggctaagttctggcttcaatcattttgaggcttagctgtaagtcaaggctttgtgctctataatagtgcttctcaagttttttttttgtttttttttgtttttttttgagacagggtctctctctgtcacccaagtagctgggactgcaggcatacaccaaccacgcctggctaagttttgtatttttattagagagggggtttcaccatgttgcccagactggtctgggcacttcaagtgatctacctgccttggcctcccaaaattctgggattacaggcgtaagtcaccacgcctggcctcaatatttaatgtgcataaaaccatccagatgtcgtttaaaaatgtagattctgattcagtaggttggggcctgagattctgcaattctgttaagcgcccaggtgataccaatgctgctggtctgtggccccgactttcagtatcaaatttttataagacatttctatatccttttaacacattttttttagcttaattcaggttgagtttcttctattagcaaataaatagctctctgttaagatacactatacccacagtccttggtacaggtagcaaacaactaataaatatttgttgaattaaattaaggctatgaattttcctgaattgaaatttgttctgttctctggctttgatatatagtgttttgatttttattattaatattaatattttaaaatatttttattaatattcttcagcatgtaatgtttgatttttctcttaaaccaatgtgtttggggacagatttttagaaattttcaagtagttggggatatttgtgagcgtgtttttgctttgcttacttctagatttattgcccaggttagaaattgtggatatattatttctgtgttttggaatttttaatgtttttcttcttgaaaattctttctttagatgtgttactatattcagtcagattatagtcaggacttggcagggcagttgttttgtctctttaggttaagtttccatttagctgatcaaattcattatatgcctcttttatatttgaattctagatggagaccttattttcccattttcaaactatttgtaggggagatctatctgttgtgttacatactacagttctctcatgtgtataatgaaaatagtaatagtacatgcctattttcaggcattgctgtaaaatgtaaaatgcttagcactgtgtttggaccatactaaaccctcaaaaatagctccagatgatgtatttgtatatgtatttctgaatctgaagctttgctgttagtagcattccactttgatagagtggcttccaattacccaaacttcattctaaccaagaaaaatggcaacagatgaagaacaaaagcaaaagaaacaaaaacctcccagaaactggctggaagataagaaatcccatgggggcataagtgtgatgtaatgactcccgccgtccaaaaaaaaaaagccaagttaattttgttttaaacatgttttacaccatcctgcaagagaatatatagactgttgagcaaagtatccagaactgaatcctaataatgacagatacaacttttttacttttttgaaatagatacgtggatttattcctctccaccattaaacctgtgtaaaccctcacagtaggaattaggcctttcatttatggtcccagtggtcttcacaggtgccttgacaaagagctaccaagcaccatctgaattttatggagactaagagcccagtttcagagtccagcagacctcagccaaattccagtttctccactcagtaattaagcaacctgccttaagatttatgtctggggctcctcgcctgtaaaacacacctaccttagggggctgttaagaggattcaatgtaattgaattaagtaggtacaacttaattacaaagcacttttccccaaccatttcaaattatttatctacgtattcatccatccatccaaagcacctcaataattggccaataattcctaagtgaaaggagctttacaacacacgaagaactcttctattatgtcacacgaaattataaatataaatataaaacaaattattttacatataaacgatggaggtaaaaaataaatcggccaataataactagcaagtagtatttggtaattcttttggtgaggccgacttaaaaatttacgaaatattatttattttcattgcaagtctatcagaaatcactaatggtgtagcactgcattcttccctgcttttggttctcaaactacgtatcttagtaaacgcaatttgcagacaaaccaagcctcgctaatcagtgcatcatggctactctggtaaaggaagaaattcactgtttgccaagcatcccatcagatgggtgacttcacagccactggaagaaatctttctcatgttcgagtagatggaaactccaaaactgtgcagttgctaaatccacttgtcacacctcctccttttctctgcttctaaggttgccctctaaactctttatctgaggatggaaacacacacacgcacccacacacacccacacccacacacacacaaacgtatttggctaaaggtcaattcacatagtggcagggactttcgtttatatgcattttccttcccagctctctcagttctgagtcaggctaagcaggaggcagagagctcgtcctcctctgcatgggcgctttttcttatttgacttttagtcctgggaggagtagcgtagttgcgagatactaggatatccacaagcgggatgaatttggaccttatccctcactgtgatccttcacttcgccttctgtttcaatttctcccagtcggtttactgcttgacaaaattctttcacaattaagtgatcacaggacaacccaacccaaccaatccaaacctgcaggcaaccccagacatccagggaaccctggcgcggctcgggccagcccacacccacgcggaatcattccatttatcggccaccaatcagccctccacacgctcccgcgccagccaatccgaacaagcgcacgttgttccggccacctcctctcagccccccctccccggagcccccgggatcgggccagggggcggggctgggggctcggcccgccttgccctgaggcgctgggtgccttccagttggctgcgaccagcggtgacttacaagttggctgctgtcgcctgcgcatcggcgggccgggaggctgagcagtactgttgagagcggtgtgaggtgcttggtagcgcgccgtagctgcttccacgtccttgcttcacctcaggtaaaggtaaggagagccacggagccgcggcaggattggggtggcccgtgtggagggcgactgtggcgcccggggcgtcctgccaggtgcgtcttctggacctgctccagaccatggatctggggagctcgcggtggacgttggggatggcgggccccggcgtccgggcgggagaggacctcacagatgaaagagaaacctgagcccctgggaggggaagcggcgagctggaaggatcccagggcttgcaactcgcccctgcgcgccgctcacctatttaagtacttggaatccattagacctcagtgtcctcagctgttaaatgggagaggggcggtggtaatcccgcttgatttgggacagtcctgttctttggaggtcaccgcgcttcctggttcttaggaggtgcacagacagcgcaggggcagccgcgtcccaccaggcttcgcggaggtgatgccaaagacaagagacaaagttttcccagggcttactgccttccaaggtccctgctaaatgtattaactcaaataatttctcaccaaatcagtgtcattgttttcccgaatttacacttgagaaagattaccttagatttttaggttcagcagccaggacaaaacttgacaaatatttggtgggcccaggttttttatatgaagtcttttccagcctgtgatcagcttccacagttttacaagagagagctttaggctctgaagtcagacgccctgggttggaattctggctccatcacttatgaactgtgtgatcttggacaagtgactcaaccttcctgttgctattttccctttctgtaaaacagggaaaatgtatagacattaagctactattctcacttatggaagacctcaagatatctaaagtatgcccatttacaccaatcctagagcttctgaataactaaaattcctttaccataatg

SEQ ID NO: 10709 - DNA, 6000 bp, Homo sapiens
tttttgttttccatttggttggtagatcttcctccatccctttattttgagcctatgtgtgtctctgcatgtgggatgggtatcctgaatacagcacactgacgggtcttgactctttatccaatttgctaatctgtgtcttttaattggagaatttagcccatttacatttgatgttaatattgttatgtgtgaatttgttcttgtcattatgattttacctggttattttgatcgttagttgttgcagtttctttctagcattgatagtctttacaatttggtatgtttttgcagtggctggtatcagttgttcctttccatgtttagtgcttccttcaggagctcttataaggcagtcctggtggtgacaaaatctctcagcgtttgcttgtttgtaaaggattttctttctccttcacttatgaagcttagtttggctggatatgaaattctgggttgaaaattcttttctttaagaatgttgaatattggccctcatctcttctggcttgtagagtttctggcgagagatccactgttagtctgatgggcttccctttgcgggtaacccgacctttctctctggctgcccaaaacattttttccttcatttcaaccttggtgagtctgacaattaagtgtcttggagctgctcttctcgaggagtatctttgtagcattctctgtatttcccaaatttgaatgttggtatgccttgctaggttggggaagttctcctgcataatatcctgcagagcgttttccaacttggttcctttttcccccttcactttcatgtacaccaatcaaatgtagatttggtcttttcacatagtcccatgtttcttggaggctttgttcgtttctttttactctttttcctctaaacttctcttgtcacttcatttcattaacttgatcttcaatcactgataccctttcttccacttgatagaatcagctactgtagcttgagcatacgtcacgtagttcttgtgccatggttttcagctccatcaggtcattttaggtcttctctatgctgtttattctagttagccttttgtctaatcttttttcactgtttttagcttctttgtgatgggtttgaacatcttcctttagctcagacaagttttttattaccaatcatctgaagccttcttctctcaactcgtcaaagtcattccccgtccagctttgttccattgctggtgagtagctgcgttcctttggaggagaagaggcgctctgatttttagaattttcagcttttctgctctggttccccccatctttgtggttttatctaccttcggtctttgatgatggtgatgtacagatggggttttggtgtggatgtcctttccgtttgttagtattccttctaacagtcaggaccctcagctgcaggtctgttggagtttgctggaggtccactccagaccctgtttgcctgagtatcaccagcagaggctgctgaacagaaaatattgcagaatggccattgttgctgcctgatccttccctggaaacttcatctcagaggtgcacccggctggatgaggtgtcagtcggcccctactgggagttgcctcccagttaggctactcggggtcagggacccatttgaggaggcagtctgtccattctcagatctcaaactctgtgctggtagaaccactactctcttcaaagctgtcagaaggggacatttaagtctgcagaagtgtctgctgccttttgttcagctatgccctgcccccaggggtggagtctacagaggcaggcaggcctggttgaactgaggtgggctccatctagtttgagcttcctggccactttgtttacctattcaagcctcagcaatggaggatgcccctcccccagcctcgctgctgccttgcagttggatctcagactgctgtgttatcagtaagcgaggctccgtgcacgcctcttatttttaatgttcggtttgcttcatgagtccttgtgtcgaatactattctgggcaatgattattcattaatacaaataaacattagattataggaagagtaagcttcccatgataaccgaagttattatcagatcctaaaagcaataattaaaaaccctgttcccaggtagaattgtaaagtggatgactcctgcatccagcattctcccattcatttttagagccatccaactccctcagtcacttcactgccattccctttcccaagccccggctgccgtctagatagtcagagcttcttggcccattgcaagcactcatcatgatgtttagccaccaacccagcattgtttggcatctttctaaatttcttggttttcactcaaacctcccataatccaaatgatgactgctatagaattccatcagaagacttatgaagacaagtgatttgacagcaaagagtcagaattcttaggttacagtggcaaaatcctgtaggctccatgtctgtcatatattgctatttgttcagtcttactttgatctactcactaaacaattcatcctctatagaactgagggtgcaaaggtggttggtagtgggttaaagaggaaagtcaaatcagaaatgaagaagaggttgaagagaccacatgtagattaaaaataaacttttttggggcattgattttcatttagtcacaatatttttattttcaaataacattaaagaaaaacaaacagtctttatgttttttaaaggagaagcagagaaatattacactattcctagtcaaaagtaatgttagcaggaatgtctagactatttctatgtgtttatttctctttattttagttaaatgatagatttactcacttgcaactaactcttgctatatttctcccatttcaaaattcttaaactattgtagctaaaaattgtatctattttacttagctgcctttggtagcatttgaaagtgaatgcaaaatttctggacaaaatagaaacaggtacatgggctaatataggaatatacacaatactgttaactgtcccaagatttttcattgattatgtcttccatggtgagatttcaggcataaaattggtttgggttagtacaaagtctggcccaacatatgcttacttgtagttcttcctaataagtcaaacaagctcacatttatggtgctgaatatattctagattcattgtatctgtagttgctaaaaatttagttccatgccttaggatggtattagaatgtccatgataagaaaaataagtgcagcaaaataaaagaaatgccacgcctatctttctgtattattttttccactggagaaggacagattttactcattaaaactacaaaagtctgagaccaactgctccatattcttttgtgttcgttaaatgttgttatttggaggtgacttaattagactaaagctagaagagaaaacaatagaatgtcaaagatgcttttcaagttgtaaactaatgttttaagttataaactacttgatactattttcttaattaaaaagatatttctgaatcgaaaagatcaaagcttctgagtaaatttagaaagcatttttttgtcatttacagaaaagggctttaagagcctatgttcctttggctttaagagctcttcactgtgacttcaaagtaatcattttcagattaataaactggagctcgtctttggaattatcagtttttcttttattacagaatctgaggttagccagaatccatctgcagaacatgaggcagaagggagaaacacctaacaaggtgaggccttccttaactattttaacacaagcaattaaccatttatactcacttaaaagcagacagctgggatgatggtgtctgctaaaaaaaaaaagtgtaatgaaatgttctttagttttttgatctttagtaaaatttcatcttcgtataaaattttattaaccattccactaacttgttacttctccactccacctccccactccctttagaatccttagtttgaagacataattctttaaatgatctgtctcagggaggggggatcttgttacttttaaggactgcaaatagcattataaactttgtttttatttttaaatacgaatatcgactgaagctctcaaatcaatcaatattgttgccaaattttgtaaaacgcactgtcttagctctctaacgatagagttctaatataaatgtaaaaaccaacctatcaacatgttttcaaaaatactttttgtaaagaacagtacaattttgtggtgtccaaatattcctttctttcttacaaaatattattggatctgtccagttcataaatattcctgccctctcttcctccctccctgcctctctctccctgcagtttttttgatgtttgttcttttctttccattttctagttattaattggttcaatggatgacctttgtgcgacactgttataccttatcagcctcgccagggcccccgcgccgcccaatcccagcaactctggttctcctgtgaccccaagccttccagatccctgggtttccccccacgggactgtcacattcttccccgccggagacgccagtcgcggggcctcctccctggggtgtgagcaggtcggcgcgccacacttctctaggtggccggacgcgcgcccagggaggagctggcggcggggcccaggctgttccggctgcggcacgccaggggatgtggttagccctgagcctggaggccgaaggtgggcaggcaacactcccaccatgtttcggaggagaatacactaggctagcctaacgacactcggagtgcgagctgcggctggggtaggggcacccctttccagcgggcgcgtgggtcaccaaggagcagttctccgggacccgttgcgtcagagggactgggcggggctgggcggggcaggacgggggcggcgctcaggaaccctggaacccgctggccctgaggccacggaccgagacgtggtgctgagcccctgcgcggtttctggtgcgtagagactgtaaatcgctgcgcttctcagtcatcatcatcccagcttttcccggctcgaattcagcctccaactcaagctcgcgggaaagactacctgagaggagaaaagcttctgtccctggaccttcttctgagggtggtgaggtttgtttagggtcgcagaagcagggaggactgactcagccctcacagagaagaggtctggaaagtcctggggaactcgcagggcacgggccgctgtcgcggttgggaggcgagggcgcagcgctggggttgtagattccaagacccctgagggtggctgtgttggtttctcgcaggagtcggaggctccctgctttccagccgcccagtgacccaagcttaatcttcagcaccacttggggcgaccttttcggtgcaaacctacgattctgtttctcaggattcctccccatcccgcttcgccccggaaaagctgacaagaacttcaggtgtaagccctgagtagtgaggatctgcggtctccgtggagagctgtgcctggaagagaaggacgctggtgggggctgagatcagagctgtcttctggcccagttgcccccatgcttctgtcatggctaacagttctaggggctggaatggtcgtcctgcacttcttgcagaaactcctgttcccttacttttgggatgacttctggttcgtgttgaaggtggtgctcattataattcggctgaagaagtatgaaaagagaggggagctggtgactgtgctggataaattcttgagtcatgccaaaagacaacctcggaaacctttcatcatctatgagggagacatctacacctatcaggatgtagacaaaaggagcagcagagtggcccatgtcttcctgaaccattcctctctgaaaaagggggacacggtggctctgctgatgagcaatgagccggacttcgttcacgtgtggttcggcctcgccaagctgggctgcgtggtggcctt

SEQ ID NO: 10710 - DNA, 6000 bp, Homo sapiens
actatgtggtcaatattggaataagtgtgatgtggtgctgagaagaatgtatattctgttgatttggggtggagagttctgtagatgtctattaggtccacttggtgcagagcagagttcaattcctggatatccttgttaactttctgtctcattgatctgcctaatgttgacagtggggtgttaaagtctgccattattattgtgtgggagtctaagtctctttgtaggtctctaaggacttgctttatgaatctgggtgctcctgtattgggtgatatatatttaggatactgagctcttcttgttgaattgatgccttcaccattatgtagtagccttcttttctcttttgatctttgttggtttaaagtctactttatccgagactaggattgcaacccctccttttttttgttttccatttggttggtagatcttcctccatccctttattttgagcctatgtgtgtctctgcatgtgggatgggtatcctgaatacagcacactgacgggtcttgactctttatccaatttgctaatctgtgtcttttaattggagaatttagcccatttacatttgatgttaatattgttatgtgtgaatttgttcttgtcattatgattttacctggttattttgatcgttagttgttgcagtttctttctagcattgatagtctttacaatttggtatgtttttgcagtggctggtatcagttgttcctttccatgtttagtgcttccttcaggagctcttataaggcagtcctggtggtgacaaaatctctcagcgtttgcttgtttgtaaaggattttctttctccttcacttatgaagcttagtttggctggatatgaaattctgggttgaaaattcttttctttaagaatgttgaatattggccctcatctcttctggcttgtagagtttctggcgagagatccactgttagtctgatgggcttccctttgcgggtaacccgacctttctctctggctgcccaaaacattttttccttcatttcaaccttggtgagtctgacaattaagtgtcttggagctgctcttctcgaggagtatctttgtagcattctctgtatttcccaaatttgaatgttggtatgccttgctaggttggggaagttctcctgcataatatcctgcagagcgttttccaacttggttcctttttcccccttcactttcatgtacaccaatcaaatgtagatttggtcttttcacatagtcccatgtttcttggaggctttgttcgtttctttttactctttttcctctaaacttctcttgtcacttcatttcattaacttgatcttcaatcactgataccctttcttccacttgatagaatcagctactgtagcttgagcatacgtcacgtagttcttgtgccatggttttcagctccatcaggtcattttaggtcttctctatgctgtttattctagttagccttttgtctaatcttttttcactgtttttagcttctttgtgatgggtttgaacatcttcctttagctcagacaagttttttattaccaatcatctgaagccttcttctctcaactcgtcaaagtcattccccgtccagctttgttccattgctggtgagtagctgcgttcctttggaggagaagaggcgctctgatttttagaattttcagcttttctgctctggttccccccatctttgtggttttatctaccttcggtctttgatgatggtgatgtacagatggggttttggtgtggatgtcctttccgtttgttagtattccttctaacagtcaggaccctcagctgcaggtctgttggagtttgctggaggtccactccagaccctgtttgcctgagtatcaccagcagaggctgctgaacagaaaatattgcagaatggccattgttgctgcctgatccttccctggaaacttcatctcagaggtgcacccggctggatgaggtgtcagtcggcccctactgggagttgcctcccagttaggctactcggggtcagggacccatttgaggaggcagtctgtccattctcagatctcaaactctgtgctggtagaaccactactctcttcaaagctgtcagaaggggacatttaagtctgcagaagtgtctgctgccttttgttcagctatgccctgcccccaggggtggagtctacagaggcaggcaggcctggttgaactgaggtgggctccatctagtttgagcttcctggccactttgtttacctattcaagcctcagcaatggaggatgcccctcccccagcctcgctgctgccttgcagttggatctcagactgctgtgttatcagtaagcgaggctccgtgcacgcctcttatttttaatgttcggtttgcttcatgagtccttgtgtcgaatactattctgggcaatgattattcattaatacaaataaacattagattataggaagagtaagcttcccatgataaccgaagttattatcagatcctaaaagcaataattaaaaaccctgttcccaggtagaattgtaaagtggatgactcctgcatccagcattctcccattcatttttagagccatccaactccctcagtcacttcactgccattccctttcccaagccccggctgccgtctagatagtcagagcttcttggcccattgcaagcactcatcatgatgtttagccaccaacccagcattgtttggcatctttctaaatttcttggttttcactcaaacctcccataatccaaatgatgactgctatagaattccatcagaagacttatgaagacaagtgatttgacagcaaagagtcagaattcttaggttacagtggcaaaatcctgtaggctccatgtctgtcatatattgctatttgttcagtcttactttgatctactcactaaacaattcatcctctatagaactgagggtgcaaaggtggttggtagtgggttaaagaggaaagtcaaatcagaaatgaagaagaggttgaagagaccacatgtagattaaaaataaacttttttggggcattgattttcatttagtcacaatatttttattttcaaataacattaaagaaaaacaaacagtctttatgttttttaaaggagaagcagagaaatattacactattcctagtcaaaagtaatgttagcaggaatgtctagactatttctatgtgtttatttctctttattttagttaaatgatagatttactcacttgcaactaactcttgctatatttctcccatttcaaaattcttaaactattgtagctaaaaattgtatctattttacttagctgcctttggtagcatttgaaagtgaatgcaaaatttctggacaaaatagaaacaggtacatgggctaatataggaatatacacaatactgttaactgtcccaagatttttcattgattatgtcttccatggtgagatttcaggcataaaattggtttgggttagtacaaagtctggcccaacatatgcttacttgtagttcttcctaataagtcaaacaagctcacatttatggtgctgaatatattctagattcattgtatctgtagttgctaaaaatttagttccatgccttaggatggtattagaatgtccatgataagaaaaataagtgcagcaaaataaaagaaatgccacgcctatctttctgtattattttttccactggagaaggacagattttactcattaaaactacaaaagtctgagaccaactgctccatattcttttgtgttcgttaaatgttgttatttggaggtgacttaattagactaaagctagaagagaaaacaatagaatgtcaaagatgcttttcaagttgtaaactaatgttttaagttataaactacttgatactattttcttaattaaaaagatatttctgaatcgaaaagatcaaagcttctgagtaaatttagaaagcatttttttgtcatttacagaaaagggctttaagagcctatgttcctttggctttaagagctcttcactgtgacttcaaagtaatcattttcagattaataaactggagctcgtctttggaattatcagtttttcttttattacagaatctgaggttagccagaatccatctgcagaacatgaggcagaagggagaaacacctaacaaggtgaggccttccttaactattttaacacaagcaattaaccatttatactcacttaaaagcagacagctgggatgatggtgtctgctaaaaaaaaaaagtgtaatgaaatgttctttagttttttgatctttagtaaaatttcatcttcgtataaaattttattaaccattccactaacttgttacttctccactccacctccccactccctttagaatccttagtttgaagacataattctttaaatgatctgtctcagggaggggggatcttgttacttttaaggactgcaaatagcattataaactttgtttttatttttaaatacgaatatcgactgaagctctcaaatcaatcaatattgttgccaaattttgtaaaacgcactgtcttagctctctaacgatagagttctaatataaatgtaaaaaccaacctatcaacatgttttcaaaaatactttttgtaaagaacagtacaattttgtggtgtccaaatattcctttctttcttacaaaatattattggatctgtccagttcataaatattcctgccctctcttcctccctccctgcctctctctccctgcagtttttttgatgtttgttcttttctttccattttctagttattaattggttcaatggatgacctttgtgcgacactgttataccttatcagcctcgccagggcccccgcgccgcccaatcccagcaactctggttctcctgtgaccccaagccttccagatccctgggtttccccccacgggactgtcacattcttccccgccggagacgccagtcgcggggcctcctccctggggtgtgagcaggtcggcgcgccacacttctctaggtggccggacgcgcgcccagggaggagctggcggcggggcccaggctgttccggctgcggcacgccaggggatgtggttagccctgagcctggaggccgaaggtgggcaggcaacactcccaccatgtttcggaggagaatacactaggctagcctaacgacactcggagtgcgagctgcggctggggtaggggcacccctttccagcgggcgcgtgggtcaccaaggagcagttctccgggacccgttgcgtcagagggactgggcggggctgggcggggcaggacgggggcggcgctcaggaaccctggaacccgctggccctgaggccacggaccgagacgtggtgctgagcccctgcgcggtttctggtgcgtagagactgtaaatcgctgcgcttctcagtcatcatcatcccagcttttcccggctcgaattcagcctccaactcaagctcgcgggaaagactacctgagaggagaaaagcttctgtccctggaccttcttctgagggtggtgaggtttgtttagggtcgcagaagcagggaggactgactcagccctcacagagaagaggtctggaaagtcctggggaactcgcagggcacgggccgctgtcgcggttgggaggcgagggcgcagcgctggggttgtagattccaagacccctgagggtggctgtgttggtttctcgcaggagtcggaggctccctgctttccagccgcccagtgacccaagcttaatcttcagcaccacttggggcgaccttttcggtgcaaacctacgattctgtttctcaggattcctccccatcccgcttcgccccggaaaagctgacaagaacttcaggtgtaagccctgagtagtgaggatctgcggtctccgtggagagctgtgcctggaagagaaggacgctggtgggggctgagatcagagctgtcttctggccc

SEQ ID NO: 10711 - DNA, 6000 bp, Homo sapiens; identical to SEQ ID NO: 2389

SEQ ID NO: 10712 - DNA, 6000 bp, Homo sapiens
ccctctaggaagttccaacagcaagggacttcagcctctggtgataaatctgagatgttaaaaagttggtgggagtgaggctgggtggacacgggcaagggcatcctcagattgcctgtggtgtctgtgtcacgtcagcatcctctctgggccacgtgccaccaccttattctctctcccatggtcaggaccctctgtccaagtcaaattcaaataagcacttcctcccacccaccttctaacttcttgtgttcctctcctaagaaggtcaacacattctcgtctgtaaagtccctgctttccattctccccgtccctaagcatcaactccccagacccttcccccagccccacacacagaagttgcaactcccaagtctcttctaaggaattgtgcatttctctcgcctctagaattagcggtgaaggaaggcagttatctgcccacatgattctgctgtgggtcagatggaaagggagggagctgggagtctggacgtgatgggtggggtggggaggagattcaggcgatgccctgggctgcagtttgctgctcccacatccactctcacaatctgacacagcctccctgcaggtactgctttcttgtccacaggctccactggttgtgcagtaaaggttcctatcccttggccggacgtggttgctcacacctgtaatcctagcactttgggaggtcgaggcaggcggattgcctgagctcaggagtttgagaccagcctgggcaacaaggtgaaactccatctctactaaaaatacaaaaaattagctgggcgtggcggcatgtgcctgtagtcccagctactcgggaggctgaggcaggagaattgcttggacctgggagggggaggttgcactgagtagagagggcaccactgcactccagcctgggtgacagagtgagactccatctccaaaaacaaaaacaaagaaaaatcattcctattccatgagccctgtttctgtgtaggagcagaatgttgtctttttttttcttttttttgagagggagtcttgctgtgtcacccaggctggagtgcagtggtgccatctcggctcgctgcaacctccgcctcccaggttcaagcaattctgtctcagccttcccagtagctgggactataggcactcatgccaccacgcctggctaatttttgtatttctcgtaaaggcaaggtttcaccatatgggtcagaccagtctcgaactcctgacctcagattatccactcaccttggcctcccaaagtgttgggattgacccacaacgtgactcacaggcatgacccactgtgcccagcccctagaatgttgtttttattctgctcagaggttgtttaccttttcccaaatcttgagctatgcatcacaaagcctaagaaggcctctgtaacctcgttcctcgttcgtacctgcggagttctccacctggttgggggagggagacagacatgggcgagggtatccccaccactgcttcaaatcactatgccctactggatccccaccctctgctctgcttcatgcttgaagccaacagacagatgctgtacacccagctgctgcccctggcctccatggtcatggcagccacgctgtcgggggctgtacccagaggctgctttcatggccgccccattttggaggtgaggggcctgcggctgagcctgcacagggtcacagtggtccttctggtctcctgagtctctcttgggggctaactagcccggtctctggagcttcaggaacccgccagccagagacaggagatgtgaaactcgtgagtgttgggaaatcagcaaggcctggggaagaggaaagcctccaggcctgaagcaacatgcttccccttgcaccagctgccctttctgaggaatgggcctgtggttctgtggggagggggcaccaagtgcccgcctcatgcagagtgctgcatcctttactgagcttgttcagattgacaacctctctttctcctcaccagaggccacagagaagaaactgcgcaggctctggagacagactgggtttgaatcccaagtctaccttaggcagtttctgtaacatctcagagcctcaaggtggcaaatggccaaggacaggggctctggactcagatcaactttggaagagtcctggattcactccctacttgctgggttcagggggcaagtagttcacctcttggagcctcaattttctcttctgtagagtaggagcaacaatagtgccaacaattaagacagtcagtaagaagttcttagcttgtgctctctggaccataggaagagctcaaggcatcgtgtctctttatgtttctcaaagtcaccattattgtcatccaggtttcttagctgctttgtctgtcttctaaatgagctccatggatcctccatcttggccacattaattggataattctttctaaaggagcctaatatttagtgataccttcattacaactgcttttttgtagatttttcttatcctgagtggggtgaacatcattaagaaaattaggccagtcttggtggcttacacctataatcccagcgctttgtaatgccaagatgggagggtcgcttgagaccaagagttcaagaacagcctggaaaacaaagcaagactccatctccacaaaagagtaaaaataaaaaaattagccgagcatggtggtgcatgcctgtactcccagccacttgggaggctgaggtgagaggatcacttgatcccaggagttcgaggctatagtaagctataattgtgccactgcgttccaggctgggcaatagagggaggccccatctctaaacataaaacaaaagcaaataaaaaggagaaattaaaataaaataaagtaaaattgcttctacttttaaggatgatctggaatgttccttttcataggtggcatgtgttttgagagatagcgagagagagattgattgatccacgtcaggaatgccctcccttttactccatcctccacggccctgcttaaatcccagttaattccatgacatcttctgtgcttactctacttcaaagtgatttctctctctctttctcttcaaatggctttttattgttcactgctatgctagtgatttgaaagaccaggtgacctctcacccgtgatggagcttttgtacagcagagctgtgctttatacagaatgatcagctacaaagagctcttaggtgcggcccaggcacaatggctcacgcctgtaatcccaacactttggaaggcctaggcgggcagatcacctgaggttgggagttccaggccagcctggccaacagggataaaccccgtctttactaaaaatacaaaattagctgggcgtggtggtgcatgcctgtaatcccagctactcgggaggctgaggaaagagaatcgcttgaacctgggaggcagcggaggttgcagtgagccgagatggcaccattgcactccagcccgggcaacaagagcgaaactccgtctcaataaaaaaaaaaaaaaaaaaagaaagaaagaaagaaagagagaaaagaaaagagttcttaggtgtgaggccctgcaaggagcaaatggcctgggctaccttcactgatgccctcagcaccttctaaggtgaggctaacaccagctcacattgatgagctagtgctgggcctggagcaaaatgtgtatttcatttaagctgcccaccagcttgtgaggcaggtgcattaccgtgacggcggggctcctcagagtgtgtataagaagaaaactgtgcatggccaaagctatgcttgaaaaccctcaggaaggcaccacctcaaggaccaacatagcatcacttagtaaaggcaacagccttggaacagatgactcgtgtgtgtgtgtgtgtgtgtgtgtgtgtgtgtgtggcattagatgaagtagtaacttgtgtttagaggttgccttattgcacaaatatagttgcttttatacactggactcaccctctgccaataagttgttcagttatgagaaatgaacaatgtctgaaactaagaaaacagcaaattctcacctcctatctccagggaatgtgctctttggctagaatatatggcagaatcaatagtgaataaaatatattgtggaaacaatagtgaatggaatatatgacactaccaatagcaattgttaagttttttttctttttaatttttctttttaggtttgtctagttgaatgcatctaagttttatgtgcatatgaagaatcactgttttcctattatacagatttggaaactgagattcccagcttttaactccttgcctaaggttgcatagcacagaaatagtcatatcagaaactgagccctgtctgcacagtgtagcaccttgttcagccctgggtgcctgactcactcactccttgaggaccctctcatgacaactgtaaagaggcagctgaaagaatcccagtctttgatggtgggaggggaaagtggttggaaagcattaaaaaaacatgctccagcagttcactgatgtgggaaattgtctgtatttcaggtcaaccgtcaggatagattttggtctgcaaagccccagctgagcaagaatgcagtgtagacatatgggtgcccagagtttaaaggaaaattactcagactcacattggagtttaagaccccttcattgcctctcctactgggttggggtgactggagccagtggggaattaccaaccctgtggctctctctgcatctcaagcctccagagctgggcttccttgtttacttatttagagcccagcagaggaagtggtaaaggaaactagctgagtcgttttctgagaagagaccatatttgttcgcagaggaagccgttgctttctgggatctggctacgccagaaaagacatcggctccaacaggggtgttccacagggtagctgggagttggaagagccaagaacgcctccgagctctggatttgagcttctctgcccatgggtgaagcgcccatgctcagcttgtgagcttcttcccgggagagcagccatggcactgaggaatgtgccctttcgctcagaggtcctgggctgggaccccgacagccttgctgactatttcaagaaggtaagccttgctcttgtgtgaatggtcatgatgctagtgcccttggtgggctgagctgaggcttgacgatggaattggggcagaatgtgggaggtgtataagatagcaatggaaccctatggcaactttactggttgagtgagcgccatatagaccgctgagttttcctgaccatgagttccggagagaaggatgggagcagaagccctcaaatgagtatgtgcctattatgtgctagggtttgaattcggtgtctcacaggcactgtcccatttagcgctccctactatgttgtgaggtcagcattgttatccccttgactcagctgcaaaatcagctcagggaagtgaaatggtccgaagccctagggactacatgtgatagaggcaagactcaagccacacctatctggttttaaagtccatgctctgagatgcagagaactgttgtaactgctaatgagatcaacgctacttactagaaaggggagacgtggtgtcctggaggcaggagaaagaataggcagggtgggagggctggatagaggactatgatgagcagtgccagacacagcatttgggctttcactgctcacgaccctaaggggggtcctcaagctcccgcctggggcagtctccttggagccttatgagagtcttgtgaagcaggacagaaaactgatgtgagccccaatttatagctatgaaaactgaggcccctagaggaaaagaggcttgtggcggtgctgggaccagagcgttgctgtcttatcttctggacttagaggaaaggttgaaggatccctgtgcttggtcattggcagaaggggacaacgcatctgcttgggcagatctcaagccacatgactt

SEQ ID NO: 10713 - DNA, 6000 bp, Homo sapiens; identical to SEQ ID NO: 2388

SEQ ID NO: 10714 - DNA, 6000 bp, Homo sapiens
gggtcccagcagtccaagattacatcaaactaaactcactgcttaagattattggatcactagggtatgaatttggggtacagtctatgccagggctgattcatggccataacttttctggaacttttaaaaaataaggctcagataagtttcctaaaagtctccaggagaagtcagatttacttggttcaccattcccctgagagagcagctgtgtgggtcttgggcgaggctcctggtggaaggtctcttaacagatgccttcccttgggcaggctctgggctttgacagtcgtcctttttgctgctagaaactgtcaaatagaagttcaagtttgcctggttcagcaaaacaaaagcagccttcatgttccatttactttttggtattctctcttgtccttagattttggcctggtaggccaggcatggtggctcatgcctgtaatccagcactttgggaggctgaggcggacggatcactggaggtcaggagtttgagaccagcttggccaacatggtgaaaccctgtctccacaaaaattcaaagattagtcaggagtggtggcacatgcctgtaatcccagccactcaggaggctgaggcgggagaattgcttgaacccagaaggcagaagttgcagtgagcagagatcacaccactccagccttggcagcagagtgagggagactctgtctcaaaaaaaaaaaaaaaaaaatttttggcctggtagttaccttactatttttgtcaggcgttcagtgcttttaggaatctgttttctatattttatatagaatttccaattgttggtctaaaaaacccagtctgccatagtcttagaaagggaagcgaacatcaccacttttctcagtactttaaatgagaggttcttttaacctaggattcatgcatggagttcaaggcatctatatacccccctgaaatttcatgcaatgttttgtgtttaaccaattttttctgggaacaaaatccatagatgttatcagattgttaaaggtgccagtgatagagacaccctcaaatttgataactattgctttagagttctatcagtacctagtaattttaattaaaaaatgattttagaatgatttcaaactcacagaaaagttccaagtagagtgcaagacaatctccacattgtcgtcacccagattcgccaatgttaactctgccctgaccccacacacaattagtctttttctgaaccatttgggaacaagcttcagacctgagtccacgttacccctaaatgctatagtgggtatttccccaaacaaggatcttccaaatcaagaagttaacatcgctacaagaccgttcacagaatctatataagtttcaatttttcaatttcaactgtcccaagaatatattttttaaaaaattggactgggtgcagtggctcatgcctgtaatcccagcactttgggaggccgaggcgggtggatcacgaggttaggagttcaagaccagcctggccaagatagtgaaaccccatctctactaaaaatacaaaaattagccaagcatggtggtgggcacctgtaatcccagctactcaggaggctgaggcagagaattgctagaacccaggaggcagaggttgcaatgagctgagatcacgccactgcactccagcctgggcaacacagcaagactctgtctcaaaaaaaaaaaaaagtgtgtaatatttacttcacaggattgctatggatgttcattggacataataaggagtttggttagttgtcattgttagtttgttacagttacactgtgtccccctacacttcccctcttactcattgcttattggggtatggaaagccagcattgctatagcattctcgcagcacagtacacacacacacacacacacacacacacacacacacgaggctggaatcatgggtatactatgtctttaataaaggatctttcttggccaggcacagtggctcacacctgcaatcccagcactttgggcggccatggtgggcggattgcttgagcccaggagttcaagaccagcctgggcaacatggtgaaaccccatctataccaaaaacaaacaaacaaaaaaacaaaccacaaaaattagctgggcgtcatatgcctgtagtcccagctacttgatactcgggaagctgaggtgggaggatcacttaagccagggtggtggactgttgcaatgagccaagatcatgccactgcactccagcctcggtaacaatgtttcaaaaaaaaaaaaagtatttttcttgattggacaatgagaattctaattgtaatggatatctattgtttggtcctcccccttcttgtgggaaacggtctttctctacttccacaaggtagtgtacattgttcttacctgaaatggcagttacaagaacatgacaatgtccatgttcttaaagatcctagatctttggcacaatcatttgattcacggacaggcaactagctggaccaatgaactagccttccctgagaatttttaacttgggactagagatcatcatccttacctcgcctgtctgatgatgaggcagaagatgaaatgttgggagctgtcagtggccttgtttccagacatatggaggaagctggtctaacagcatgaagccaatgtgcagagagagttgcagagctgagccataggggcagaggcattctcgttctagtagtcccagcagtccctccccttcttggagtctgtccatatcaacagtacattcctcccttctgcctaacagttgagttcctgtcaatggcaaccaagagaggtgtgactgattcatgtattcaaagggctgttgtgagaacttgtgcctgactcacagtggggactcaacaaatgttggtttattactcttatatttaacgcctaaagtctgaatgcgaaaaggttagggcaattccagaaggaattactatgcagaagggaaaactggttgacaggttaactttcctttgaacatcacaagggaaggcacctaaatacaaaaggaaggcttcctccacgccccccatacacacacattcccttcatcctaacctggctctgcagctccgagggtcacatacctgcccttggcactactagtacttcctccagcaagtctcagtctttctttcagaatccttcgcccttatgccatgtaacatctgatcggcccggtctttgcccctagtatcagcaggccaatacgtgctctgctacaggtcttacagggagggtgagctcttggagttggatcagaaggagaggggctggggaaagatcgtcttcaaattgtttctttggcggtagtatatataaacatatttaggcagggcatagtggcacatgtctgtaaccccagcactttgggaggccgaagcgtgaggatcgcttaaagacaggagttgaaaatcatactggtcaatatagtgagattgcagtgagccattatcgcgccactgcattcctgcctgggtgacagtgcgagaccccttctcaaaaaaaaaaaaaaaaaaagaaagaaaaaaatcataagcaaacaacaacaaaaaaacaaatataaagaatggcggtctgcttaattctccgtgccagcccttgaaatcagtgggtattattatgtagagtttgagttctttcctcccttgagtaacatgagtgacatcagtaacattagtcaagcgctgctctttttgaaagactgtatttcattatttttattctaaaccttactctgtttgatgaagattgggggaagagccctcccaattccaccgctcacacataacagcggttgctagcattctttatttgtgctaggtcatctgcatattgtttaaacatttttcgaggctggaaagactgctcccactcaggcaattctgacgtggcggcccttctaatttatattctctaaataattcttcatttagagaaaacagtcagggattacagtgagggagggtgacgtgctgacggggacagagcttggcttttgatcattctccccttagctctgcccaggcaagcgtccctaactcagggtatcggaaccgatctcccttagaggattatgtttcaaccaccagcctcagcggtttactcaaatgtccttccagccaaatgcagaagtctccctgggagtaattttggtgaagtcagcttttgcctttttcatcacaggcaggctttagtagttcctcaaaacgtgcaccacaactgcccggctgccaaacagaaatgctgatgcctgggcccactctagccatttggcctcggcatcacggtgcgggagcgtggggcgcagactcgcattgtcacaggaacctcccggccttccgaagagccccgcgccggggcctttgtctcgcacgtcggctggggcgggagctaggttctcgcagcctcctcccaccgctctgcgccttctttgtccctccagaagccgccatcaaagctcagctcctgattaggtttcggccccgctggccggcgcagtctcggcgactaccccaggcggcctggcgcacgcgaggattcgccgcgccccagatgcaggtgcctcccctccttagccgccgaccgacagtgcacgccgcggccgccggaagtgacagcgcctgtcgttggggagctcccgccccttccgcctcggcgccccgcccaggcctcgcccctaggtgttcccgcccctccccctcccgtgtcgctcgctttctgtcagcctctctccctctccctctcccctctccttcctctcgcttcctctctcgcacctgagcgtacgcacctgcccgggcccggctccctcctcctctcccctccctctttccccgcccggccgcgggagcctcgtggctgcgtcaccgccgcccccccagacaagatggacaccgcggaggaaggtaagtcggcgacgcgcggcgcccgagcccttgcgtcggcgcccgggttcgtaccccggccaggtccgcggcgctcgaggtgggctgctggatcgcggcggggcggacgcctgggccgtttgtccacccgctgggcctctgggccggggagcggaaggtgaccctctgcgcgccccccgccgtttcccgcccgcgccgccgaggggggcggggaccctgccgggcaggggccggggccggggtcggggcctcggggctactgcaggccggcgtggcctcccttgtccccgccgtcgcgcgctggcccagaaaagggggcctctgtcgctgccgtccgggggcgttttccgcacccttcccccactgggttttgtctttctttacgtccttctgcctattgctcgccaggccctaccccctcgcgacagaacttctttgttgactttgaaacttcgcgaaaaataccccgccagatgacggccgagtggagtgagctgacccctgttgaaaagcctggtcctcggcttgcctgccgctcgagaatctgtttactaaacggggaggctcttttgttgcgatccatttggttttaaatccttgacacctataagcagggttctgtttgttttgttttgcgattgcttgtgttttggatacggttacattgaacaaactgacccttgtaaaatgaatacttaagatataaacgtccacaccttatgtctcttcaaacgcattttcttacccactgaaggtagtagattatttttaaccagctgtgtttttaaatgagtggtgagtttatagaggaaattactaaattttgctttttttgatgttccggttatcgtgcaaatgcttttctactttaggtatatttatgggggtatgagcgtctttcaaccttatgggttgcgattttggcgattttaaacgaaaatgaattatcaaacgccgtcatggagtgcaataatgagtgaaaaaagtttgatattatctatgtaatgagttgataacgacttatttttttttaaagaagtcttgcctttaataaatacctca

SEQ ID NO: 10715 - DNA, 6000 bp, Homo sapiens
gaaagcatgcaaatttactttcaaaatatttaacaagctcagaatcaccctggtttattttgccatcatttttcctgtttgagaatgtgtcatcagttatttaaataatctgtaattggaaagaaaataacagaggcaccagcatttttcatttggctactaaataaaaatttttaatgctgtaaaatagcagttgttcaatgtcaagtttgtctaatattctgttccactttaacaacatcagatttttatggcggcatttttctgtttttgttttcagtaagtgctttgtggaaggcattgcaaaagataaccatttttgaaaaaccatcttcctgtcagttactgatttaaaattctgagaatacatgttttcattttctgttacaactgaatgagtttaaaagaagctatagattgcatttactaggtgaatttcccctccctacccccatttctcatattttgcataaggctctgagtctttatactaacataaactttcactgattttctttaaattaaaaattttaagcccataatatagactctgtctctattttgtctgaaaaagaacataggcataacaataattcttagaagtatttttaatagatttatagagatccttttgaaaaataaaatggaagtcagagaaaaggaagctactttttaaactataagttggcttcagagttacaagcatctagcactgtcagggagccattcgtcattttattcattctgtatctccccactgcagaggttgcagtgagccgagatcacatcactgtactgcagcctgggtgaccgaatgagaccctgtctcaaaaaaaaaaaaaaaaaggaagaaaggccaaggcaggtggatcacttgagctcaggagttcgaaatcaacctgggaaacatggtgaaaacccatatctacaaaaaattaaaaaattagccaagtgtggtagtgcacacctgtagccccagctacttggatggctgaaacaagagaatcgcttgagcccaggaggttgaggctccaataagctgtaattgtgccactgcattacagcctgggcaacagagcaagactctgtcccaaaaaacaaaaaataagaataaaagtaactgatgcaggtaaagaaatttaaagtttacaaaacatttatgaattgtctttcatatattttccctaattgattctcggattgacaataatcctctgtagcaaagtatcattgtgtctaatttggagatgaggaagtgaattattttaagaagatgtttcaattctcttgatcctaggttcagtttataattttttaaaaaatgaagtcattaagatttaaatctgttgagaacaccctaagaggatagaaacatatgtaatatatttaatagaaattctcggctgggtgcggtggctcatgcctgtaatcccagcactttgggaggccaaggtgggtggatcacctgaggttaggagtttgagacaggctgaccaacatggtgaaaccccgtctctactaaaaatacaaaaattagccaggcatggtggtgggcgcctgtaatcctagctacctgggaggctgaggcacaagaatcacttgaacccaggaggcggaggttgcagtgagcagagattgtgccaccgcactccagcctgggtgacagagtgagactttgtcaaaaaaaaaaaatcatgaaaattcgtgaaatctttaaaatattttgacaataaagtctcatctctttggaaaattcactgttaactcattcattctcacctgtttgttgagggcctatgatgtgcgcaacactgataggtgctagaaagaggtggaatcctggtgcgtggtccattgcctgaagttgataatctgaggaagaaaacgaaacacaaacttgttagcctcagatgagtgccagtagacctactaaacaaatgcctgtagtttgggactggaaaggaagcatgtgttacttccaaagtggcttcttggggctggcatttaccttgtggtaggtggtttacacaggggacactctgagtgttccatagacactctaggtcaatggagaggaaggtgcagaaaagctgaggaaacacttggctcatccagaagtggaaagcaccctgatgtgcttgaagcatgaagcaagtgttgggcaatctaaggaaaaacaaaaaacaaaaacaaaaactaaaacactgaaaatgcattcacccactcaactaacatttgttgagggtctcttatatggcaggctctgctctatactgggcactcagcagttagagggcagagttgctactgcaaaaagcttatgttctagtgaggagacaagaaaacaaacaaacaactacataatgaagtataaggaactgaccaaagctaagaagaaacaaaaagcaggctgacaggataggccttggtgatggtggatttagggaggagtggtactgccttagagccaacaaggagggtctctctgagtaagagacaattcagagaccaggatgaaatggaaaactgagacatgaattccctaagcaataaacttcccaaagcttatcccaaagaaaagagaagagaaaagaaaaaaaaaagaaggaaggaaagaaagaaagagagagagaaagaaagaaagaaagaaagaaagaaagaaagaaagaaagaaagagagagagaaagaagaaagaaaagaaaagttaggagcccattttgctgagaaactcttttaaataagctacaagtacttgaatctggctcaattttcacttctaggattctgcagctcaattccatagcctgtttcttcattctccatcaccacttctgttccagtgggcaggagagagctctgaaaacacacatgcactcgcccacatacccacagctaggctggatcttgtgacaaggaatatcacagaaatactcccagcctcctatacctcttctacctgcccccacgccctgcagagttagagtccgtagataagcccttggggcctcctcttctttgtcgtctttgtccccttctttttcccactcactggcttccagccatcccccttcctgtggtgcccctctcactacatgaaatgcagctctgagggaccccattcagtcttatgtttcgggccttaggtgtaggctactgccttcctttctgccccttctactttatcgacttgttctttcaggttgaaataataaaatgtagaaaggtggaaaaattaaagcttgagacttaactaggatctaatcatggcaacatgtgctattgggccaaacataggttgcaaacacaaaccacagcaggacaaggcacatgatacaagtctatgaagagtgtctgcaacatgataagagctaagcttgttatatttcacttgacaatagaaattgtatggatgtattgccatttaatagactgtgattcaaacaaaacaactataggctggcatataggctgccagtaggccactatggttcccacactaggacttgcccctctgtaaatggggaaatcaaggaaagatcttgagcagtgggggaggcatggtcgagcagtagttgaaaggattaatctggtggcatcgtacaagtaactgcaagaagctgagcttgagaagctgggaagacatgattgaaggccattgtgaggaaggatgaggacctggactactttaataagcggtgggattttttcttagttggatagaaagagattgaaaatgattcaaaaaggccagttgcggtgtctcatgcctgtaatcccaatcctttgggaggctgaggcagaaggatcacttgagcctaggagtttgagaccagcctgagcaacatgggaagacctcatctataaaaaaaaaataataaattagctgggtgtagtggtggatgcctgtagccccagctacttgggaggctgaggtgggaggatcatttgagctcaggaagtcaaggctgcagtgagctgggatggcaccactgcactccaacctgggtgacagagtgagaccctatctcaaaaaaaaaaaaaagaaaagaaaaggaaaaatcaacaggctttggtaacaaattggagagggacagaatcaaagtaactaactatatggttcaatcctagataatggaagaaggctggaagcatataaagcaaagggtgtttatctggggaaagaaaacactatttgagttgtcaggggttctggttcaggttagggttagacatccatgtactgttggtccatcaggctgttggaattacagcagcagaacccttgaaggagggatcacaatgggagcaatgtgggatgaatggggataaatgctaaatctgggtactggaaaggataaagagagggcagagcaaaggccagaggtttcatctttgtggaaggtctgtattcagagcagagaggaagttgaagcccaactcaaacaggcagataaagagagatcaaagagatgagcatgagatacagtcccctcgtgcccaaggagacagggtggttacagacatggaaaatctgagaataatcacctctgataaagatcacagaagctgcccgggaggtgtttggtaagcttggagttacgtttgtggggtggatgggcagaagtcagatttcatagcactgaggatgcagcacaaggagaagttcaagatcaattcctaagacaacaacttggcactaaaaaacataaactatgttctgaaggctttaccctggggacaagggaagggaggtgataacagcagaagtggcagccactggcgatcctttctttccatggtttggcttctactccaaagccacttatttgtgcattctacaaaaagtttcttgtcctttttgaaataaagctcttatcctaagctccattcacacctgcgtgataatgaaccagctagtacttactgtactcaggaagcatgcaaagttctgaatcttagaacagaaagtgaaagcaaaagtaaattccccttcagtcaaatctgcagcagcatgatttaaggtaacgtatcaacatttctcttgggtttgtcttaaaattagattttttcaataagaataatgaactgaaggtatagaactgctgtgttgagaaggttttgtaatctaaggcaaggttctgggggactggggtgaattgggcgcggctgtattagaaagtgtatgcagttgaggctgggacttgatctaagacgctgctgcactgactctctttcagagatctttttgtcttttctaagcgtttgtgacaattcttgcctcttcaatcccaggatgttttgttcactgcattgctatttaaggtacagtgcagtataatagaaagcccaccagaccaaagggcaaagagctatgttttagtcctgattctgtttcagacttcctgtgtggattttgagaagtcaccatcctgttccttcatctgtttatttaatttaatttatgtatttatttatttatttattttgagagagagcctcgctctgtcgcccaggctggagtgcagcagcacgatctcggctcactgcaacttccacctccctggttcaagcgattctcgtgcctcagcctcccgagtagctaggactacgggcatgtgccaccatgcccggctaatttttgtatttttagtagaggtagggtttcaccatgttggtgaggctggtctcgaattcctgacctcaggtgatctgcccaccttggcctcccaaaatgctggcattacagacctgagtcactgtgcccggtcctgtttctttatctgaacactaaggacttgtactagctggcctttacaacccttactagttctaaagttaaagactgtgtgagtaaagcttttctctctactcttatcaatcaagtacatctctaggagtgtctgctacaagtgggggcgagctactccttcattttggccattgaatgcaagttataacctcaataataatttcatatccaacactaattacttacttcc

SEQ ID NO: 10716 - DNA, 6000 bp, Homo sapiens
aggttcaagcaattctcctgcctcagcctcccaagtatctgggactacaggcgaatgctaccacacccaactaatttttgtatttttagtagagacaggatttcaccatgttggccaggctggtcttgaactcctgacctcaagtgatcagcccacctcagcctgctaaagtgctgggattacaggcatgagccaccttgcctggctcttttttctctttatttaatagaaatgagatttccctgtgttgcccaagctggtcttgaactcctgggtttaagggatcctcccacctcagtctcccaaagtgctgagattaccagcgtgagcccccatgcccagcctctgtggttcattttcaaggaaattttacccaagaggacaacctatgtcctgacaggacaaatgaatcccgacaggagctggaacagctaaagcccaagggctgagggttgggctccttggccaaggagagtggcaactcctacatcagggaaacagttgtcagaaccttcagctggaaaatctctgaaaacagcaaagcacatgaaacatgcaagaaaaagcagcaattgttcatccaccacatcccaaggacatcatccccagattactgctgcagcttcatgaacgttgcaccctttacccctcttcctcttttccctccagcctgagcttccgactcaggtgtgtcagaaaccaggcttgtgtgtgggaaaagagaggttaggacatggtggaaaagccaacatgcttcaaatcctgaagcaaacccatgcaaagttacggaaaagcatcaacttgaatacatgtttggagttttgattattaccttgaactgaactgggctttctttttcttttctttgtattgttgttgttgttgttgttttgagacagagttttgctcttgtcacccaggctggaatgcagtggttcaatcagctcactgcaacctccgcctcctgggtttaaagctattctcctgcctcagtatcccaagtagctgggactacagccacctgccaccatgcccagctaatttttgtattttcagtagagacggggtttcaccatgttggccaggctggtctcaaactcctgacctcaggtgatccacccgcctcggcctcccaaagtgctgagattacagacgtgagccaccgcgcccagcccctttttctttgcttaactttttattatggaaattttcaaacgtgcatcggtgcaaggagagtagaataatgatgtacccattagccagctttagcaattatcaagtcatggtcaaacagttttcatcccttcccctaccaatttctccccctccactggattatgatgaagcaaatcataaacattttattgttttatcaataattcagtgtatgtttctatacaaaataaggactattttaacatgataatagtgccattattacatcttttttttttttttttttgagatggtgtcttgctctgttgctcaggctggagtgcagtggtaccatctcagctcactgcaacctccgccctccaggttcaagcgattctcctgcctcagtctcccaagtagctggaattacaggcacacagcacgacactccactgacttttgtatttttagtagagacaggatttcaccatgttggccaggctggtctcgaactcctgacctcacgtgatccgcccaccttagcctcccaaagtgctgggattataggtgtgagccaccacacccagcccattattacatcttaaaaaataacaagtttctcagtattatcaaacatctctttaacattcaaatttgtctaattgtctcataacgtctttatacagttgatttgcttaactcttaatccaaagtccaaacatgctcatatgtctcttaaagtctcttttaatctaagggttccccctttgatttatttgttgttttgttttgcttttgttttttgagacagagtctggctctgttacccaggctggagtacagtgctgcaatcccagctcactgcaacctccacccactgggctcaagtgatcctcccacttcagcctcccgagtaggcgggactacaggtgtgtgccaccatgcctggctaattttttgtagaaaaagggtttcaccatgttgttcaggctggtcttaagctcctgggctcaagcaatccacccccttgacctcccaaagtgctgggcttacaggcatgagccaccgtgccctgccctctatgacttatttgttactgatactgagtcatttgtccttagcatgttttgtattctggactcatccaattgcatctccacagtgtcatttgtcaggttcgtttatctcttgtatttcctgtaaactcgaatttatatctcgaagtttgattagatttgtgtttgattttgttttctcttggcaagactcccgagttgccagttttgtgtacttcctcttgcttcacctcaggagacatacaatgtctggttgtccttcttttaagattaatcagtgtgttacagtgttgtcagcttcatatgacagttatacattttcctattggctttttgcgtaataattttaacagccattgatgatcattgcctacatttattatttcattggcattgcaaaacgatagtattctgtcactccttcattgattagtttcttggaaaaaaagaacttcctcattaaatacttgatcactgaattgaaagataattcttcaagaaaagcaagcaatatgttttatttttttcctttgtttccagttttcagaaaaacaagttggttcttcagcatcctccaaaagtgatcaaaaggttgggatgcttttttcaattctcttttgaactcattgttttaacatttttgctgttcttcaattcatggcaattattattccttttgatactcaaattgttccatctttggcaagtgggaactccttgaatttggctcctatgaagtgaactttttaaaaccaaaacaaacaaagggactatttgtttttgtttatgttttccttaaagtgagaaaaaaatattgagcctcctaagtttgcatttaaaagttggcaaagatgagtctcagttagtgggtttgatggctctatgagaaagagaataaaattacttacgatgacactccatgtagactgagcaaacgaaagactcctaagtattgcaacagctactgatgatattttgttttcccggatgagaacactttgtgaagtctataactcttttcatctgaaccaagcaggtgtaaaatgtactttcctcagaggagtttgtagtctagtttgagaagatagcactgtattatctaggtttgctggtagtgacagaaacctcaaaataactgagacttagaaaatagatattaaaaaatgtaatccagggctggcatggaagatccatggtcaccagggtcccaggctctttctatcttatactccattgtcctcaacattcaatttccacctcatgatactagatagctgcttcagctccaactgttacctcaatattctagtcacaaggcaggaggaaaagggaaagaaaaggggatgacagatcccactaaggaaatttcctagaagttgtgcacacgacttctgctacattcagttgaccagaagacagtcatacaactacacctagctacaagggaggctaaaatttgtagtctttattcttgctggccagatgcccagataactgtcagggattctgttactctagtaagaaggagagagtagctatttgggaatagtagcaatccctacctcaagcccatactcagaaaaaaaaaatactatcttgtttgggcagtgtatttccacacatatgtcttaagaatctcagaatgggggaggtaatttaaaatataccagtaccgtaccctcctgggtgtcttgattatgctggggcatccagtatatgaaataaaattaggctgttgtctggtaatttacatttaaaaataaacattggagaatttcactcctatacagcaataattattatttcatttattatttatccctacccactacatgcaatatctgcttacactaaaatctcttgattattaacatagtagaggtaactgtcacacattatacttcaactatgtactaactctaaggtgacatgtatgactagcacctaccattcataagatgtatgggattcagtcctccaaaggaccctcacaaggaagctaaggatcagagaagtcatggcttgctcaaagagaaacagcatagtaagtgacagagctgggaatccaacacaagtttgtctgttttcaaagcccacatatactttgtttattatgccattctgaaggattcacttatttttcactcttccacaaaacgtcaggacagaaaggcagtcatctatatgtagcattgagaaatttctatgggctttaatttaaatcttaaaaactaataaacttcagcaacatatttcttcactttaatgtgtgagggttttgtgctcattacctcttttaattgtccaacccaatttggtgatgatccattcaacaaatttttcttgaacatctgttttatgtgtcaggtactgtgatggttgctgagtatatcatggtaagcaaaaccacacattgtccttactccttgtgctacatgatttaactgctggatggattaaaccaggaactataaagattaaactgtaatccttaccacaattttgagtttacagtttttcaaatatcatttcaagccattagcaaaggctgtatgtattttttacatatgcctcctcgttttgtgaattttgaaaggatgtggtttcggcctttgacatcagaggagaagctcagctatgttggctgaacgttgatagaaagataacgttgaaggcaagttgcccttgagcagctctctgaagatcaactgcctccacattgcattctttgccccaaaactctttcctttggttgtgctaagaggtgatgcccaaggtgcaccacctttcaagaactggatcatgaacaactttatcctcctggaagaacagctcatcaagaaatcccaacaaaagagaagaacttctccctcgaactttaaagtccgcttctttgtgttaaccaaagccagcctggcatactttgaagatcgtcatggggtatgtgagcagtttcatttgtcttttttcgcatagcattttatgtttggactgggctaatgcaaaaatatatacatagcataaaatagagcacaggaaacacaaacatgcttattgtaacaacataaaaagtacagtaaaagtaatcagaggagaatgcagagagcagtcaagaggtgaaatggtggtgctaggtgatttcagttctaaaaactgtaaatttaacattcatcagctttttccccctgcaaggttatgtttggtttttaaattatgaataacattttaggtagcaagtattatgattcgataaaacttgaactttctatgaaacatactaaatttaatgaaacatactaaatttaatgaaacatagattaatacaacactagcattcaatgggatgatctaccccagctttcttattttttagtggaagaaactggtgtttagaatggttaagttttgggttcagtgttaacgttttcatgaataactctgtttgtctcaatactcgtcgctagcctgatcttgaaataagatttcccaggcatttaattatctaaaagttgtaaggcacaatggcaaacctcttcatctcttgatagacttcttaggacaccagggttattaagaacaaagtttctgcagtgcagaccagcggttcttacccagaaggagtatggctgctttgctaggtcagtctatctctttatctaaaaatagtcttgtgcttcttaacatcactaataacaaaagcaacaggaataatcctaataatgtagtttggtagaaaaagcattggacaaagggtcaggagaccaaactc

SEQ ID NO: 10717 - DNA, 6000 bp, Homo sapiens; identical to SEQ ID NO: 2387

SEQ ID NO: 10718 - DNA, 6000 bp, Homo sapiens
tcagcagaatactccaggaaaatcctcagcaggtttccaaagcctgccctcccacacaccgttcgtctctttctgcagctctctcctctttggtattcatcctatgaactctggtttccttgctctcccagaatctcatctgcatctcctcaactcaaagaatctgctgggctctgccttagttctgtctccctgcaaagcagcctggaacctctctcaaggcagaaagctgggaaaatcacagagcttgcctatttgtttccttctctccagggattgctgtcttgggttgcctgatattcattgtcttgtaaactgtcttttgttcatctttttttggttgttttaagcaggagaataaatcagagtccctactctatcttggccagaagcaaaagtttttttagatcttttagttaaatttttaagtaggggagaagccaaaacattactgatttggtttaatcagttggttttaatcggttggttgaaagcatgcaaatttactttcaaaatatttaacaagctcagaatcaccctggtttattttgccatcatttttcctgtttgagaatgtgtcatcagttatttaaataatctgtaattggaaagaaaataacagaggcaccagcatttttcatttggctactaaataaaaatttttaatgctgtaaaatagcagttgttcaatgtcaagtttgtctaatattctgttccactttaacaacatcagatttttatggcggcatttttctgtttttgttttcagtaagtgctttgtggaaggcattgcaaaagataaccatttttgaaaaaccatcttcctgtcagttactgatttaaaattctgagaatacatgttttcattttctgttacaactgaatgagtttaaaagaagctatagattgcatttactaggtgaatttcccctccctacccccatttctcatattttgcataaggctctgagtctttatactaacataaactttcactgattttctttaaattaaaaattttaagcccataatatagactctgtctctattttgtctgaaaaagaacataggcataacaataattcttagaagtatttttaatagatttatagagatccttttgaaaaataaaatggaagtcagagaaaaggaagctactttttaaactataagttggcttcagagttacaagcatctagcactgtcagggagccattcgtcattttattcattctgtatctccccactgcagaggttgcagtgagccgagatcacatcactgtactgcagcctgggtgaccgaatgagaccctgtctcaaaaaaaaaaaaaaaaaggaagaaaggccaaggcaggtggatcacttgagctcaggagttcgaaatcaacctgggaaacatggtgaaaacccatatctacaaaaaattaaaaaattagccaagtgtggtagtgcacacctgtagccccagctacttggatggctgaaacaagagaatcgcttgagcccaggaggttgaggctccaataagctgtaattgtgccactgcattacagcctgggcaacagagcaagactctgtcccaaaaaacaaaaaataagaataaaagtaactgatgcaggtaaagaaatttaaagtttacaaaacatttatgaattgtctttcatatattttccctaattgattctcggattgacaataatcctctgtagcaaagtatcattgtgtctaatttggagatgaggaagtgaattattttaagaagatgtttcaattctcttgatcctaggttcagtttataattttttaaaaaatgaagtcattaagatttaaatctgttgagaacaccctaagaggatagaaacatatgtaatatatttaatagaaattctcggctgggtgcggtggctcatgcctgtaatcccagcactttgggaggccaaggtgggtggatcacctgaggttaggagtttgagacaggctgaccaacatggtgaaaccccgtctctactaaaaatacaaaaattagccaggcatggtggtgggcgcctgtaatcctagctacctgggaggctgaggcacaagaatcacttgaacccaggaggcggaggttgcagtgagcagagattgtgccaccgcactccagcctgggtgacagagtgagactttgtcaaaaaaaaaaaatcatgaaaattcgtgaaatctttaaaatattttgacaataaagtctcatctctttggaaaattcactgttaactcattcattctcacctgtttgttgagggcctatgatgtgcgcaacactgataggtgctagaaagaggtggaatcctggtgcgtggtccattgcctgaagttgataatctgaggaagaaaacgaaacacaaacttgttagcctcagatgagtgccagtagacctactaaacaaatgcctgtagtttgggactggaaaggaagcatgtgttacttccaaagtggcttcttggggctggcatttaccttgtggtaggtggtttacacaggggacactctgagtgttccatagacactctaggtcaatggagaggaaggtgcagaaaagctgaggaaacacttggctcatccagaagtggaaagcaccctgatgtgcttgaagcatgaagcaagtgttgggcaatctaaggaaaaacaaaaaacaaaaacaaaaactaaaacactgaaaatgcattcacccactcaactaacatttgttgagggtctcttatatggcaggctctgctctatactgggcactcagcagttagagggcagagttgctactgcaaaaagcttatgttctagtgaggagacaagaaaacaaacaaacaactacataatgaagtataaggaactgaccaaagctaagaagaaacaaaaagcaggctgacaggataggccttggtgatggtggatttagggaggagtggtactgccttagagccaacaaggagggtctctctgagtaagagacaattcagagaccaggatgaaatggaaaactgagacatgaattccctaagcaataaacttcccaaagcttatcccaaagaaaagagaagagaaaagaaaaaaaaaagaaggaaggaaagaaagaaagagagagagaaagaaagaaagaaagaaagaaagaaagaaagaaagaaagaaagagagagagaaagaagaaagaaaagaaaagttaggagcccattttgctgagaaactcttttaaataagctacaagtacttgaatctggctcaattttcacttctaggattctgcagctcaattccatagcctgtttcttcattctccatcaccacttctgttccagtgggcaggagagagctctgaaaacacacatgcactcgcccacatacccacagctaggctggatcttgtgacaaggaatatcacagaaatactcccagcctcctatacctcttctacctgcccccacgccctgcagagttagagtccgtagataagcccttggggcctcctcttctttgtcgtctttgtccccttctttttcccactcactggcttccagccatcccccttcctgtggtgcccctctcactacatgaaatgcagctctgagggaccccattcagtcttatgtttcgggccttaggtgtaggctactgccttcctttctgccccttctactttatcgacttgttctttcaggttgaaataataaaatgtagaaaggtggaaaaattaaagcttgagacttaactaggatctaatcatggcaacatgtgctattgggccaaacataggttgcaaacacaaaccacagcaggacaaggcacatgatacaagtctatgaagagtgtctgcaacatgataagagctaagcttgttatatttcacttgacaatagaaattgtatggatgtattgccatttaatagactgtgattcaaacaaaacaactataggctggcatataggctgccagtaggccactatggttcccacactaggacttgcccctctgtaaatggggaaatcaaggaaagatcttgagcagtgggggaggcatggtcgagcagtagttgaaaggattaatctggtggcatcgtacaagtaactgcaagaagctgagcttgagaagctgggaagacatgattgaaggccattgtgaggaaggatgaggacctggactactttaataagcggtgggattttttcttagttggatagaaagagattgaaaatgattcaaaaaggccagttgcggtgtctcatgcctgtaatcccaatcctttgggaggctgaggcagaaggatcacttgagcctaggagtttgagaccagcctgagcaacatgggaagacctcatctataaaaaaaaaataataaattagctgggtgtagtggtggatgcctgtagccccagctacttgggaggctgaggtgggaggatcatttgagctcaggaagtcaaggctgcagtgagctgggatggcaccactgcactccaacctgggtgacagagtgagaccctatctcaaaaaaaaaaaaaagaaaagaaaaggaaaaatcaacaggctttggtaacaaattggagagggacagaatcaaagtaactaactatatggttcaatcctagataatggaagaaggctggaagcatataaagcaaagggtgtttatctggggaaagaaaacactatttgagttgtcaggggttctggttcaggttagggttagacatccatgtactgttggtccatcaggctgttggaattacagcagcagaacccttgaaggagggatcacaatgggagcaatgtgggatgaatggggataaatgctaaatctgggtactggaaaggataaagagagggcagagcaaaggccagaggtttcatctttgtggaaggtctgtattcagagcagagaggaagttgaagcccaactcaaacaggcagataaagagagatcaaagagatgagcatgagatacagtcccctcgtgcccaaggagacagggtggttacagacatggaaaatctgagaataatcacctctgataaagatcacagaagctgcccgggaggtgtttggtaagcttggagttacgtttgtggggtggatgggcagaagtcagatttcatagcactgaggatgcagcacaaggagaagttcaagatcaattcctaagacaacaacttggcactaaaaaacataaactatgttctgaaggctttaccctggggacaagggaagggaggtgataacagcagaagtggcagccactggcgatcctttctttccatggtttggcttctactccaaagccacttatttgtgcattctacaaaaagtttcttgtcctttttgaaataaagctcttatcctaagctccattcacacctgcgtgataatgaaccagctagtacttactgtactcaggaagcatgcaaagttctgaatcttagaacagaaagtgaaagcaaaagtaaattccccttcagtcaaatctgcagcagcatgatttaaggtaacgtatcaacatttctcttgggtttgtcttaaaattagattttttcaataagaataatgaactgaaggtatagaactgctgtgttgagaaggttttgtaatctaaggcaaggttctgggggactggggtgaattgggcgcggctgtattagaaagtgtatgcagttgaggctgggacttgatctaagacgctgctgcactgactctctttcagagatctttttgtcttttctaagcgtttgtgacaattcttgcctcttcaatcccaggatgttttgttcactgcattgctatttaaggtacagtgcagtataatagaaagcccaccagaccaaagggcaaagagctatgttttagtcctgattctgtttcagacttcctgtgtggattttgagaagtcaccatcctgttccttcatctgtttatttaatttaatttatgtatttatttatttatttattttgagagagagcctcgctctgtcgcc

SEQ ID NO: 10719 - DNA, 6000 bp, Homo sapiens
cccctctcactacatgaaatgcagctctgagggaccccattcagtcttatgtttcgggccttaggtgtaggctactgccttcctttctgccccttctactttatcgacttgttctttcaggttgaaataataaaatgtagaaaggtggaaaaattaaagcttgagacttaactaggatctaatcatggcaacatgtgctattgggccaaacataggttgcaaacacaaaccacagcaggacaaggcacatgatacaagtctatgaagagtgtctgcaacatgataagagctaagcttgttatatttcacttgacaatagaaattgtatggatgtattgccatttaatagactgtgattcaaacaaaacaactataggctggcatataggctgccagtaggccactatggttcccacactaggacttgcccctctgtaaatggggaaatcaaggaaagatcttgagcagtgggggaggcatggtcgagcagtagttgaaaggattaatctggtggcatcgtacaagtaactgcaagaagctgagcttgagaagctgggaagacatgattgaaggccattgtgaggaaggatgaggacctggactactttaataagcggtgggattttttcttagttggatagaaagagattgaaaatgattcaaaaaggccagttgcggtgtctcatgcctgtaatcccaatcctttgggaggctgaggcagaaggatcacttgagcctaggagtttgagaccagcctgagcaacatgggaagacctcatctataaaaaaaaaataataaattagctgggtgtagtggtggatgcctgtagccccagctacttgggaggctgaggtgggaggatcatttgagctcaggaagtcaaggctgcagtgagctgggatggcaccactgcactccaacctgggtgacagagtgagaccctatctcaaaaaaaaaaaaaagaaaagaaaaggaaaaatcaacaggctttggtaacaaattggagagggacagaatcaaagtaactaactatatggttcaatcctagataatggaagaaggctggaagcatataaagcaaagggtgtttatctggggaaagaaaacactatttgagttgtcaggggttctggttcaggttagggttagacatccatgtactgttggtccatcaggctgttggaattacagcagcagaacccttgaaggagggatcacaatgggagcaatgtgggatgaatggggataaatgctaaatctgggtactggaaaggataaagagagggcagagcaaaggccagaggtttcatctttgtggaaggtctgtattcagagcagagaggaagttgaagcccaactcaaacaggcagataaagagagatcaaagagatgagcatgagatacagtcccctcgtgcccaaggagacagggtggttacagacatggaaaatctgagaataatcacctctgataaagatcacagaagctgcccgggaggtgtttggtaagcttggagttacgtttgtggggtggatgggcagaagtcagatttcatagcactgaggatgcagcacaaggagaagttcaagatcaattcctaagacaacaacttggcactaaaaaacataaactatgttctgaaggctttaccctggggacaagggaagggaggtgataacagcagaagtggcagccactggcgatcctttctttccatggtttggcttctactccaaagccacttatttgtgcattctacaaaaagtttcttgtcctttttgaaataaagctcttatcctaagctccattcacacctgcgtgataatgaaccagctagtacttactgtactcaggaagcatgcaaagttctgaatcttagaacagaaagtgaaagcaaaagtaaattccccttcagtcaaatctgcagcagcatgatttaaggtaacgtatcaacatttctcttgggtttgtcttaaaattagattttttcaataagaataatgaactgaaggtatagaactgctgtgttgagaaggttttgtaatctaaggcaaggttctgggggactggggtgaattgggcgcggctgtattagaaagtgtatgcagttgaggctgggacttgatctaagacgctgctgcactgactctctttcagagatctttttgtcttttctaagcgtttgtgacaattcttgcctcttcaatcccaggatgttttgttcactgcattgctatttaaggtacagtgcagtataatagaaagcccaccagaccaaagggcaaagagctatgttttagtcctgattctgtttcagacttcctgtgtggattttgagaagtcaccatcctgttccttcatctgtttatttaatttaatttatgtatttatttatttatttattttgagagagagcctcgctctgtcgcccaggctggagtgcagcagcacgatctcggctcactgcaacttccacctccctggttcaagcgattctcgtgcctcagcctcccgagtagctaggactacgggcatgtgccaccatgcccggctaatttttgtatttttagtagaggtagggtttcaccatgttggtgaggctggtctcgaattcctgacctcaggtgatctgcccaccttggcctcccaaaatgctggcattacagacctgagtcactgtgcccggtcctgtttctttatctgaacactaaggacttgtactagctggcctttacaacccttactagttctaaagttaaagactgtgtgagtaaagcttttctctctactcttatcaatcaagtacatctctaggagtgtctgctacaagtgggggcgagctactccttcattttggccattgaatgcaagttataacctcaataataatttcatatccaacactaattacttacttcctatatgctccatgctgtgctgtgccaacttcttcacatgaattatttcatttaatcatcccagcatgaggaaggtataattattacactgttttatggttgagataaatgaagctcaaaaagtaaaaaactttgcccatgatcacgtaggtgaggttggtggaattagcgttggaatctgggcactctgattccaaagcctcagacccacataataagccactccattttttttaaaccctccaaaattcaagctaatagaccaattatgagtgtacttatcagacgttcttggaacactgagatttgtagcagtaatttaatgcttgtttttaaaaagagggagaagtatctttaatattattttatttttgttcctttaacaatacctgtcacctgcattaatattgcaaattgaaaaattgaagtaattgtttggataattaatgctgcagaacttgttaaggattataaaaagaagaagtagcagagaaaaccttcatggtttgagttggagcagtaaggaagtaagtagaggcaggtggtagggtggcagtaagaattgattcccccaaattaactatgctgtttgtcctaattttatatgtgttgtagctttacccttcaaaaagaaagaaacttagttctatttacaaaggtagtaaattcagtttgatttaattgtgctttcaaaagtagtgtaaagggaaaagaaccgaaccttaaaaaaattctgtaagaatattataaactcaaaatttatttccatggcttttgacatattgaaaataaactggggataaatacctaccttgaccagcaacctttacaccagtagccataaaatgaggccattcagataatgttattgaaagaggtgaagttcaatgccattcgtagtaataataatatctggtatccaaagaatatagaatatatatatagaatattctttgtgacttatgaagacaaaatagagacatcttgcacagtttactttcaggcatacacttaaaattacatgtgtgcctgtggttccagctaattgggaggctgagacatcaggattgcttgaccccaggaatttgaggccagcctgggcaacatggtgacacattgtctttcaaaaaaaataaaatatggccaggcgcagtgacccacgcctgtgatctcagcactttgggaggctgaggcaagtggatcacctgaggtcaggagttcgagactagccaggccaacatggtgaaaccccgtctctactaaaaatacaaaaattagctgggtgtggtggcacatacctgtaatcccagctactcgggaggctgagggagaagaatcacttgaaccccagaggcagaggttgcagtgagccaagatagtgccactgcattccaacctggacaacagcgagattccgtctcaaaaacataaataaatgaataaaaataaagtaggctggtcacagtggctcacgcttgtaatcccaacagtttgggaggattgcttgagtttaggagtttgagaccagcctgggtaacagggagacccccatctctacaaaaaaggtagccgagtgtggcggtgtgtgtctgtagtcccagctactctggaggctgaggtgggaggatcacttgagcccaggaagttgaggctgcagtgagctgtgatcatgattgcacactctactcctgcctgggcaacagagcaagaccctgtctaaaacataaataaataaacaaaaatttaaaatataaccaaatgttaaaaacattcaacatgcaatgaatttacacacctgccttctgctcgctgcacaagaattcagaagaaattcattacattcaattttaaggtagggttttttgggggagtcctaaagggtttttatttgtaataaccagataacagcttaatttctgctctattttgtggatacttggcctaattctgacagagagcagattttcccttactcacacatacctttttacatgtttaagattttatttgtaaattgaaatcttttttgtcatgctataagtgtgtttttttcttctagattaaattcatgtattgaaaatattgttcagaccccatgtgacataactggagccagtgcagtgccatgaagaactacgagattagcctggatattaacttgtcttctagagaatagatttcatgttccattcttctgcaatggttaattcacacagaaaaccaatgtttaacattcacagaggattttactgcttaacagccatcttgccccaaatatgcatttgttctcagttctcagtgccatctagttatcacttcactgaggatcctggggctttcccagtagccactaatggggaacgatttccttggcaggagctaaggctccccagtgtggtcattcctctccattatgacctctttgtccaccccaatctcacctctctggactttgttgcatctgagaagatcgaagtcttggtcagcaatgctacccagtttatcatcttgcacagcaaagatcttgaaatcacgaatgccacccttcagtcagaggaagattcaagatacatgaaaccaggaaaagaactgaaagttttgagttaccctgctcatgaacaaattgcactgctggttccagagaaacttacgcctcacctgaaatactatgtggctatggacttccaagccaagttaggtgatggctttgaagggttttataaaagcacatacagaactcttggtggtgaaacaaggtaagaacttgctcaggtaatttacattcttttgtgataatttccttacgagttacatctctttgccaggagcagacttcagcagccatttatgagaaatccagtgaactatggggaacccagaagaaggaaaagatctaccattccttaaggaaaccacagtagagatgtaaagacaggactcagaggcataaacagctagagggtgaataactaggaggagaggccagtatatgactgatatgatagatatgcttatgtgctagggaaagagatggtcagtgcagagagggctgaaatagggaatgcttctcaaaggaagtga

SEQ ID NO: 10720 - DNA, 6000 bp, Homo sapiens
acccaataaatgcattggctcatgagtccctctttgtctttccctgactgcattccttgacctccaggtgcgccagatgccccgccaggcatgtaagtaataaaatctttgtttatatctgtgtttctactaatcattgaagaagcatgctctatcttaaaattcctaaattaaaacagtcccttaaaataaatcaaggcagtaggattcaaaatgttgtagtagtcactgtatttttcagttacataggcgttgtaagcaaaatcagtttcccttaggaatatccttaataaagccataaacagtattcatttcgttaaaccctgacccttaattatacgtctttttaaccttcagtatgacaaaatgagaagtaatcataaagtatgtttttaaaaaaatttcttacagatggggtctcactgtgttacccagactggagtgcagtggctatttacaagttcagtcatgaagcactttagcctcaaactcctggactcaagcgatcttcccctgcctcagcttcctgagtagatgggaccacaggcatacgccaccatgcccagctaatgcatatctaagtagaatggtcatcgaaaagaaaaccacttgtaattgagtggttagcttttttcatggaacattatttttacctgaaagaatgactcacaaagtacagttgttcatatttaagtatttggcaaacattttttcaaaaataaatgaaatgagtttatcactttaagaaaaacaggtcaggcatggtggcttacacgggtaatcccagcactttggaagccgaggtgggaggatcacccaaggccaggagttcgagaccagcctggccaacatggtgaaaccccgtctctactaaaaatacagaaaattagccaggcgtagctgggtgcggtggctcacgtctgtaatcccagcgctttgggaggccaaggcgggtggatcacctgaggtcaggagttcaagaccagcctgaccaacatagtaaaacccccgtctctactaaaaatacaaaaaaatgagctgggcatggtggtatgtgcctgtaatcccagctactcggaaggctgaggcagaattgcttgaacctgagaggcagaggttgcagtgaacagagatcatgccactgcactccaacctgggcaacaagagcaaaactccatctcaaaaaaaaaaaataaagaaaagaaaattagcctgtaattccagctactcaggaggctgaagcaggaggattgcttgaacctgggaggcagaggttgcaatgagctgagatcgcaccattgcaccccagcctaggcgacaagagcaaaactctgtttaaaaaaaaaaaaaaactgactgcacttgttgacaattattaaaatacttcttctttttctaaatatgtaactgaggccagtttttccttctttctttctttctttttttttgagacagagtttcgctcttgtagcccaggctggagtgcaatggcacgatctcagctcactgcaacctccgcctcccaggttcgggcaattcccctggcttagcctcccaagtagccgggattacaggcttgcgccaccatgccccactgatttttgtatttttagtagaaacggggtttcaccatgttggccaggctagtctcgaacctctgacctcaggcaatccacccgcctcggcctcccaaagtgctgggattacaggtgtgagccagcgcgcctggtgaggccagcttttcttaatattaatatattatacttcaactaaataagtcacaaaatgttgacatgttagacaaagtagcaaacataaaaaaccaagtttgctcattctgcttgccagcagaatttcacaaagcccaactcagtgactaagtatagacttctagaagaatgccctggaaacaataagcaggttagagcacaggttcccacgtctcttgcttcaatcaatgcattttttaaaaaaaggtaagttcagtgttcctaccccttgcctcttccagtacataagatagtgtcccataggattcatgattatgcctctgtaatctataaccagatgtactcttacacccaaactttgatgagattttgctctaatgtaatttatgagcttttttttttttttttttttttttttttagagacagagtctccctttatcaaccagactagaatgcagtggcatggtcatggctcactgcaacctggaactcctgggctaaagtgatgctcctgcctcagcccaccaagtagctgggactacaggtccacacctggctgcccaggttggttttgaatgcctggcctcaagagaccctcatgcataggcctctcaaagtgctagaattacaggtgtgagtcactatacccagtttatgagcatgtttaatgtaatttctgagcacatgcagagcttccaacccctgacatgtaagctgtgggctaaaagctactttggagcagtcttaacagaaactctctgaaaggttgcaatcctgagtctgaatcaaactgactttaattctttaaaagagggttatttttcttcaattgacagcagatacagatatgagaatccagccatccgttactgagccagacactaaagagatttgcaaaaatatgaaataatcgcattcttctccctgttttagaaactatagtgatttctcattttaaaaaagtgttatattaacatggattaagcttggtatgctttttttttttttttttgaaacggagtcttactctgttgcccagggtggagtgcagtggcacgatctcgactcactgcaacctctgcctcctaggttcaagtgattctcctggctcagcctcctgaacagttgagactacaggcgcacgccaccacgcccagctaatttttgtattttagtatagacggggtttcaccatattggccaggctggtctccaactcctgaacttgtgatccacctgccttggcctcccaaagtgctgggtgctgggattacaggtgtgagccactgtgctcggccttgttactcttttaaatacaatgttaaacattttaattttcagtttgagttattcacaaatattaatagatgtaaccaacatgaaacaaaaactctctggaatcctgaataatttttaagggtatcaagggggtcctaagaccaaaaaaattcataattatctgttctagggaagaggtcagcaaacttttcctgtaaagtgccagagtccgtatttaaggctttgcagtcttttgtagaaattactcggtttagcagttgtagtgggaaagcataggcaatatgccaatgaattaagttagttagattacactttggggagctttacttctatgcaggaatatcacagcaacgttgttgaatcttccaatttatggagttgaaaactttgtgtattttgtctcaaattaaaaacaaactcggtgccagaccaccacttttcaatctatggtctaccaaataaagtaaactcacagctagagacccaactgcctatctatataccaatgataaaaaatccagtttttcttggtatattggctatgtcaaattttaagtgtagattggtaacatcaaagaactttcaattttcagaaatgtagtcaagtctttgagggagtaaaaatgtaattcaaatagcaaaagaccaatttagagtaattcagttattgatttgtgaaattctgaagaacataactggaagctttcttaggtgagattctaaataagagcagctttctaaaaagtgctttgatttacccactcaggttgccttctgtagtaaatgaagcctcttttacctctctgctttctcctatcctgctatagtttatacctatccaaatagaaaaattataatgaagccctttgtctctgcttgaagcaccttaaggacaggaaacactgtgttagtttgatagtcccagcaccaggcacaaggcaagtattcagtttcttaggattgtatgaactcttgggttcctatctcatacgagttcctatactagcgctgggaatggaaagatgaattagaactgtctgctatctctgccacgataaaaagcacggcagcggtccacctgcactcagcttcttcttaaacacgtattttatactaaggggcaacaaagtcaaaagacagcgacacgcaaatggaaaagcctgatgaattctaatttacactgaagcccgcgaagaatatagtgagatactggtttatatccctctctgtgacagcgacctaccaattcttaactactctcacaaaagcagttacttggagaaccaaactgcgcgctcatgcgcgaactcatatagctgcagttagcggataccgacgcgggaagttccaagactcaggtcgagcacgcgcttaaaccaacggaacctgaccaacctcctaggccagacacacgacctagctcccacctaccgtatccctcctccctccttcctcctcaccctatccaaccccatcccgcccctctccttccctgttccctcccctttatccttcccttcctttccctccctcccttccctaaataacctaccctaattttaccctgccacaccccaaaaccctcaaccccctcgaaagcatcagcagcctcctagctccacccacaacctctagccccctcccaacagcttcctcttcccaggccagaacggcgtcttccagttccccaccggatgaagcggaagtgcgtcatgtcgaggcgccaaggcgctcgtttggcgcgcgcgccctaggcggcggatctaagctaacttcttggatcttttcttgtttctccttggtttttgactttttctggaccctggtgtctacgatttccgagatgccgtcttctttgttgggcgcggcgatgccggcctctacatctgccgcagccctgcaggaagctctggaaaatgctggacggctcatcgaccgtcagttgcaagaggaccgcatgtacccggacctttccgagctgcttatggtgtctgccccaagtgagtgatagtgaccctgctttctcaacctaaaggactctcgcctgacttcctaatttgctacttatccccagcgttggtcccggcgaggatatgctgagatttatggcactgttggctgcatttttggagaacagcaagcagcttcttttcaggttttttcctttcctcactttcttcattgtagatacttgagagggcaagagtgaagagcaagctcccagttgaagcagaaagaggcaaagacctcaaccttaatgagcttctcgccgctctcaagtgcttatggctaaggccatatgagaagcatctccagatccaagtcccaaatttgttcatttctcctgttagtgtttgagtagatcgtaagagcaaacgaagttaatttggaaatttagcatgttatcttaaagatacgctttgctttatatttatttgtttatttattgagacggagcggttccctcttcgcccaggctgaagtgcaatggcgcgatctcggctcattgcaacctccgcctcctgggttcaagcgattcttctgcctcagactcccaagtagctgagattacaggcgcctgccaccaagcccggctaatttttgtgttttttaagtagagacggggtttcaccatattggcctggctggtcacgaactctgacctcaagtgatccgcccgcctcggcctcccaaagtgctgggattacaggcgcaagccactgcacccggccaagaaacgctttattatgtgtagagatgtgtgttatgaaatgctggaggatcttaaaagaactaccagtggaataaagaaagagaacagggaaatcacagtgcttatgtacagggagagtaaggcagaatatgtgttgacaatataggtgactggaaagtaatttgtttaacagttttaagttataaccagctccccacggcttatggaattacatcagttgctagaaaaagtgacc

SEQ ID NO: 10721 - DNA, 6000 bp, Homo sapiens
attcttacaattttatgttgtcttagcatttattttgaatataagttggactttctcatatcagaaacagggttcagtcacccttgacaccgtttctagttctacacctcctcccagttcctcaatgtgatcaatccaggtatctattgtgtaaaacttcctcctggtgcccgcctccccataggataaatacatacagcctacttcaccggccctgctgacactgacgtcctacatggactgtgcagatatgccacagtgactacctcggtcacagcatgacttccaagaacggggtgtccaatcttttggcttccctaggccacaatggaagaagaagaattgtcttgggcaacacattaaatacactaacaacagctgagaactttaaaaaaatcacaaatctcacaatgttttaagaaagttaacgaatttgtgttgggccacattcaaagccattctgggctgacaagcttgtcctcaaatttgtgcatgcttgctttaaacccaccaattaaagtgtgggaattcctcttgggaaatctatttggaaaacaccatgaacccaataaatgcattggctcatgagtccctctttgtctttccctgactgcattccttgacctccaggtgcgccagatgccccgccaggcatgtaagtaataaaatctttgtttatatctgtgtttctactaatcattgaagaagcatgctctatcttaaaattcctaaattaaaacagtcccttaaaataaatcaaggcagtaggattcaaaatgttgtagtagtcactgtatttttcagttacataggcgttgtaagcaaaatcagtttcccttaggaatatccttaataaagccataaacagtattcatttcgttaaaccctgacccttaattatacgtctttttaaccttcagtatgacaaaatgagaagtaatcataaagtatgtttttaaaaaaatttcttacagatggggtctcactgtgttacccagactggagtgcagtggctatttacaagttcagtcatgaagcactttagcctcaaactcctggactcaagcgatcttcccctgcctcagcttcctgagtagatgggaccacaggcatacgccaccatgcccagctaatgcatatctaagtagaatggtcatcgaaaagaaaaccacttgtaattgagtggttagcttttttcatggaacattatttttacctgaaagaatgactcacaaagtacagttgttcatatttaagtatttggcaaacattttttcaaaaataaatgaaatgagtttatcactttaagaaaaacaggtcaggcatggtggcttacacgggtaatcccagcactttggaagccgaggtgggaggatcacccaaggccaggagttcgagaccagcctggccaacatggtgaaaccccgtctctactaaaaatacagaaaattagccaggcgtagctgggtgcggtggctcacgtctgtaatcccagcgctttgggaggccaaggcgggtggatcacctgaggtcaggagttcaagaccagcctgaccaacatagtaaaacccccgtctctactaaaaatacaaaaaaatgagctgggcatggtggtatgtgcctgtaatcccagctactcggaaggctgaggcagaattgcttgaacctgagaggcagaggttgcagtgaacagagatcatgccactgcactccaacctgggcaacaagagcaaaactccatctcaaaaaaaaaaaataaagaaaagaaaattagcctgtaattccagctactcaggaggctgaagcaggaggattgcttgaacctgggaggcagaggttgcaatgagctgagatcgcaccattgcaccccagcctaggcgacaagagcaaaactctgtttaaaaaaaaaaaaaaactgactgcacttgttgacaattattaaaatacttcttctttttctaaatatgtaactgaggccagtttttccttctttctttctttctttttttttgagacagagtttcgctcttgtagcccaggctggagtgcaatggcacgatctcagctcactgcaacctccgcctcccaggttcgggcaattcccctggcttagcctcccaagtagccgggattacaggcttgcgccaccatgccccactgatttttgtatttttagtagaaacggggtttcaccatgttggccaggctagtctcgaacctctgacctcaggcaatccacccgcctcggcctcccaaagtgctgggattacaggtgtgagccagcgcgcctggtgaggccagcttttcttaatattaatatattatacttcaactaaataagtcacaaaatgttgacatgttagacaaagtagcaaacataaaaaaccaagtttgctcattctgcttgccagcagaatttcacaaagcccaactcagtgactaagtatagacttctagaagaatgccctggaaacaataagcaggttagagcacaggttcccacgtctcttgcttcaatcaatgcattttttaaaaaaaggtaagttcagtgttcctaccccttgcctcttccagtacataagatagtgtcccataggattcatgattatgcctctgtaatctataaccagatgtactcttacacccaaactttgatgagattttgctctaatgtaatttatgagcttttttttttttttttttttttttttttagagacagagtctccctttatcaaccagactagaatgcagtggcatggtcatggctcactgcaacctggaactcctgggctaaagtgatgctcctgcctcagcccaccaagtagctgggactacaggtccacacctggctgcccaggttggttttgaatgcctggcctcaagagaccctcatgcataggcctctcaaagtgctagaattacaggtgtgagtcactatacccagtttatgagcatgtttaatgtaatttctgagcacatgcagagcttccaacccctgacatgtaagctgtgggctaaaagctactttggagcagtcttaacagaaactctctgaaaggttgcaatcctgagtctgaatcaaactgactttaattctttaaaagagggttatttttcttcaattgacagcagatacagatatgagaatccagccatccgttactgagccagacactaaagagatttgcaaaaatatgaaataatcgcattcttctccctgttttagaaactatagtgatttctcattttaaaaaagtgttatattaacatggattaagcttggtatgctttttttttttttttttgaaacggagtcttactctgttgcccagggtggagtgcagtggcacgatctcgactcactgcaacctctgcctcctaggttcaagtgattctcctggctcagcctcctgaacagttgagactacaggcgcacgccaccacgcccagctaatttttgtattttagtatagacggggtttcaccatattggccaggctggtctccaactcctgaacttgtgatccacctgccttggcctcccaaagtgctgggtgctgggattacaggtgtgagccactgtgctcggccttgttactcttttaaatacaatgttaaacattttaattttcagtttgagttattcacaaatattaatagatgtaaccaacatgaaacaaaaactctctggaatcctgaataatttttaagggtatcaagggggtcctaagaccaaaaaaattcataattatctgttctagggaagaggtcagcaaacttttcctgtaaagtgccagagtccgtatttaaggctttgcagtcttttgtagaaattactcggtttagcagttgtagtgggaaagcataggcaatatgccaatgaattaagttagttagattacactttggggagctttacttctatgcaggaatatcacagcaacgttgttgaatcttccaatttatggagttgaaaactttgtgtattttgtctcaaattaaaaacaaactcggtgccagaccaccacttttcaatctatggtctaccaaataaagtaaactcacagctagagacccaactgcctatctatataccaatgataaaaaatccagtttttcttggtatattggctatgtcaaattttaagtgtagattggtaacatcaaagaactttcaattttcagaaatgtagtcaagtctttgagggagtaaaaatgtaattcaaatagcaaaagaccaatttagagtaattcagttattgatttgtgaaattctgaagaacataactggaagctttcttaggtgagattctaaataagagcagctttctaaaaagtgctttgatttacccactcaggttgccttctgtagtaaatgaagcctcttttacctctctgctttctcctatcctgctatagtttatacctatccaaatagaaaaattataatgaagccctttgtctctgcttgaagcaccttaaggacaggaaacactgtgttagtttgatagtcccagcaccaggcacaaggcaagtattcagtttcttaggattgtatgaactcttgggttcctatctcatacgagttcctatactagcgctgggaatggaaagatgaattagaactgtctgctatctctgccacgataaaaagcacggcagcggtccacctgcactcagcttcttcttaaacacgtattttatactaaggggcaacaaagtcaaaagacagcgacacgcaaatggaaaagcctgatgaattctaatttacactgaagcccgcgaagaatatagtgagatactggtttatatccctctctgtgacagcgacctaccaattcttaactactctcacaaaagcagttacttggagaaccaaactgcgcgctcatgcgcgaactcatatagctgcagttagcggataccgacgcgggaagttccaagactcaggtcgagcacgcgcttaaaccaacggaacctgaccaacctcctaggccagacacacgacctagctcccacctaccgtatccctcctccctccttcctcctcaccctatccaaccccatcccgcccctctccttccctgttccctcccctttatccttcccttcctttccctccctcccttccctaaataacctaccctaattttaccctgccacaccccaaaaccctcaaccccctcgaaagcatcagcagcctcctagctccacccacaacctctagccccctcccaacagcttcctcttcccaggccagaacggcgtcttccagttccccaccggatgaagcggaagtgcgtcatgtcgaggcgccaaggcgctcgtttggcgcgcgcgccctaggcggcggatctaagctaacttcttggatcttttcttgtttctccttggtttttgactttttctggaccctggtgtctacgatttccgagatgccgtcttctttgttgggcgcggcgatgccggcctctacatctgccgcagccctgcaggaagctctggaaaatgctggacggctcatcgaccgtcagttgcaagaggaccgcatgtacccggacctttccgagctgcttatggtgtctgccccaagtgagtgatagtgaccctgctttctcaacctaaaggactctcgcctgacttcctaatttgctacttatccccagcgttggtcccggcgaggatatgctgagatttatggcactgttggctgcatttttggagaacagcaagcagcttcttttcaggttttttcctttcctcactttcttcattgtagatacttgagagggcaagagtgaagagcaagctcccagttgaagcagaaagaggcaaagacctcaaccttaatgagcttctcgccgctctcaagtgcttatggctaaggccatatgagaagcatctccagatccaagtcccaaatttgttcatttctcctgttagtgtttgagtagatcgtaagagcaaacgaagttaatttggaaatttagcatgttat

SEQ ID NO: 10722 - DNA, 6000 bp, Homo sapiens
ctctgctctcggcctgcggaggccgtgcgagccaagactgcctcccggccctgcccgttaccaaccccaagttcaagagaaacgacaaccattatgttacttgcctggtgaggcaggatttggccgagtctcgtttctggtgcccacgacgcacggtccagggtccgagggcggctgggccggcggactgggcatccagtgtgcctgcggtgccctggcgctcgctgtcgctggtctcccactcccttcgtctctctccgcgttctccttccctcgccctatctccctctctccgcctgctgcctctgccctcgactccctgcctctgactgtatggggagtacgatttagaatctgtacatagaaaggttttcttttctttcttttcttttggtctattttaatcgtgttcgtttcaccttttaactgaccagaagacgggagcgcgtttgcgcgtttatttgggcatagggacgagggcaaggagcccctgctacccccagtcgcctcctcgccatcagctgcgtacaatgggccaccgctcgcggagtgcattgacagttctccattattcgagctggaggggctgtggggcaggcacgggaaaaccttttattctgctctttaaaatcatcgctcgtcactaagcggtcgccgactcccgacttgtaggctggagagaccaggaagcgcaaaacgtcccccaaacacgcagtgcttcccaaacccctccctggtgagacttaaagtgagaacgagtattaaaaaacaaaccctacctctgtcaatacagcgtggccatttacttccacctttacctgagggcgtgttggcgctaggaatgctcgagctgagacaaacttttacgccctcgcgagtcgaggggcgggcgggcgagcgcggctcccacccccggcggcggcagcggcggctttgtcactccgcgcggctccgcgcccgcctgagcctgcctaggggagcgatctcaaaacgaggggggtgcgagtatgcgattggagaatatgtaactaatagaagtatcattttcccccagtacgatctttcaaggaaaaaaaaatccattgaaagaattttcaaagtgctgtcttcgtttggagaaaaggcacaggctgcctgcggggaggggaggagggactcggctgtgtgccgcccgggagcggctcccgtccgctaggtggcagccggagccagcgattcctgcaagccccgccgcgggacccgctcctcccgcctgcccctcctcccgcgaccaatcaccttcaggattcaggaatcggggtctcggtctctctctctctctctctctctctctctctctctctctctctctctctctctctctctctctctccccctctccctctccctctccctctcctctctccctctccctctccctctccctctccctctccctctccctctccctctcgtctctctctctctctctctcctctctctctctctctcctctctctctctctcctctctcctctctctctcggtctctctctctctctctgggtctctctctctctctctctctctgggtctctctctctctcctctctctctgggtctctctctctctcctctctctctctctcccctctcctctcttctctctctctctctctcaatatctcgcgcgctctcctctctcctctctttcctttcctctcctctctctctgtctctctctctcctcctcccccttttctctctccctctccgcctccccccctctccatcttctcgtttgtttgctcttttcccgggactgacttggccacactaatctccccccaccctgcaacaatatggggacttactactgttttattaataatgattgaagcattgttggagtttggaacagccaggtgataaaaaaaaaaaaaaagaagaaggaaaaattggattgattggaaagtttatttttaaaatcatctttgggataaataggaacccttgattccgatcgaatttgtggcaatagctgcaaattccaggagtgtgctttgtcatcattaaaccttttaaaccaaggtatactttggattaaaaaatagggagatcctaccctgtttctacttgtttctaaaaaggatataaaatgagcagaatccagacttggattgtgcttatatgtgagagaagaaaacaatccaaatccagtatatttcacaaatcattaaaatggtgggggtttcattcccattaaaaatttttccaaacattttcaatgacactctcttcacgctcataaaatctaattttaaaaacttttcagaagaaatcaaaataatttccctctaattctccttttgcccatcgctaggcgttctccccctcgtcatcccttccccctctggggtgtgagcgtaagtgtgtgtgtgtgtatgtgtgtgtgtgtgtgaccatagacgacccatactaatcaggtctcagagtaaatagcagcgcagggcgatctcaatgtaaattgcgcttgtcagaaacacacccccctccctcactttctctcctcctccccacaccatcccagtctgtaggtagctaagcgggggggggagaaagaaagcaaaagaggaggggggaggggctctccaaccaatggcgtgcaggaggcttggctaaccttagcctcccattttctctccccccgattcagggctctgaccagtcagtcgcctttgattatcagttgccagcagcccttctcttggctccttgacacgagctccatataaggcagcgatctccatagaaacgtgtcagtttcaatagtagtgtcaaagttcactatatacagacattcgcgcagatccccctttcggaaacattgctctgcgagtcctcccgtttaaacgcattcaatttttgggtctctctctctctctctctctctcttcttctcttctctctctctctctctctcctctctctctctcctctttctcccccctctctccctcctctcctctctctctcctctcttctctgaacctctcttctctttctcttttcttacatattctactagttgttttccccttcttcttctcctttctctcctttttctccctcctccttgtctcttttactccattcctgcagaagagagagggctaaacttaaagaaaaaaaaaaggaggaggaggaggaggaggcacccccttcgtattcttcttatcgttattttatacatatatgattttttttggagggagggtgttggttgccggctgaagagcacttatttaaaatactaaaaaaagaacatttttgggcgatctccagggtttttttaactagctctgtgtgttatagcagaagaagcagaagaaggagcaagaaagaggaaaagaagaggattatttattcgacctactttggatgtctctctcgcttttcctttttcctttttttggcaattattttcttctgatttttattttttctatttcgctgtgatttcgtcgccggcgtgaattatcccgtatttttctcccccttccgtcacctcccgaaagaagaaggcagcgagagcccggcgccaccggcacaacaaaaagagcaaagtgtgtgatcttcctcgccggctgcctcccgctctccagcgctgccttcctgaatggctggctgcgtccggccctggacctggccccccgacacccgcgcgccctgatcgccggcggcagcctcgcccagcgccctgctcggctcaccgcgctccccgcactcccgagcccggcgagggctcccgccgggacagcggcggcgccgcgggcggccccggcctccgctcgcgctccggctgcggccccgactcctgctcggactccggcccgggtcccggctcctccagcggcgctcgccgcagcagctccggcggcagctccagcggcgcctgcagccgcgacctcctcctcctccgccgccgccgccgcctccgccctcgccggcttcctctatgtcggctcagcccgcgcgctgcgcgtagcccgagcggccggcgggcgggcgcccggcgcgggtgagcgactgtgtgtgcgagtgtgtgtgtgcgcgggggtgcgggcgaggcggagggcgagtgtgtgcgcgcgccgtggcccatgcccgccgcccccggcgctgcgccccgcgccgctcccggctgccgcctgtgccatttctgattttgcaacttggggaagaagaaaaaagcgagagaagggagcttgctcgccggggggtggggaggggggaaggagagcgcggcccccccaggaacggagcgcggggggagcgggcgaggggagcaggggtgttggggggggagcctgagagcctgggggggctgcaaaaagagagaaagaaaacagcaggaaccacaacaaaacgccagcagggcgggcgggcgcgcagcagcagcggggcggccgaggcagtagcggcggcagcggcggcggcggcggaggcagcggccggtgtccggctcgggctcggctcctgcgaccccggggcgcccggcgggccccccgccccctccccctccccccttccccttccccttcccctcccagcgcgcccgcgcgccccgcggccctcggcgagcagctcggctccccccagcgctccccgggcccaaagatatggcaatggtagttagcagctggcgagatccgcaggacgacgtggccgggggcaaccccggcggccccaaccccgcagcgcaggcggcccgcggcggcggcggcggcgccggcgagcagcagcagcaggcgggctcgggcgcgccgcacacgccgcagaccccgggccagcccggagcgcccgccacccccggcacggcgggggacaagggccagggcccgcccggttcgggccagagccagcagcacatcgagtgcgtggtgtgcggggacaagtcgagcggcaagcactacggccaattcacctgcgagggctgcaaaagtttcttcaagaggagcgtccgcaggaacttaacttacacatgccgtgccaacaggaactgtcccatcgaccagcaccaccgcaaccagtgccaatactgccgcctcaagaagtgcctcaaagtgggcatgaggcgggaaggtgaatatttcttctctgcttctctccccgcgcttcgcccgcctccctggctctttctttctttctcgcccgggtggttgctgtgtggggctggggctcctgtggtcccggcccgtcccagctttccttctcccggctgccttcctcccccggcgtctccccccgccctccccagctcgctgccgctgcctccccctcccggcctgcgctcatctccccggctcccccaccccgcccgctgcctgctcaggattgtgtccctgagatcgtgagctgtggcttaaaatccccttcttccctctgtcttggatgtgctcggtgtgtgtctctttcccgcgtgtgcgtgaggctgcttggggctgtgctggcatgaacttggggaggggtgcttatttcccccagaaaactctgtttctgtggttttttttcattccacttttccctccacctcttcataccctttatttaaaatgggggagggctgggggctggagtaccctgaaccatagattcattgctgccatcatccttttggaagcttagctcggaaaaagaggagtgagatttattgcacttgtaggtctaattaggggggaaggggggcttctggcccgttcactggttccctctcttcttcacggagctggggccgcctcctccagagctgtggccttgttttcacccctctactttgaaaggaaagtttgtgactgaaccgtgctttcatagttgtgtcattttttttaaagcatgatactcgttttatttcttcatcaaactccaccctctgcttaaatactgcatacaaattacaatttacaacggcatttaccgatccttctgatttggccgtaatgcatagactgcagctagcat

SEQ ID NO: 10723 - DNA, 6000 bp, Homo sapiens
aatccgtgggtggggagaggaaggaaacagctcctagacccatcagaaggcatggtcctggtgttcaccagctatgttcaggattaattaccaaaggcctccatgcctctcccaagacctaactgtttagtcagaaggcagatgctgttcctgttcagtgggaacaaggagctggaactaggatgggagtttgtctctgggcaagtcatgcttcctttctagaagatggggataacaataatacccatctcagaggagtaaatgagtatcctgcagggtagctggaacagaggaggataagctacaactgttattgtaacaacaggcagagcccttgctggagttgtgtttctaggggaggaaccagtgtcttctggacacagaagagtgagctttctactgctcagatgccatcacgtcattatcctcctccctcaccttccatggctgcttactgccttccagataaagcttcaactctttaacttaaccaaccaagccctgaagggtgaggctctgtgtctgccccatccttggttgagcctctttctgcactcattacctctgccccggcacatacactagacatgcttgttgtggtcagttcctctgaagcctggtgtttctctggactctgctggaatctctgcctcttccccttcttgcctggctattcctgaatatcctccaggactctctctggatgttgcttcctcaaggatacccctgagttagtttcaagggcattctcagcttctccagcacccttggcttctctctcagtactcagttctctgccttgttattacctgtctgctttttccacaaggctgtgacggggagccccaaaatatttatggaattaatgaatgaaaaggggtggttctaagaaaaaagagatcactgtacattggccaaatgtcccaacaggtatctattatatctcaccagggtaggaattatcagtaaccaagatttacagatgaggaaactcagcccaaggtagagtccctctgcctgtcattcaaatttctgggcacctgtgtgtaagcaccatgctgggcttttcacaggcagtatgtgtagggtggacaggctgagagcaagcacgtgaggcccatcataccaggtgagagttaaggtgctgacaccttgcatgagggcttagtctcttggacctcaattcttcgtagggctggtgaagggtcataggaacgactgtatgtgaagtgcccaggacagtgtccagtacactagtacagacccagcaagtgtttactgattcttatctcagtcctaaggatgggagtcacaggcccagaaaaggtccctggattgagacaaccagccagaggagagctgagtgtacatcccaggcccccaccctacagggacacagtcctctcccttctgcccccactcaaggagtcagtgtccttgtgagaatctatggcgctgtggatcttctcaacctagtgctggcacacatgagatgcttggccagggcctgccagatggggaggctggagatgggtcggctgtgattgagacctctgtggccaagttttactctaagaggcaggtaaggccctcaggggttatcccagagaagtctgagaggttttccctggggtcctggtcttctcccccagacctgtcagcaagcagttcatccccagctgccaatctccttttggccctcagtcttccagaggagctgggaggtgggagagaggggttctgcagggcagtgttgttcagaggtgagctttggaagaaactgttgtctcaaccctattttcacaccatagcacctttatttaactgtcttttcccgaggccaggatctcatcttttgtttccccagcactcagcacactgcctggaatgcaggaaatggttgctgaatgaagcgatgaattacatttcagcactcatcaagtgctcagcctataactaagtctgagtgtaggctgctaacacttagacctttaccttacagaatcttcgcagccagtgctgtgcattggaagttgcagatggggaaactgaggctcaggactgttaagtgactagttcaaggcaggtctcaggccctcaggatggttagtggcaaagtaaaggactgggaggagcattgatgaattggggcaattggcagaggagtaactgtcagtcaaaatgattggctcaaattattaggtgtgaagaaggaaccagtcagagcttgcctgttgagtcgaattgcccagatgggattagcagggtgagtgaccctagcagaacaaagagctggcccttgtaggtatagactcgacttttctctggttggtcccaacacatagacaactaccaacctgactttgcacctgagaatcttcagggtacctcagactcttcaacagaaggagcctccctgaggtcacagccctctcatcagtcccgttccagtgggcactttccctctaacaaagcccacttgctgtcttggcagggtctgcatccggcacttgcagacatgtgctaagggcctgttgacttgggagcctccatcactggactgtgggccttggagagcaaaagggtaagagcatctcgagctccacgcctgctgggccagtcgctggctgaaggcaggggaaggatggagtttagctggccagcactaatgtcacacagggcaacgccaaaaatggcctttctcccaggtgggctcaaagttaacagaaggcagtgagtaaacagtccactggggcaataactatgcacatttactaagccatgggaagaatagtagtcacgtggccctcgagggcggtgccctcagcttgagatggagttaactccaaatctaatcacagaaggctttctggaggaggcggaatttttatggcggccggatccggctttctctgaacagcgagaaggcgcttagcgccctagggaccaggtaactcctgaggtgagcttcttggtggggatcaagcccagggggcgacggagtccgggctgggggaagggcccgaggggctggagtcgcaagttcaggcccagcttgggctccctgtcccgcccttccgctgtcttgggggattggacgccacgcggtcgtgctagattcggtgctgcgggcccggtgcaggatgcaggccgtgaggccccaggccgagggctgcgccagcgggcttgtcccggccagccgggcggtcccgtgtcccggcgcagctccgctggggtccagatgcccggccctcaggggcgaggcgcgcactccccggggaaccgggctgcggagcaggcggcccgctctgggcggcggtggcacgagagggccatctgcctgggtgccgagaactgcagcgtccgcggtgcgaggcgcggcccgtcccgtcccggcccccagcccggcgcgcacgcacatacccacgccggccggcgcccgctgcccgagcccccgtgccaggcccagaccttgactaggcgcgggaggcggtgcagggactagaggaccccctcccccggcgttcccctcgccccgcccgaggctgcgaggacccctgggctcgggggtggtgagggagcttcgtcccggctgggcccgggctggggactcggcctccctgggcgggggccgcacggctgcaggccgaggtgcggacgcgctgtcaggctgcagcccggctcggtgccgggggtgggctcagcgctggggtcgcctggcttcgttcccccgcggaggccacggccgggcgagcagtgccggggcgggtaacccgacccggctccccagagccgctcaccccgcacggcccggcaaggggagggagagggatggggggagggggaagggaaggggtggtgggtgaggggctgtgggcaccgcagggccgagtccccggcccgtctgcgctgctgtagggcggctgcccgcggcacccgggacgatccagcctctgcctcgcgggcgtcgagcctgagacaggagggagccctggggctgcacaggcttggctcagggaggcagacccgagctgctgcctccattttgtttcctgctcagcttggtctgtggtggtggtggtggtggtggtgtgggtttggggtgcggccgggtagggggttcgcctgcggccgcgtctgctcggggcctgaggcctcgaagaccccagcccaagcccccaggtgagccctgcggcaggaggggggttgccttggcctcgggccgaacccagcgggctgagggcaggtgcccagtggatggggagcctgggctgtaacctaagatggaggccgggactgacgcgggcccgagcagggctggcgggacgatcggacaggcctcagccgcgccaggtgccgcctgggttggggttcgagacgcgtagggtgcgggagccgtgtgcggcccgaggccagcgccgtgccccgaggtaggtgaggggatcggaatgccacccacgacgcccgcaggccccgacactccaaggaggcgcgcgaggcccctggggagcccgcctcaggccccgcccgggcagccgggccggcccgtaggccccggccgcgagcgggcgcgcagggggaggggagggggcggcagcggcagctccgctgattgggcggcgctctcacaagcccgacttcacccgccctgaaccccgaagagtgagagaagggaacgcgcgcgctcggtgggggaaggggtgcgcgcgcactcggggcccagccgcacgcgggccggcgcgaggcgctcggtcgcacgcgcggccgcgggggcgcgcgcggtgggggtgtgaggaggaggaggcggcggcggaataggccggggcaggtcgcgctcgctgccttctcccctgaagagagacgcggggggaggggggtgcggcgagcggccccgctctctccccaccgctccgctcgcaccccagtgtaatgagggtcaccccctccccccagctggcccgggagggggcgcggggcacggtaactagtgcgctggggtgggcggcgggcaggcgcgaggagaagggagggaggagggtggccgggcggggaagatggtggtggccgtaaggtgaggggctcgggggagggccaggcgcgatgcggggttggtggccggcggcgctgcagccgccggcctcctccccctccccctcctccatcactaccagccgggctcaggcctagctggccgggctgccgcgaacttcctcccggcgcggcccgtgccccgccggccgcctgcgaacacctcggcctccgcctcccctcaggtagcaggctgcggggcgcggggccggctgccctcccgcagcaaactttgcttgctgctgaatattgatgagagcgatcggctcggctgggaggtgctgccgcggctgcgggaaggagcgcggcccgggcaggcggcggcggcgtcggcagcagccatgtttttcgagctgtagcagctgctgctaccctgactgggcttcgctggccgcctcggtttctccctctgccgggtccaggcctcttcgccctgcagctgcggatccagcaggcctgcattcaggaaggcgagctctggggtgcagccgcctcggccggctcgcctgcggcctgcgcaccgccgctgcaaaggctccggcgctggctgggcgcagggtgcagcgctattgtgaccgctgcgccctagcgagccaggaaggggggggtacctttttgtgcagggtccaggagcccccctcggaccccgcagccttttgcttttgagagatccagctgctcgacccctggcgagggagggggaggactagtcctgtttgagaattgggaattttgacgggcagaggggttttaattttagttcatcccaagtgtccaccagtctacagaggaggaaaaagagacgggctgtttctatgtagcaggatcggcccagcttcgggaaaatggagttttcagaggctcatcgaggccattttttcatctccagtcgggggaactttttctgcccat

SEQ ID NO: 10724 - DNA, 6000 bp, Homo sapiens
ggtactataggcttacagcctaattcctttccccaagcggagcggtaccttctcatcgcctttttggggaactacactaaagatctagtgtgcactgaacaggtctgtgggaaccaggaaggcagaggaaggaagggaggctcccgggagcccaggccccggcaaggcccttacagttcccagacccgccaaaccgaaagagagaccctggagagggctgagcccctgtgggcctggctggaggcctcgggtaggatgctgaggcaagagccacagcggtccgagtccaagaaccacgtccagactcagcttaaggttccgaggtgaaaggcctggcctagaagggagggagagagatctgaagaagagggggtgggtgaaagaaacgtggacactacaactgcgttttctgctcctgcagctgagcgtgcctggacaagtatgtaggatttcccaattgggggatctaagtactctcgaaaactatgatcagttttctattaggtaccctaccccacaacaacagatatcattatttcctggttgagtgtgggtcgcattaggcccaggacaagtgtgccaattgggaccagtatcaaaagagagccttgaagaaagaaagaaagggcttcccaggaactaagctgacctctcagtgcctctagggaagacatttttgctggaggcagggctatgagcacaagtggggcgccctgtgggtgtgcaaccgcggtcggggagcacaggcttccgaagagaaactgagctctaagtgccactcaggccggacgagttccagagggggacagcgccctcctcgaaaagccttggtttctccccgccccctcttgtgacagaaagttggcaaggatgccccgtaggagtgcgagccgctcccctcctccgaaaagccgcgggcttccgctgctccgggcatcaccaccaacagcttcccactcccacccctgggactaggacaggggacttcaccctcctccttccttccggaggagcccgcggcttcgcctgaggcctcgcgggcccaacttctccccaccgctagggtcacgccgggtcccaggggcctctttcaagtttgaaagctctgtgggggcacggagagcccacagtaaggatgggtgggcgcctctgctcccgggcaggctcagctgtcatcccgtctcgccttggccctcacctacagggcctgaccccgggccagcccagctaggcaaggcctcctcgcttccgagaccccccagcccccgggtgcagtccccagcatcggctgcccccgccccccgcgcgccctctgacgcaaacgcacgcccctgccccgcacggaggaaagcgctcttgttggttttaattgagcctcttcctttcaacacaccccctctgtccccacccctgggaggcgaccccctccccgcccccagccggctggcagcggcgcagggagtctggctcggctgctaggctgcgaatcccggtgctctctcgccgccgccgcaggttgtctgctcgggagagcggctcgatgtcccttttaatccgctgacactatcgcccacatcagacaggcagccatcgatcgcgttacattaggggatggcgttacaaacggcgtccgcaggtgggcggctgcagccaagctcgccaggttcaggccgtaaccaggcaaggcgcgggcacaagggccagccgggccggactctgcagccggctccaccgcgggtcgcgctcggcaccagcaggaacagccgggccggtgttaaacgtgcgggtccccgtcctccgcccgggcatccgtttcccgcctaggagagagagggaatagcgggtgggggtgggagcagcctgttttgaatgtggattgctgctcgcctggcacgatcctcccctccaaggaggcgcggcggccgcgatcctcgccttagcgctacggcgagacagaggccgagcgagggcaactcccgagcaggccccgaagaaagttctcctcgtcccgccctggctgcctagactctgctctcggcctgcggaggccgtgcgagccaagactgcctcccggccctgcccgttaccaaccccaagttcaagagaaacgacaaccattatgttacttgcctggtgaggcaggatttggccgagtctcgtttctggtgcccacgacgcacggtccagggtccgagggcggctgggccggcggactgggcatccagtgtgcctgcggtgccctggcgctcgctgtcgctggtctcccactcccttcgtctctctccgcgttctccttccctcgccctatctccctctctccgcctgctgcctctgccctcgactccctgcctctgactgtatggggagtacgatttagaatctgtacatagaaaggttttcttttctttcttttcttttggtctattttaatcgtgttcgtttcaccttttaactgaccagaagacgggagcgcgtttgcgcgtttatttgggcatagggacgagggcaaggagcccctgctacccccagtcgcctcctcgccatcagctgcgtacaatgggccaccgctcgcggagtgcattgacagttctccattattcgagctggaggggctgtggggcaggcacgggaaaaccttttattctgctctttaaaatcatcgctcgtcactaagcggtcgccgactcccgacttgtaggctggagagaccaggaagcgcaaaacgtcccccaaacacgcagtgcttcccaaacccctccctggtgagacttaaagtgagaacgagtattaaaaaacaaaccctacctctgtcaatacagcgtggccatttacttccacctttacctgagggcgtgttggcgctaggaatgctcgagctgagacaaacttttacgccctcgcgagtcgaggggcgggcgggcgagcgcggctcccacccccggcggcggcagcggcggctttgtcactccgcgcggctccgcgcccgcctgagcctgcctaggggagcgatctcaaaacgaggggggtgcgagtatgcgattggagaatatgtaactaatagaagtatcattttcccccagtacgatctttcaaggaaaaaaaaatccattgaaagaattttcaaagtgctgtcttcgtttggagaaaaggcacaggctgcctgcggggaggggaggagggactcggctgtgtgccgcccgggagcggctcccgtccgctaggtggcagccggagccagcgattcctgcaagccccgccgcgggacccgctcctcccgcctgcccctcctcccgcgaccaatcaccttcaggattcaggaatcggggtctcggtctctctctctctctctctctctctctctctctctctctctctctctctctctctctctctctctccccctctccctctccctctccctctcctctctccctctccctctccctctccctctccctctccctctccctctccctctcgtctctctctctctctctctcctctctctctctctctcctctctctctctctcctctctcctctctctctcggtctctctctctctctctgggtctctctctctctctctctctctgggtctctctctctctcctctctctctgggtctctctctctctcctctctctctctctcccctctcctctcttctctctctctctctctcaatatctcgcgcgctctcctctctcctctctttcctttcctctcctctctctctgtctctctctctcctcctcccccttttctctctccctctccgcctccccccctctccatcttctcgtttgtttgctcttttcccgggactgacttggccacactaatctccccccaccctgcaacaatatggggacttactactgttttattaataatgattgaagcattgttggagtttggaacagccaggtgataaaaaaaaaaaaaaagaagaaggaaaaattggattgattggaaagtttatttttaaaatcatctttgggataaataggaacccttgattccgatcgaatttgtggcaatagctgcaaattccaggagtgtgctttgtcatcattaaaccttttaaaccaaggtatactttggattaaaaaatagggagatcctaccctgtttctacttgtttctaaaaaggatataaaatgagcagaatccagacttggattgtgcttatatgtgagagaagaaaacaatccaaatccagtatatttcacaaatcattaaaatggtgggggtttcattcccattaaaaatttttccaaacattttcaatgacactctcttcacgctcataaaatctaattttaaaaacttttcagaagaaatcaaaataatttccctctaattctccttttgcccatcgctaggcgttctccccctcgtcatcccttccccctctggggtgtgagcgtaagtgtgtgtgtgtgtatgtgtgtgtgtgtgtgaccatagacgacccatactaatcaggtctcagagtaaatagcagcgcagggcgatctcaatgtaaattgcgcttgtcagaaacacacccccctccctcactttctctcctcctccccacaccatcccagtctgtaggtagctaagcgggggggggagaaagaaagcaaaagaggaggggggaggggctctccaaccaatggcgtgcaggaggcttggctaaccttagcctcccattttctctccccccgattcagggctctgaccagtcagtcgcctttgattatcagttgccagcagcccttctcttggctccttgacacgagctccatataaggcagcgatctccatagaaacgtgtcagtttcaatagtagtgtcaaagttcactatatacagacattcgcgcagatccccctttcggaaacattgctctgcgagtcctcccgtttaaacgcattcaatttttgggtctctctctctctctctctctctcttcttctcttctctctctctctctctctcctctctctctctcctctttctcccccctctctccctcctctcctctctctctcctctcttctctgaacctctcttctctttctcttttcttacatattctactagttgttttccccttcttcttctcctttctctcctttttctccctcctccttgtctcttttactccattcctgcagaagagagagggctaaacttaaagaaaaaaaaaaggaggaggaggaggaggaggcacccccttcgtattcttcttatcgttattttatacatatatgattttttttggagggagggtgttggttgccggctgaagagcacttatttaaaatactaaaaaaagaacatttttgggcgatctccagggtttttttaactagctctgtgtgttatagcagaagaagcagaagaaggagcaagaaagaggaaaagaagaggattatttattcgacctactttggatgtctctctcgcttttcctttttcctttttttggcaattattttcttctgatttttattttttctatttcgctgtgatttcgtcgccggcgtgaattatcccgtatttttctcccccttccgtcacctcccgaaagaagaaggcagcgagagcccggcgccaccggcacaacaaaaagagcaaagtgtgtgatcttcctcgccggctgcctcccgctctccagcgctgccttcctgaatggctggctgcgtccggccctggacctggccccccgacacccgcgcgccctgatcgccggcggcagcctcgcccagcgccctgctcggctcaccgcgctccccgcactcccgagcccggcgagggctcccgccgggacagcggcggcgccgcgggcggccccggcctccgctcgcgctccggctgcggccccgactcctgctcggactccggcccgggtcccggctcctccagcggcgctcgccgcagcagctccggcggcagctccagcggcgcctgcagccgcgacctcctcctcctccgccgccgccgccgc

SEQ ID NO: 10725 - DNA, 6000 bp, Homo sapiens
caaagtgctgggactaaaggcgtgcaccactgtacctggcctcttatgctttgtaaagcattgtctggcaccaaaggctgtttgttcctcaaacatcttgaatcctttttgggaggatctgagttttgtacaactcatttggtccgttattgaaaccacaattctgtctgatggagacacaggcttggagaggagaggaggggatagatcaggcatcatgaaatgtttctggagcactcactctgagcttcacggtctgggcttgttcactggaggtcagagagtatatgtccttagtcttgttggaagtgactgtccaactggatgagaccagatttagaagccattagttactaccaggactcagggaaaatggctgcctgtaggggtgggaagactaccaggaggaggagtcttctaaacaggatgaatggagtctgcccaggggaaaaggcagagtgactggcatgagcataggctggacaggatgtggcttgtcctggcactgggcagttgggggaagtgagagcaggagggcagggattagtggccaccataccaagcttcagaaggaggtttaagaagaagaaaacttaaaggtggatgcttgagtccttcgggctggggctgggcgtacaggctcaggttagcgacaggacctggtatttggggcaggaaggagactgctggagggctgcctggtctcagatgtggtcaggccttccttgatcttaagttgaaaactgattcaattttggggaaatccgtgggtggggagaggaaggaaacagctcctagacccatcagaaggcatggtcctggtgttcaccagctatgttcaggattaattaccaaaggcctccatgcctctcccaagacctaactgtttagtcagaaggcagatgctgttcctgttcagtgggaacaaggagctggaactaggatgggagtttgtctctgggcaagtcatgcttcctttctagaagatggggataacaataatacccatctcagaggagtaaatgagtatcctgcagggtagctggaacagaggaggataagctacaactgttattgtaacaacaggcagagcccttgctggagttgtgtttctaggggaggaaccagtgtcttctggacacagaagagtgagctttctactgctcagatgccatcacgtcattatcctcctccctcaccttccatggctgcttactgccttccagataaagcttcaactctttaacttaaccaaccaagccctgaagggtgaggctctgtgtctgccccatccttggttgagcctctttctgcactcattacctctgccccggcacatacactagacatgcttgttgtggtcagttcctctgaagcctggtgtttctctggactctgctggaatctctgcctcttccccttcttgcctggctattcctgaatatcctccaggactctctctggatgttgcttcctcaaggatacccctgagttagtttcaagggcattctcagcttctccagcacccttggcttctctctcagtactcagttctctgccttgttattacctgtctgctttttccacaaggctgtgacggggagccccaaaatatttatggaattaatgaatgaaaaggggtggttctaagaaaaaagagatcactgtacattggccaaatgtcccaacaggtatctattatatctcaccagggtaggaattatcagtaaccaagatttacagatgaggaaactcagcccaaggtagagtccctctgcctgtcattcaaatttctgggcacctgtgtgtaagcaccatgctgggcttttcacaggcagtatgtgtagggtggacaggctgagagcaagcacgtgaggcccatcataccaggtgagagttaaggtgctgacaccttgcatgagggcttagtctcttggacctcaattcttcgtagggctggtgaagggtcataggaacgactgtatgtgaagtgcccaggacagtgtccagtacactagtacagacccagcaagtgtttactgattcttatctcagtcctaaggatgggagtcacaggcccagaaaaggtccctggattgagacaaccagccagaggagagctgagtgtacatcccaggcccccaccctacagggacacagtcctctcccttctgcccccactcaaggagtcagtgtccttgtgagaatctatggcgctgtggatcttctcaacctagtgctggcacacatgagatgcttggccagggcctgccagatggggaggctggagatgggtcggctgtgattgagacctctgtggccaagttttactctaagaggcaggtaaggccctcaggggttatcccagagaagtctgagaggttttccctggggtcctggtcttctcccccagacctgtcagcaagcagttcatccccagctgccaatctccttttggccctcagtcttccagaggagctgggaggtgggagagaggggttctgcagggcagtgttgttcagaggtgagctttggaagaaactgttgtctcaaccctattttcacaccatagcacctttatttaactgtcttttcccgaggccaggatctcatcttttgtttccccagcactcagcacactgcctggaatgcaggaaatggttgctgaatgaagcgatgaattacatttcagcactcatcaagtgctcagcctataactaagtctgagtgtaggctgctaacacttagacctttaccttacagaatcttcgcagccagtgctgtgcattggaagttgcagatggggaaactgaggctcaggactgttaagtgactagttcaaggcaggtctcaggccctcaggatggttagtggcaaagtaaaggactgggaggagcattgatgaattggggcaattggcagaggagtaactgtcagtcaaaatgattggctcaaattattaggtgtgaagaaggaaccagtcagagcttgcctgttgagtcgaattgcccagatgggattagcagggtgagtgaccctagcagaacaaagagctggcccttgtaggtatagactcgacttttctctggttggtcccaacacatagacaactaccaacctgactttgcacctgagaatcttcagggtacctcagactcttcaacagaaggagcctccctgaggtcacagccctctcatcagtcccgttccagtgggcactttccctctaacaaagcccacttgctgtcttggcagggtctgcatccggcacttgcagacatgtgctaagggcctgttgacttgggagcctccatcactggactgtgggccttggagagcaaaagggtaagagcatctcgagctccacgcctgctgggccagtcgctggctgaaggcaggggaaggatggagtttagctggccagcactaatgtcacacagggcaacgccaaaaatggcctttctcccaggtgggctcaaagttaacagaaggcagtgagtaaacagtccactggggcaataactatgcacatttactaagccatgggaagaatagtagtcacgtggccctcgagggcggtgccctcagcttgagatggagttaactccaaatctaatcacagaaggctttctggaggaggcggaatttttatggcggccggatccggctttctctgaacagcgagaaggcgcttagcgccctagggaccaggtaactcctgaggtgagcttcttggtggggatcaagcccagggggcgacggagtccgggctgggggaagggcccgaggggctggagtcgcaagttcaggcccagcttgggctccctgtcccgcccttccgctgtcttgggggattggacgccacgcggtcgtgctagattcggtgctgcgggcccggtgcaggatgcaggccgtgaggccccaggccgagggctgcgccagcgggcttgtcccggccagccgggcggtcccgtgtcccggcgcagctccgctggggtccagatgcccggccctcaggggcgaggcgcgcactccccggggaaccgggctgcggagcaggcggcccgctctgggcggcggtggcacgagagggccatctgcctgggtgccgagaactgcagcgtccgcggtgcgaggcgcggcccgtcccgtcccggcccccagcccggcgcgcacgcacatacccacgccggccggcgcccgctgcccgagcccccgtgccaggcccagaccttgactaggcgcgggaggcggtgcagggactagaggaccccctcccccggcgttcccctcgccccgcccgaggctgcgaggacccctgggctcgggggtggtgagggagcttcgtcccggctgggcccgggctggggactcggcctccctgggcgggggccgcacggctgcaggccgaggtgcggacgcgctgtcaggctgcagcccggctcggtgccgggggtgggctcagcgctggggtcgcctggcttcgttcccccgcggaggccacggccgggcgagcagtgccggggcgggtaacccgacccggctccccagagccgctcaccccgcacggcccggcaaggggagggagagggatggggggagggggaagggaaggggtggtgggtgaggggctgtgggcaccgcagggccgagtccccggcccgtctgcgctgctgtagggcggctgcccgcggcacccgggacgatccagcctctgcctcgcgggcgtcgagcctgagacaggagggagccctggggctgcacaggcttggctcagggaggcagacccgagctgctgcctccattttgtttcctgctcagcttggtctgtggtggtggtggtggtggtggtgtgggtttggggtgcggccgggtagggggttcgcctgcggccgcgtctgctcggggcctgaggcctcgaagaccccagcccaagcccccaggtgagccctgcggcaggaggggggttgccttggcctcgggccgaacccagcgggctgagggcaggtgcccagtggatggggagcctgggctgtaacctaagatggaggccgggactgacgcgggcccgagcagggctggcgggacgatcggacaggcctcagccgcgccaggtgccgcctgggttggggttcgagacgcgtagggtgcgggagccgtgtgcggcccgaggccagcgccgtgccccgaggtaggtgaggggatcggaatgccacccacgacgcccgcaggccccgacactccaaggaggcgcgcgaggcccctggggagcccgcctcaggccccgcccgggcagccgggccggcccgtaggccccggccgcgagcgggcgcgcagggggaggggagggggcggcagcggcagctccgctgattgggcggcgctctcacaagcccgacttcacccgccctgaaccccgaagagtgagagaagggaacgcgcgcgctcggtgggggaaggggtgcgcgcgcactcggggcccagccgcacgcgggccggcgcgaggcgctcggtcgcacgcgcggccgcgggggcgcgcgcggtgggggtgtgaggaggaggaggcggcggcggaataggccggggcaggtcgcgctcgctgccttctcccctgaagagagacgcggggggaggggggtgcggcgagcggccccgctctctccccaccgctccgctcgcaccccagtgtaatgagggtcaccccctccccccagctggcccgggagggggcgcggggcacggtaactagtgcgctggggtgggcggcgggcaggcgcgaggagaagggagggaggagggtggccgggcggggaagatggtggtggccgtaaggtgaggggctcgggggagggccaggcgcgatgcggggttggtggccggcggcgctgcagccgccggcctcctccccctccccctcctccatcactaccagccgggctcaggcctagctggccgggctgccgcgaacttcctcccggcgcggcccgtgccccgccggcc

SEQ ID NO: 10726 - DNA, 6000 bp, Homo sapiens
cagtgctgtgcattggaagttgcagatggggaaactgaggctcaggactgttaagtgactagttcaaggcaggtctcaggccctcaggatggttagtggcaaagtaaaggactgggaggagcattgatgaattggggcaattggcagaggagtaactgtcagtcaaaatgattggctcaaattattaggtgtgaagaaggaaccagtcagagcttgcctgttgagtcgaattgcccagatgggattagcagggtgagtgaccctagcagaacaaagagctggcccttgtaggtatagactcgacttttctctggttggtcccaacacatagacaactaccaacctgactttgcacctgagaatcttcagggtacctcagactcttcaacagaaggagcctccctgaggtcacagccctctcatcagtcccgttccagtgggcactttccctctaacaaagcccacttgctgtcttggcagggtctgcatccggcacttgcagacatgtgctaagggcctgttgacttgggagcctccatcactggactgtgggccttggagagcaaaagggtaagagcatctcgagctccacgcctgctgggccagtcgctggctgaaggcaggggaaggatggagtttagctggccagcactaatgtcacacagggcaacgccaaaaatggcctttctcccaggtgggctcaaagttaacagaaggcagtgagtaaacagtccactggggcaataactatgcacatttactaagccatgggaagaatagtagtcacgtggccctcgagggcggtgccctcagcttgagatggagttaactccaaatctaatcacagaaggctttctggaggaggcggaatttttatggcggccggatccggctttctctgaacagcgagaaggcgcttagcgccctagggaccaggtaactcctgaggtgagcttcttggtggggatcaagcccagggggcgacggagtccgggctgggggaagggcccgaggggctggagtcgcaagttcaggcccagcttgggctccctgtcccgcccttccgctgtcttgggggattggacgccacgcggtcgtgctagattcggtgctgcgggcccggtgcaggatgcaggccgtgaggccccaggccgagggctgcgccagcgggcttgtcccggccagccgggcggtcccgtgtcccggcgcagctccgctggggtccagatgcccggccctcaggggcgaggcgcgcactccccggggaaccgggctgcggagcaggcggcccgctctgggcggcggtggcacgagagggccatctgcctgggtgccgagaactgcagcgtccgcggtgcgaggcgcggcccgtcccgtcccggcccccagcccggcgcgcacgcacatacccacgccggccggcgcccgctgcccgagcccccgtgccaggcccagaccttgactaggcgcgggaggcggtgcagggactagaggaccccctcccccggcgttcccctcgccccgcccgaggctgcgaggacccctgggctcgggggtggtgagggagcttcgtcccggctgggcccgggctggggactcggcctccctgggcgggggccgcacggctgcaggccgaggtgcggacgcgctgtcaggctgcagcccggctcggtgccgggggtgggctcagcgctggggtcgcctggcttcgttcccccgcggaggccacggccgggcgagcagtgccggggcgggtaacccgacccggctccccagagccgctcaccccgcacggcccggcaaggggagggagagggatggggggagggggaagggaaggggtggtgggtgaggggctgtgggcaccgcagggccgagtccccggcccgtctgcgctgctgtagggcggctgcccgcggcacccgggacgatccagcctctgcctcgcgggcgtcgagcctgagacaggagggagccctggggctgcacaggcttggctcagggaggcagacccgagctgctgcctccattttgtttcctgctcagcttggtctgtggtggtggtggtggtggtggtgtgggtttggggtgcggccgggtagggggttcgcctgcggccgcgtctgctcggggcctgaggcctcgaagaccccagcccaagcccccaggtgagccctgcggcaggaggggggttgccttggcctcgggccgaacccagcgggctgagggcaggtgcccagtggatggggagcctgggctgtaacctaagatggaggccgggactgacgcgggcccgagcagggctggcgggacgatcggacaggcctcagccgcgccaggtgccgcctgggttggggttcgagacgcgtagggtgcgggagccgtgtgcggcccgaggccagcgccgtgccccgaggtaggtgaggggatcggaatgccacccacgacgcccgcaggccccgacactccaaggaggcgcgcgaggcccctggggagcccgcctcaggccccgcccgggcagccgggccggcccgtaggccccggccgcgagcgggcgcgcagggggaggggagggggcggcagcggcagctccgctgattgggcggcgctctcacaagcccgacttcacccgccctgaaccccgaagagtgagagaagggaacgcgcgcgctcggtgggggaaggggtgcgcgcgcactcggggcccagccgcacgcgggccggcgcgaggcgctcggtcgcacgcgcggccgcgggggcgcgcgcggtgggggtgtgaggaggaggaggcggcggcggaataggccggggcaggtcgcgctcgctgccttctcccctgaagagagacgcggggggaggggggtgcggcgagcggccccgctctctccccaccgctccgctcgcaccccagtgtaatgagggtcaccccctccccccagctggcccgggagggggcgcggggcacggtaactagtgcgctggggtgggcggcgggcaggcgcgaggagaagggagggaggagggtggccgggcggggaagatggtggtggccgtaaggtgaggggctcgggggagggccaggcgcgatgcggggttggtggccggcggcgctgcagccgccggcctcctccccctccccctcctccatcactaccagccgggctcaggcctagctggccgggctgccgcgaacttcctcccggcgcggcccgtgccccgccggccgcctgcgaacacctcggcctccgcctcccctcaggtagcaggctgcggggcgcggggccggctgccctcccgcagcaaactttgcttgctgctgaatattgatgagagcgatcggctcggctgggaggtgctgccgcggctgcgggaaggagcgcggcccgggcaggcggcggcggcgtcggcagcagccatgtttttcgagctgtagcagctgctgctaccctgactgggcttcgctggccgcctcggtttctccctctgccgggtccaggcctcttcgccctgcagctgcggatccagcaggcctgcattcaggaaggcgagctctggggtgcagccgcctcggccggctcgcctgcggcctgcgcaccgccgctgcaaaggctccggcgctggctgggcgcagggtgcagcgctattgtgaccgctgcgccctagcgagccaggaaggggggggtacctttttgtgcagggtccaggagcccccctcggaccccgcagccttttgcttttgagagatccagctgctcgacccctggcgagggagggggaggactagtcctgtttgagaattgggaattttgacgggcagaggggttttaattttagttcatcccaagtgtccaccagtctacagaggaggaaaaagagacgggctgtttctatgtagcaggatcggcccagcttcgggaaaatggagttttcagaggctcatcgaggccattttttcatctccagtcgggggaactttttctgcccatggaagtgcagcagaaaggcatagaggccactaggccttgaagtggctgccattttaaagagtcgagtcagatggcctattaactcagattaattgctgtgcttttggattccaggttgatgccggcccaggatggatcagacctgtgaactacccagaagaaattgtctgctgcccttttccaatccagtgaatttagatgcccctgaagacaaggacagccctttcggtaatggtcaatccaatttttctgagccacttaatgggtgtactatgcagttatcgactgtcagtggaacatcccaaaatgcttatggacaagattctccatcttgttacattccactgcggagactacaggatttggcctccatgatcaatgtagagtatttaaatgggtctgctgatggatcagaatcctttcaagaccctgaaaaaagtgattcaagagctcagacgccaattgtttgcacttccttgagtcctggtggtcctacagcacttgctatgaaacaggaaccctcttgtaataactcccctgaactccaggtaaaagtaacaaagactatcaagaatggctttctgcactttgagaattttacttgtgtggacgatgcagatgtagattctgaaatggacccagaacagccagtcacagaggatgagagtatagaggagatctttgaggaaactcagaccaatgccacctgcaattatgagactaaatcagagaatggtgtaaaagtggccatgggaagtgaacaagacagcacaccagagagtagacacggtgcagtcaaatcgccattcttgccattagctcctcagactgaaacacagaaaaataagcaaagaaatgaagtggacggcagcaatgaaaaagcagcccttctcccagcccccttttcactaggagacacaaacattacaatagaagagcaattaaactcaataaatttatcttttcaggatgatccagattccagtaccagtacattaggaaacatgctagaattacctggaacttcatcatcatctacttcacaggaattgccatttgtaagcagtttttggtacaacttaaatatatacatatatgtatatatacaggccacttaaagggaaacttgtaacaaatttgtttttggttgcttatcagttcacagctgaaatcctattgctaatcataagctttgggcaaaattttactttgatttttaaatttatctctgttgtatgaatttggttgttttaagctttttccaaataactcttcattgagagtaggctaatgcttttaaaggcatttgattgagttcaggtttaatttctcaagttggaggtatacatatatgattaaaaaaaaaaaaaaaagatgggttttggcctgccagcaccatgagtgcaggtgaaccaatttagtacttggagtcctgttgctatatgtggcagattatttttttacttgatgacttgactcttacttcaggttgaagggcattttgaacacagattaaagtggctaagatgaagttttcttggacattgtcaaaatctaaattaggctagtttttctgaactacctgttttgaaggtatagcatcctgtgcttttgataactgccaccattagctcttttttttttttttgaggtggagtctcactctgttgccaggctggagtgcagtggttgatcactgcaacctctgcctcttgggttcaagcaattctcctgcctcaccctcccgagtagctgggattactggtacccatcaccacgcccggctaatttttgtatcaccattagctcttgaagtttttctagttttgttttgttttattttattttattttaacagaaccctaactaagacaaagttttatatttatttattgtttagagactggccttgtcatgttgcccaggctggcgtcgggactcctgggctcattcgatcctcctgcatcagctagaactacagtagtttcagattttgaagtgtgtatgtgtatgt

SEQ ID NO: 10727 - DNA, 6000 bp, Homo sapiens
aggcccatcataccaggtgagagttaaggtgctgacaccttgcatgagggcttagtctcttggacctcaattcttcgtagggctggtgaagggtcataggaacgactgtatgtgaagtgcccaggacagtgtccagtacactagtacagacccagcaagtgtttactgattcttatctcagtcctaaggatgggagtcacaggcccagaaaaggtccctggattgagacaaccagccagaggagagctgagtgtacatcccaggcccccaccctacagggacacagtcctctcccttctgcccccactcaaggagtcagtgtccttgtgagaatctatggcgctgtggatcttctcaacctagtgctggcacacatgagatgcttggccagggcctgccagatggggaggctggagatgggtcggctgtgattgagacctctgtggccaagttttactctaagaggcaggtaaggccctcaggggttatcccagagaagtctgagaggttttccctggggtcctggtcttctcccccagacctgtcagcaagcagttcatccccagctgccaatctccttttggccctcagtcttccagaggagctgggaggtgggagagaggggttctgcagggcagtgttgttcagaggtgagctttggaagaaactgttgtctcaaccctattttcacaccatagcacctttatttaactgtcttttcccgaggccaggatctcatcttttgtttccccagcactcagcacactgcctggaatgcaggaaatggttgctgaatgaagcgatgaattacatttcagcactcatcaagtgctcagcctataactaagtctgagtgtaggctgctaacacttagacctttaccttacagaatcttcgcagccagtgctgtgcattggaagttgcagatggggaaactgaggctcaggactgttaagtgactagttcaaggcaggtctcaggccctcaggatggttagtggcaaagtaaaggactgggaggagcattgatgaattggggcaattggcagaggagtaactgtcagtcaaaatgattggctcaaattattaggtgtgaagaaggaaccagtcagagcttgcctgttgagtcgaattgcccagatgggattagcagggtgagtgaccctagcagaacaaagagctggcccttgtaggtatagactcgacttttctctggttggtcccaacacatagacaactaccaacctgactttgcacctgagaatcttcagggtacctcagactcttcaacagaaggagcctccctgaggtcacagccctctcatcagtcccgttccagtgggcactttccctctaacaaagcccacttgctgtcttggcagggtctgcatccggcacttgcagacatgtgctaagggcctgttgacttgggagcctccatcactggactgtgggccttggagagcaaaagggtaagagcatctcgagctccacgcctgctgggccagtcgctggctgaaggcaggggaaggatggagtttagctggccagcactaatgtcacacagggcaacgccaaaaatggcctttctcccaggtgggctcaaagttaacagaaggcagtgagtaaacagtccactggggcaataactatgcacatttactaagccatgggaagaatagtagtcacgtggccctcgagggcggtgccctcagcttgagatggagttaactccaaatctaatcacagaaggctttctggaggaggcggaatttttatggcggccggatccggctttctctgaacagcgagaaggcgcttagcgccctagggaccaggtaactcctgaggtgagcttcttggtggggatcaagcccagggggcgacggagtccgggctgggggaagggcccgaggggctggagtcgcaagttcaggcccagcttgggctccctgtcccgcccttccgctgtcttgggggattggacgccacgcggtcgtgctagattcggtgctgcgggcccggtgcaggatgcaggccgtgaggccccaggccgagggctgcgccagcgggcttgtcccggccagccgggcggtcccgtgtcccggcgcagctccgctggggtccagatgcccggccctcaggggcgaggcgcgcactccccggggaaccgggctgcggagcaggcggcccgctctgggcggcggtggcacgagagggccatctgcctgggtgccgagaactgcagcgtccgcggtgcgaggcgcggcccgtcccgtcccggcccccagcccggcgcgcacgcacatacccacgccggccggcgcccgctgcccgagcccccgtgccaggcccagaccttgactaggcgcgggaggcggtgcagggactagaggaccccctcccccggcgttcccctcgccccgcccgaggctgcgaggacccctgggctcgggggtggtgagggagcttcgtcccggctgggcccgggctggggactcggcctccctgggcgggggccgcacggctgcaggccgaggtgcggacgcgctgtcaggctgcagcccggctcggtgccgggggtgggctcagcgctggggtcgcctggcttcgttcccccgcggaggccacggccgggcgagcagtgccggggcgggtaacccgacccggctccccagagccgctcaccccgcacggcccggcaaggggagggagagggatggggggagggggaagggaaggggtggtgggtgaggggctgtgggcaccgcagggccgagtccccggcccgtctgcgctgctgtagggcggctgcccgcggcacccgggacgatccagcctctgcctcgcgggcgtcgagcctgagacaggagggagccctggggctgcacaggcttggctcagggaggcagacccgagctgctgcctccattttgtttcctgctcagcttggtctgtggtggtggtggtggtggtggtgtgggtttggggtgcggccgggtagggggttcgcctgcggccgcgtctgctcggggcctgaggcctcgaagaccccagcccaagcccccaggtgagccctgcggcaggaggggggttgccttggcctcgggccgaacccagcgggctgagggcaggtgcccagtggatggggagcctgggctgtaacctaagatggaggccgggactgacgcgggcccgagcagggctggcgggacgatcggacaggcctcagccgcgccaggtgccgcctgggttggggttcgagacgcgtagggtgcgggagccgtgtgcggcccgaggccagcgccgtgccccgaggtaggtgaggggatcggaatgccacccacgacgcccgcaggccccgacactccaaggaggcgcgcgaggcccctggggagcccgcctcaggccccgcccgggcagccgggccggcccgtaggccccggccgcgagcgggcgcgcagggggaggggagggggcggcagcggcagctccgctgattgggcggcgctctcacaagcccgacttcacccgccctgaaccccgaagagtgagagaagggaacgcgcgcgctcggtgggggaaggggtgcgcgcgcactcggggcccagccgcacgcgggccggcgcgaggcgctcggtcgcacgcgcggccgcgggggcgcgcgcggtgggggtgtgaggaggaggaggcggcggcggaataggccggggcaggtcgcgctcgctgccttctcccctgaagagagacgcggggggaggggggtgcggcgagcggccccgctctctccccaccgctccgctcgcaccccagtgtaatgagggtcaccccctccccccagctggcccgggagggggcgcggggcacggtaactagtgcgctggggtgggcggcgggcaggcgcgaggagaagggagggaggagggtggccgggcggggaagatggtggtggccgtaaggtgaggggctcgggggagggccaggcgcgatgcggggttggtggccggcggcgctgcagccgccggcctcctccccctccccctcctccatcactaccagccgggctcaggcctagctggccgggctgccgcgaacttcctcccggcgcggcccgtgccccgccggccgcctgcgaacacctcggcctccgcctcccctcaggtagcaggctgcggggcgcggggccggctgccctcccgcagcaaactttgcttgctgctgaatattgatgagagcgatcggctcggctgggaggtgctgccgcggctgcgggaaggagcgcggcccgggcaggcggcggcggcgtcggcagcagccatgtttttcgagctgtagcagctgctgctaccctgactgggcttcgctggccgcctcggtttctccctctgccgggtccaggcctcttcgccctgcagctgcggatccagcaggcctgcattcaggaaggcgagctctggggtgcagccgcctcggccggctcgcctgcggcctgcgcaccgccgctgcaaaggctccggcgctggctgggcgcagggtgcagcgctattgtgaccgctgcgccctagcgagccaggaaggggggggtacctttttgtgcagggtccaggagcccccctcggaccccgcagccttttgcttttgagagatccagctgctcgacccctggcgagggagggggaggactagtcctgtttgagaattgggaattttgacgggcagaggggttttaattttagttcatcccaagtgtccaccagtctacagaggaggaaaaagagacgggctgtttctatgtagcaggatcggcccagcttcgggaaaatggagttttcagaggctcatcgaggccattttttcatctccagtcgggggaactttttctgcccatggaagtgcagcagaaaggcatagaggccactaggccttgaagtggctgccattttaaagagtcgagtcagatggcctattaactcagattaattgctgtgcttttggattccaggttgatgccggcccaggatggatcagacctgtgaactacccagaagaaattgtctgctgcccttttccaatccagtgaatttagatgcccctgaagacaaggacagccctttcggtaatggtcaatccaatttttctgagccacttaatgggtgtactatgcagttatcgactgtcagtggaacatcccaaaatgcttatggacaagattctccatcttgttacattccactgcggagactacaggatttggcctccatgatcaatgtagagtatttaaatgggtctgctgatggatcagaatcctttcaagaccctgaaaaaagtgattcaagagctcagacgccaattgtttgcacttccttgagtcctggtggtcctacagcacttgctatgaaacaggaaccctcttgtaataactcccctgaactccaggtaaaagtaacaaagactatcaagaatggctttctgcactttgagaattttacttgtgtggacgatgcagatgtagattctgaaatggacccagaacagccagtcacagaggatgagagtatagaggagatctttgaggaaactcagaccaatgccacctgcaattatgagactaaatcagagaatggtgtaaaagtggccatgggaagtgaacaagacagcacaccagagagtagacacggtgcagtcaaatcgccattcttgccattagctcctcagactgaaacacagaaaaataagcaaagaaatgaagtggacggcagcaatgaaaaagcagcccttctcccagcccccttttcactaggagacacaaacattacaatagaagagcaattaaactcaataaatttatcttttcaggatgatccagattccagtaccagtacattaggaaacatgctagaattacctggaacttcatcatcatctacttcacaggaattgccatttgtaagcagtttttggtacaacttaaatatatacatatatgtatatatacaggcca

SEQ ID NO: 10728 - DNA, 6000 bp, Homo sapiens
cctaggagtctttagactcctaccagaaacaccctctcctatcagttctgttatgatcacatccacagtaactaacagtgaggataaggaaaggaaggcataaaaccttggaggcggaggtgtgggtgtggggaggaacgagctctaccctcagcctaactgtaatagttgcacaggctgtcaagtctcatagccagatgtgttccatatagattcttcaaatgtcagagcagagtcatctactctgactttctccttttatagttgaagaactgagtgaggccagagaggtcaactgacctgccctaaagccacacagctaaaggctgaactaaaaccaggctgtgctttggctccacctctggttcatagtatagacctggtttcattgcttggccttgccacttactgaatggtttgggcaagttatctaatcattctgggccttgatttgctcacccgtaaagtgtggaattttagcagcacttatctcttggatataaattacataaaacaccatcagggaacctagtgagtgctaagtgttaacttccactgatgggctcacagctcactgtctcaatggcactgattctcttcccatccaaccccaacttcagcatctctcaggtgtctttttacactctggttacctccagtgtgatctaaattacagtctgtcacgaatctgcgtgtatctgctctagaaaagaacttacaatgactataccatgaaatcagggaggcaatagggcaagagccctaattttaatcttaatttgtctaacctttagttttccctttttcctttttctgactgttgatggaagtaggaagaggaaggttttcctgtttctctttccatcctttcattattgaaatctgccaccaggaaaggatctgataaattcattctgtggtaacttactgataaggcttaactagtgacttttgtttttaagggtatttgcaagcttcatcaaaggtcaaagcctaaaccaaggatctccaatgttagagttttagtatcaatcaagagtgggacaggtttgcattttggtttgtttttgctggtgttggatcagggagaatgaaaggaaggaaacccagaagattttttataaatccaggttccaccctccaggctgagagtgagctaaccatgtgggcaagtgggaagggggaagtgttgaatattccccaggacttcctggtagacaatcagaattgcctttgagggaacctaggggtgggagtggaggacagatccaccaagaaccaaggcctttactgaggaccaaaaagccatgcgtcatatccaaggaaccagaaggggacaatgtaacccgtgaacaacctctggagtaagtctgaacccagagctcacacccttctttcccttgagcaggctctgtgctgtggggtgggacagattcaaggctctgagatggatgacactccctactgttgctgcccctcttgccaccctctactctcagggttgtcacactttccaaagagttgagggggcggggtggcggggcagaggaggcaataaccaatgttaccaagagtctcttggactttggaagggcaccagagctccagccaggtcaaaaccatcagcccacgtggtgctctatcagcacttccttctcacattctctgaagacacaaggaggaagtgggagtccaggtagaacagctcccctactagaagagaagacctaggtcaggaacacagggctgggcatgggagcaggagagacagaagtagcagcatatgccttcctggtgaggggcccctgtggtcccagggctttctgcaaggatctatgcagcaaacactctatacagacttaccagatgcatgtcttcacacatatatgccactggcttttcaaatgtatacagaaggctatagtgtgataatgtgataatatcatccctaatttataatttataattcttatttagtcaataactggacagtataagacaactgctcttgtatttttagtagagatggagtttcaccatgttggccaggctggaactgctgacctcaggtgatccacccaccttggcctcccgaagtgctggaattacaggcatgagccaccatgcctggcccaattttggctttcaaaggggattctcactcttgaaaagattagacacattaggctacatcattgccttttcctttcctctccttaccactgccacgtgtgccaattatagctttatgaatgtgagtcctttgcccatccccttcaccagcagaaaacagctatttgttgtcctctgctgcacactggataaaactaatcaaataaatatatctgtttaaaacttcctttaaaaatgcctcagtgtattttccattgaggaatatcttttatgttcttccctggggggaatttagcctaatccatcctgcctaccagctcctttacaatatgttgatttgggggcagattcttttgaaaaaaaaaaaaaaaaaaaaaaaaaactgaactccgctttctgaattttcccactcacaaaaaaatttagctagatatgatctacaggcaagatatacctaagttgtctgggactggcactcagattgttagttaagtatcaattcaaggtcaaaggcacactgctaactttgttcagttttctttccactaaaataaattgaccatcagacaatttttggttatatttctaacatagtttttaattaagtgacaaaatgtttaaatttacaaaaatatactttaaaacatttaagcaaaatagaagtgtacaaagaaaaatgccctcattagcccataggcagaagtgattataatttgaaatgtttaggaagataacagttgtacttacatctaagaggttattttatgtttattttttcttttctcctataaataccgtagaaatccaaacaaatgcgtttgtataaaacactgaagaaatggtactacctccttctcaaacttctacccctactcatcatttttgtcttccgcctcatcatcaccaaagaatcagctaccttctgtgttttgtagggaaatctgtgcctgttcctcttcgaagcaagtggactttgtttccttggaataaaactctgtggcttgggacaactcactttccctctccaatttctttgcaaaatatgaggggtccttaggactttgatactaaaacaactatgcccatctttttgtttttgttttgagatggagtctcgctctgtcccccaggctggagtgcagtggcgcaatctcggctcactgcaagctctgcctcccgggttcaagcaattctcctgcctcagcctcctgagtagctgggattacagctgcgtgccaccacaactggctaattttttgtatttttagtagaaacggggtttcaccatgttggccaggatgttctcgaactcctgacctcgtgatccacccacctcagcctcccaaagtgttgggattacaggtgtgagccaccgtgtctggccgcccaccttttatataattcaaaataaaaacaaaactgggtcctaaaataaatgtcaggatacccaacaatttgattcgccccatgatgactgtttccttgctttggggaaatatagaaaattcttccaatacatgtatttctgtttcttctggctttggcaatcaagccccaaaagaacaaggagcaatacattgtctctgagctctgaaagtctataatttgtcagttataatttggagaatagaagtagaggtgatgagattgaaaaacataaataatatcaaataaagctaaataagaatagatcattttgagagattgggagaaatgaacaagactcttgctaatgagagccctacttcatagtgaattccaaagaatacaatatgtaaaggggcaaaaaaaaaaaaagtaactttacagtggagaaacctgacaaacgctactcggtcaggtgatcaaggtcaacagcaacagtcataaatcatgtagatagtataaacccttgatttgatgtgacaaagtggtatcttacctctgtggtcttctagaatccattacccctagtctaatcataagaaaaacaacagacgaatctcaatacagggggggtaccctcttacctctttcaaaattaataatcagtagtcctcaaaactatcaaataatcaagactaacaaaagtctgaaaaactctcacagccaagtggagcctagggtgacaggacaactaaatataatgtggtaccctggatgggatcctggagtggaaaaaggaattaggtaagaactaagaaaatctgaataatcatgatctttaggtaataatagcatgtcaatattgcttcaataattataaaaaatttcattataaacgtaagatgtcaataatacgcgaaactggctggagggttgatgggaaccctatagtatcctcaattgttctttagatctcaaactgttctgtttcacttttttgcccaggctggagtgaagtggcagtgatctcggctcaccgcaacctccgccgcgccactccatcccaccagggttcaagcgattctcctgcctcagcctcccaagtagctgcaattacaggcacccgccaccacgcctggctaatttctgtatgtttaatagagatgggttttcgccatgttggccagtctacttttgaactctgatctcgggtgatccacccgccttggcctcgtaaagtgctgggattacaggcgtgagccaccgtgcctggcctaaaacaatttttttaatgaataagtagttatttaaaataagaatgacaatggcctgatggcattacacatttttgcataggctcacgaagcccaggctatagtgttttttcttattctttacatgttgggaagggaggctttttcaactctgcctaatgattttaccttaactgaatttttcctgaaattatctgcagtgaaaagctcctgtgtgtgtgggtggggtccggttggccgcgccccgcccccaccgccgtgcgctcgctccctccctccctcccacgctccctgccgccagccccaccgcccctcgcgtccgggacgccggtcccatcctcgcgaagccccggcctcggggaatctccacgctctggccgggcgcggtggttcacgcctgtaatcccagcactttgggaggccgaggcgggcagatcacgagatcagaggatcgagaccatcctggctaacacagtgaaaccccgtctctactaaaaatacaaaaaagtagccgagcgtggtggcgggcgcctgtagtcccacctactcgggaggctgagggcaggagaacggcgtgaaaccgggaggcggagtttgcagtgagccgagatcgccccactgcactccagcctgggcgacacagcgagactccgtctcaaaaaaaaaaaaacaaacaaacaacaaaaaaaaaaactcagagcagatattatagcgtatgtgaattattaatttactttgttttcccatggccaactcacctgttctaagccacagccacctggcaccttcaatttgaaatgtataaggcataagctatacgttcctcatggaaagagtaaaagttattttatagccataccaagattggatttcgggtgtactatttataagctgtgtaataacgttggacaaattacttaacctctgtgaaactcagttttctcttttattttattttactttattttattttttttagacgagtctcgctctgtcacccaggctggagtgcagtggcgtgatctcggctcactgcaacctctgcctcccgggttcaagcaattctctgcctcagcctcccgagtggctgggattacaggcgcccgccaccacgcccagctattttttttgtatttttagtagagacggggtttcagcatcttggccaggctggtcttgaactcttgacctggtgatccacccgcctcagcctcccaaagtgctggga

SEQ ID NO: 10729 - DNA, 6000 bp, Homo sapiens
tcttgactgaaaagtgtgagagacaattcaagcgcttgaaaattcacctgttttgcatttccggaaagacagagaaagcgtcagtgatccatttcacagatcaagggtataggaaagtggatggcactttgagatgttcattaggtttggagagggagcagacatctgccagcaatcccacctcttgtgctggagtcttgcagttcatttttctctcctgccctcttccaaatcctatgtccaatatcaaggatatctgacagttaaccatcagaatcaacgagcgttcccacagagttccgtcctgcaggagaggtaccgggacaggggcgggagacctgaagctgcgatcagaaaacgctgtgccttttacgctcctaaggaaccttagaccgagagtttcaagtttcaaaggcaagcagttgttggcccctcctgtaggatcctgtgggctctggaccgggaagagagcctggcagcgaggggtgacctggaaaagcccagtcacagagggtggatggctgtttcctgcgtaggaagctgttggcgaccagaatggtttatactttgttcctgggaccaacaggatctgcttggttctcggcgcataagcccactactctccccctgcgtaatgcactgggtggaatgcaagaacaatacagacttcctgcgggcctcggtggcccacgcctgtgatcccagcactttgggaggcccaggcgggcgaatcgcttgagctcaggagttcgagaccagcctgggcaacatagcgagaccgccgtcactaatatatatatatttatatatatatatttcatatataatatatattttatatataatatatattttatatataatatatattttatatataatatatattttatattttatatactatataaaatatattatatataatatattatatataatatattatatatcttatatattatatattatatataatatattttatatattatatactatattttatatattttatatattatatataatatattatatattatatattatatataatatattatatatattatatataatatataatatataatatattatatatattatatataatatattttatatataatatatatattatatattatatatatattatataatatatatattatataatatatatattatatataatatataaataaatatatatttatatattttatataatatataaaaatatatatttatatttatatatttatttatattatatataaatataaaatatatattttaatatatatatttatatatataaatatatataaattagacgggggtggtagcactcacctgtggtctcggctactctagaggctgaagcgggaggatcgctggatcccaggaagtcgaggctgcactgagccaagatgacaccactgcaccagcctaggcgacagaggaaaaaagaaaagaaaaagacatcagacttccctaagcccgtgggggacagagtgggtagagccagtagcactttggtggcaccgagcgcgcagttggtcggtcgctgcaccgttcctttcccagcgccggctgtttctcactggcaacgccacgcctttgtcagcgttatcggacgctctctggcggcaaccttctcacggccaaaaattatcttttgcaactgcacagacatttgctacgggcagctgatcgctgggtcccagcgccgctggtttcacaatttcgcgggtgccccccaccatccccagcccgcagcataatcggtgaagggagcctgcggtttctccgccgcgccttcgcccgttgcgtcctgcgaagccagtggaatcggtggtcacaaggttggtttcaccaagtcgggcgtttcttggcactggcaccgctctgcgcttttgctggcccaggccggtctcagcaccgttaggtgctctctaaaggcgactgtctgtcgtggttaggaaagctgctatgggacgacagttttttagaagtttctagtctagcccagctggcggtttctggatcgcagaaccactgattgcgcggagctggatgtacttctgtggccgcgcatgtttctctgtggtatccctacggctgtcgtcgaaatcgcggtgtttctctggccccaccgccacgtgggcaacttcttcagtggctgcggggttctctccactgagttgctggttttgatccacgctttctcccagagagcagacgagacacttttctgtttgtgtcaactgctagtcgtgctgtgcacagtttcctcgtctcggtgcggggctttctccatccgaggccctctagtgccggcttcgcggtcgcagcacccggcgtttccgttggctctttcgccagcggcgcgaagccggcggttttgctgtcacagcacttgctgcacggagtttctcggtagccgaacttctctttttttctcagagtcgacggtttcttggtgacggcaccgctggttgcgccaaaacaaatgttgtccttgacaaccccgccggctgcattccctttcaggctcctggcaccgccatttcggcgagccgtggtctcttgttcacagctctgtgcctccatttctcggtggcggcagccctcaggccgcggatctgagagatttaaagtcgcagctgcccccgttgcgccgagtctggcgttgccggatgggtgctgcagggctgggcggggggagcccgacgctccttggagccggtgacaggggagctgcaggggcacagtctcttcccagcgccgccgcacgggttccggctcggcctccagaacgcagtcctgtggcggcgccgccggcgtctctgtcgcaggaccccacggtttcgcgcgtcgttggcttcttagtcctagcaagtttcgatttcgcggtgcctgggatttccaccctctgtccaagtaggggaatagccaaaatgtattttctcagcccaagcaagtcctgacttaagacaaacaccggtctagccctggctgcgatatctaggccgtaggaactcacccgtttccccatgcgaaggcgaagttaccctgtgactcgttggtcagcagctccgggtttccagtggcctcggatttctaatcataacaaccatggggtcagcctagcctcaagtttcttagtcctagcaagttccggtttcctactggtaagacttgctttagctgcgcaggaaatgtttaactcctgtggaaatctgggtaccagcgaatgctttttttttttttttaaaggtttagcgatgaccagtttagcagtgttgggagctcttataccaagtttggtttcgcaatatcgagtcctgtcttagctatgcttgtgtgtttttaaaactcccgtggaagtcaggaaatgccggcgatcgcgatgtctcagttttaccaagctccctttgacaatagcaagtcctgcccatcgagactttttcctcttgtagaccaaatcgggatgtaccagctactacgattttttagacgtagctaaacacgtttaaccgtggatatttttgttttttttctcgtaggaaattatgacaggagcaacctgcaggggtttagatctgacagaaatattctaatggtaggcattgcatcgcttagccatatttgtaatttcttctttgtagggttggttctctgtaacttttgcttaccttaaaattatttttgtgtcttgctctgaggacaatgttaccgatgtgtttttcatttttacttgcatttcagactttcattattttaaattatgtattttttttttcttctaattttgagcgtctcagattcgtgcttcttgactttcattctctcaggagccggggagccgagctcggtcttagcctcgctggtatcaggttccgggttctgtctggaggctccgcttcctatgcagagctggcggttttgtatcagcacgtttgccagtggcgcccactgggcgttttctcagttgctgcacccaacgtgacatttcccgttcgcggggtccttaggttctcagtgctgtcactttttcgctcctacaaccgctagtatctcctaggaacttcctgaaccccgttttgccgtgcagaacggtgattgcaccgagccgctgttcgcactagtaattgtgtggtaccattagccggcgctttttctgtcacaacccattaaaacgggttaaaacatattaaacctatcaaacacattgaacggattaaaacacattaaatgccgcaacacatttttctggtacaacacattgaaacagagttggttcattcctccaaacaggttgtttaggtgtggaagcaccgctcttagttctaagagcatgctgtttctctttagcagcaccctttacggcgccaaaacggatatttgtttggcaataccagcgctatccgctaggtgccggcgcttgctaagttcaacgcgccagtttctcgtttgcaaggtggttagggcagagccctagcagacagttttccggtggcagcaacgctcatttcccggaaacgggtggttcttggcccttgcgcgctcttgaatacctgcgttctgtagcgctagttctcttcaagatttgcttagtgtcatttcatttcggtttcttttctcgccatgtttttctgtcggaattacggttcgttttggttctatgtactctctaaaatgttatcgtttttcatttgtctactaattttcgtgcatttgttactactgagtttcttaatatctgactggcctccgcccacgggctctgcagagcataaatactcaggctgatggtagtgcagagactctccctccttgatcagcgcaaacgttggtctgaggcttgagggatggagcaacattttcttggctgtgtgaagcgggcttgggattccgcagaggtggcgccagagccccagcctccacctattgtgagttcagaagatcgtgggccgtggcctcttcctttgtatccagtactaggagagtactcactggacagctgtgatttgggactgctttccagcccttgctggcggctgcccggagtctactggcaaaacggactctctcctggagtccagagcaccttggaaccaagtacagcgaagcccactgagttcagttggccggggacacagaagcagcaagaggcacccgtagaagaggtggggcaggcagaggaacccgacagactcaggctccagcagcttccctggagcagtcctctccatccctgggacagacagcaggacaccgaggtctgtgacagcgggtgccttttggaacgccgccatcctcctgccctccagccgtggcgccacctcccgggtttctcagactgcctggagtggattcttcgcgttggttttgccgcgttctctgtactctgggcgtgctgttcacggatctgtggagctaagcagccttagatagcagcagaaggctttttggattctcctccttgaaaagattctcagttaccaaacgtctccacctagaaaataaaaatacattaagatgtgctttcattgctggttgtcagtttttaaattctctttttcccttatgtttctttcttgtttcgcgtcgcttattactttcagtttccttgtattttaaatatttgtatttatttcattaaatatttcattcgtatctgttttcactttgagaaatctattttacgattgtagaattcttagagtttttggcaaatttaaaatttgtttttttccattgtattttaaaatcttattcctactatttttctaattattgctttttaaatgtattgtttgtttacatttaattttatatcatgtcttttacgttattataacgtctttttaattttaattgttaattttatttttaacagcggtctttctttttttcagtatatcgattcattgttttacactcaggaattttattcacgatcataagactgagaggtttatc

SEQ ID NO: 10730 - DNA, 6000 bp, Homo sapiens; identical to SEQ ID NO: 2361

SEQ ID NO: 10731 - DNA, 6000 bp, Homo sapiens
ctgggcgacagagtgagactccatctcaaaaataaataataaataaaataaacaacacttgggacactgacgtttctaaggcattccatttttctatttacttgcaccaaacaattctagagattggcaggctacccttctgtttttagcatccatctagacttcttgtgcttgtctctatcatttcactcaaagcacattctggataccagtgaccgttgcttgagtaaacactgtggcttaaaaaaatggtttttgtttttattattttaaaacatttttgtagtgatgtggtctatgttgctcaggctggtcttgaactcctggcctcaagcgatcctcctatctcagcctcccaaagtgcagggattataggcatgagccatcacacccagccaagaaaaaaaaaagttttaaaattcatcttgaattccctacgaacacagaagtaatccctgggacatgattgtcctaatttgtgttctactctttcctttttctctttcttttggtagtagttgtggctctagtcctgtcactgccactaagatctctatgattttgggcaagccactttgtcttactggggcacaaatgatatgtgtgaaagtactctaaattgcaggctgggtacagtggttcttgcctgtcatcctagcgttttgggaggatgaggcgtcaggatcacttgagtccaggagttcaagaccagcctgggcaacaaggcaagacactatttctacaaaaagttaaaaaaaaaaaaaaaattagccaggcatggtggtgcctgcctatagtcctagctactggggaagcttgaggcagggggattgcttgagcccaggaggtctagactatagtgagctatggtggtgccattgtactccagcctgggtgacagagtgagactttgactcataagtaaattgcaaagcattaaaaaatacaattattattattgaactaggtgatctctgtatttccctcaaggtctaaaatttttatttttattctacacttttgatatttttagtgaattcatctgatctagaagccagaaattgctctttgaagactcctttctttctttctttttttttttttttttgagacagagtctcactctgtagcccagggtggagtgcaatggcacgatctcagctcactgcaacttccgcctctcgggttccagcgattctcctgcctcagcctcctgagtagctgggactacaggcgcctgccaccacgcccggctaatttttgtactttttagtatagacggggtttcaccatattggccagctggtctcgaactcctgaccttgtgatccgcctgccttggcctcccaaagtgctgggattacaggcgtgagccaccgtgcctggcctaaaagactcctttcattacaccaaagctgctgctgattcaataagtacagaatgatttgtgactttaacagcaacaccaaaaacaggttattcttcaatcttttaggctaaaattactgcaaatgatacatgactttaagaagaaggctgagtcatagccaacacctgaggacttcattttctatgtaaaaaaaaaaaaaaacaattttgccattcttaaatccaataaatttaaatcttaagaaactaaaatcacatttgaaaaggctagacccactcacatctcatttttgtgcattttgctgggcactgtcagtgttggaatggtgactatagcaggcaggaaacaaaggaggactcataccttatatacaaaattatagaatctcagggttagaagggtttccagaagtcatttagaccagtagaatttaatgggcttacacaagttctaaaaaaaaggcgaggaggattagacatacaagtacctatcattcattcattcattcattcatttattgagacaaggtctcactctgttgctcaggctggaatgctgtggtttgatcatagctcacagcagcctggaactcctggagtcaaatgatcctcctgccttggcctcccaaagtgttgggattacatgcatgagccaccgtacgcagctttcaactttttttttgagacaaagtctcactctcttgcccaggccggagtgcagtggcacaatctcggctcactgcaatctctacctccccagttcaagcgattctcatgcctcagcctcccaagtagctgggattacaggcatgcgccaccacgcccggctaatttttgtgtttttagtagagacagggtttcaccatgttggccaggatggtctcgaactcctgacctcaggtgattgcccttccttggcctcccaaagtgctaggattacaggtgtgagccactgcacccgggctcaacttttaaccgagcaagaatattttaaaaaccaaaaccatctaccatcggcacctttttataaaagagcattttaatgacacatatgtgaaaagactaaatctcagaatgaaatataatgtgaaatcagataaataaatgaaagatgtattgcttacttttctcacatcctcatggcaaactttgttagccacttgcacctgtccatacacagatctttgggaatcactaatttagaccacttcatgcccacccttaccctgcccccggcttcattgagcatttttatcacaataccaaaatatccgtctaaatgtatacctcatccccttatggagaactcctcaagctgaggaatccattaaactttggatgtgtgtgagaaaattagcagaaaaggagtgatctctggaaaactcaagatgcttaaacttggcttttttttttttaagaccagaattgattaattaattaattttttagatggagtggagtctcgctctgtctccaggctggagtgcagtggcacgatctcggctcactgtaacctctgcctcccaggttcaagcgattctcctgcctcagcctccctagtagctggagctacaaggcacatgctaccatgcccagctaagttttgtatttttagtagagacagggtttcaccacgttggccagaatggtctcgaactcccgacctcaggtgatccagccgcctcggcctcccaaagtgctgggattacaggtgtgagcccaccatgcccggctgcattttatatcagaatttaacagcagattttaacttagtcaaaacatgctttagagtcaccaaaggagaatgatgtctaacagtgctgatttgggagttgggcaccctgagtgttggttgggctttaaaaacttcatgctaaacttcaggggaagtctcctcccctctctcttcagttgtcttccgagatgaaccctattactaattacttgaccacctttcaaagttgcagttaaaattcttcacatttttctcccatttctatttaattaattattttttttttgagacagggtctctctgttgcccaggctggagtacagtggcgtgatctagtctcaccgcaacctccgcctcccgggttcaagcgattctcagactcccgaatagctggggttacaagtgtgcgccatcacacccggctaatttttgtatttttagtagatacggggtttcatcatgttggccaggctggtctcgaacaactgacctcaagtgatctgcccgccccggcctcccgaagtgctgggattacaggcgtgagccactgcgcccgccccccatttctattttaattaaattttatttaggataggcttagcttaaatttttacgactgaggtctgacttaagatgatagcatcaaccatggagttttctttcgtgaacattattattactaagcccaattttcccaggtcaaattttgtaaaacaaaacgtggtcaaaatttgattctctgatcgattttttgtaaaaaagaaaaaaattaccgtgtagttttaaatgttgtcaattaaattttgtaatagttacctctactctgttcaggttaatactgaggttttcaacaagaccaacatacgattcttttttttttttttttttttttttttggtggggttgaggggacataacagttttttcactcttgttaaattaattttctgttgattccatctatccttaatcttcattatgagcaacataccaggttttcttctgaagatcatatgtggtagtgaggcaataatgcaaagacataggatggcagggggattccggcttctttctttcttcccctcctgtggaaagagggtctataacactccgtagtagataggacaattctaattatgaagggtaattagctaggctctgctacaaccgagagccctgagagattcctcgacgctggctgcttttctcttcctctccaccagaggcgacagcctctttccaaacagaaactgggttggaataggccggtccgggggaacggccagaagaaagatcaaaggttaaaaaccgcctcaaagagcacaggtcaatacccaactcctaaggaggccttaagctttcatctgccacgaaacatgaaggtgactcctcccaatatcaaggccggggggccactcagccttccagagacccggcgggtccgaggcgagtaacaggtaacacctgctgagccgccgccgaccggaagtggaagagagcccgggacgggggtgaggacaggccgcggcacgcctgcgcagtcagcaggagttgcagcgctcatgcgcagctgggcggtgacagggtgacgctcggagcgtgggccgcgactctcacggatccggttccgccctctcgctgccgatccttcggagcgagcgcccgagatccctttcccagagtgctctgcgccgtgaagaagcggctcccggggactgggggcattttgtgttggctggagctggagtaacaagatggcgtcgtccgcggagtgacaggggtccctctgggccggagccggcggcagtggtggcagcggtatcgccgccctagctcaccgcgccccttttccagcccgcgacgtcgccgcgcaagcgaggcagcggcggccgccgagaaacaagtggcccagcctggtaaccgccgagaagcccttcacaaactgcggcctggcaaaaagaaacctgactgagcggcggtgatcaggttcccctctgctgattctgggccccgaaccccggtaaaggcctccgtgttccgtttcctgccgccctcctccgtagccttgcctagtgtaggagccccgaggcctccgtcctcttcccagaggtgtcggggcttggccccagcctccatcttcgtctctcaggatggcgagtagcagcggctccaaggctgaattcattgtcggagggaaatataaactggtacggaagatcgggtctggctccttcggggacatctatttggcgatcaacatcaccaacggcgaggtaatcatctggggtggggttcacgataacgctgcgcttttactcattccccccaccaccaccgtgcacccccaaagtgctcgggcctctcctcatcgcacgcactcgccagggagtccagggagctagttttcctggcttacgaacctcgtccgctgtctccctaaaagggtcaagaacccgatagaaaggttgggggaactagtttcccaccttgttaaacacgtcccataaatgtcccttagtcgagctttttttttttttaaccgtcttttaaggtggaaacggcaaaatcctctttcagtgattcccatgtttttttttttttaattcttaattctactgggcctcttgttccaattagaacagtttccgatcgcctagttccttaaaaacctctcactacgttcagaggttgcctcttttttctggatgaatcattttcctgcactttagaggacgtacggatttcgtcactaccccctgaagaggcctttgaggctggttgcctcgttttataattaccgagagctttctctttccagcttttcacttcttcttgtagtcgcgacttggagttttgctaatgtctccctcctttcc

SEQ ID NO: 10732 - DNA, 6000 bp, Homo sapiens
attacaggcgtgtgccaccatgcctggctaattttgtatttttagtagaggtttctccatgttggtcaggctggtgtcgaattcctgacctcaggtgatgtgcctgcctcggcctcccaaagtgttgggattacaggcgtgagccaccatgcccagcctttttttttccgtttttttttttggcagagtttcactctgttgctcaggttggagtacagtggcgctatatcagctcaagcaatcctcctacctcagcctcccaagtaactgggaccccaggtgcatgccaccatgcccagcttggagataaaaatttttacttgctatcttccaatgattctgccgggctgatcagcaagccaaagatacaatgtaactgactaacagacgctcagggattactatctataaacctgcctaccaatgacagaggtagtaaggccaacaaaatcaacaagttgctgtaacaattcgacttctataagcataaataaacaaataaaaggagttttgacccttactgggcatcaaatacaaaaattaaccccaaaaggatcatagacctaaacgtaaaacttaaaattagaaaacttgtagaagaaaacagaggaaaaatctttgactttgagttaggcaaagattcttggaaaggacacaaaaagtatgagccataaaataaaataattgataaacttgtcatcatcaaaataaaaaaactctgcttgctgaaagacacttaaaaaatgaaatgattaaccacagactaggagaaaatatttgtaaaagacatatcttatcaaggacttatatcttgtgtgtatttgtgtgtgtgcacccttacaattcaatagtaagaaaacatgccaatttaaaaaatgggcaaaaattttgaacagacagttcgccaaagaaaagatatacatggccagtaaacacatgaaagatacccaatactaaggaaatgcaaattaaaatcattatacagatattagaatagcaaaaagtaaaaattaaaaggataacaccaatttgcagattgagggcaactatacctccgatagattgctgagaaatgaaaaataagcagcctctttagaaaactgcttggtagtttctcatatagttaaacatataattattataatgtccagcaattttgtcactatgttgttatccaaaagaaatgaaaacatatgtccatacaattgacttgcatgggaatgtttatagtatctttgttaagaatcacctcaaactgaaataacccaaatgtctattaaccagtgaatggatacatgaattacagtatattcatacaatggaatattccttatctgtaaaaaggaacaaagtattatacattgaacaacattgatggacttcaaaagtattatgctaagtgaaaggaaccagacaccaaaaactacatactttctaatttcatttatatgacattctgcaaaaggtaaaactatatgaacagggatcagatcagtggttactagaggatggggataaagggaaggaattgaaataaaaaaaagttgtttggggtgatgaaatattctacatcttaatccgggtggtagtggttttatgtcagtatgtatttatcaaaactcttataactattcacctagagttaattttattctatgtaaagtatccctcaataaatctacattttaaaaaatcaatagggtggaaactaaaaatttctgcttgtaatttaggttcaaatgacagcgatgttttttataatgtgccaagatcctaagggaggcaagaagtcggttaccgtgtgtctttgcccatttcatctcccctgctctttctttctttgctcactagctatggagcacacaggctgccttcctctctctaattcagaaagatcatggcagccccacgctctttgcatttgctgtctcccagatctctgcagaattcactccttcatattttgtttccaaagttaaccttctgtgagaggctaccctgaccaccctgtgtaaagtagctattccccaacccacgtcactatcacattaatctgtattatactttcccccatagcccttaccactattcgaagtttttacttgtttgtatacttcttgtctgtgtctctctagaacaccttctagaaagaacacttttttcaaaggccccactggcttttgtctgtctttttagccttctagaccagtgccggcacaacagacacacaatatacagatttattcaacgagcatattccttgttaagctgtagtaggcatctttaagtaataagctttccattgagattttgccaatatagtcatataattaaatgtttaacacacatcatattgtcactagcccttctcatgatatggacttcatatccattattcatttgaagtttattggaaagaacactagattgatagtcaagagtccaagattctagccttgattctgctactaactgttaagacactgcccctttgggcccagtaattctatttctagaaatttatttcaaagaacaaaattggacacatgcacaaacatatatgtactgggatctcatcatcctgtgtagttacactggatcaaatttggagaaaaataatttaacacaatgaggatctggctaaagagactgtggtataaccaccaaagccacgctatgaatttatttgaaagtgatgattgtattcattttgtttcttattcaataaacacttattgagtatttgccaatttcaggcaccgttgtatgtaggttcaaacacaacagcagtaaatgaaacaaaggtcccatgctcataaacctgatatttttgatggataagaaaggcaataaaatacataaatatactatgtaagatgatttcagatgatgagaggttctatgaaaaaaagataatacatagtaagggtttcaggggcatctcccaagagaaagattagggatgcgctattttgcatagagtagtgtaaccccagaagaactctttgaagtcacatttgaccagaaacctgaatgaattgaggaaatgaagccgggcgcggtggctcacgcctataatcccagcactttgggaggccgaggcgggcggatcacgaggtcaggagattcagaccatcctggctaacacggtgaaaccccgtctctactaaaaatacaaaaaaattagctgggcgtgatggcgtgtgcctctagtcccagctgctggggaggctgaggcaggagaatggcgtgaacctgggaggtggagcttgcagtgagccgagattgggccactgcactccagcctgggtgacagagcaagacttcgtctcaaaaaaaaaaaaaaaaaaaaaaaaaaaaaaaaggaaagaaggaaatgagacgtgtcaatatctgtgcaaagagttccaggcaaatgcattggccccaaggccgggatgtacttggcaattttgtagggcctgtgatataggccaggggaaggatgtcagattttattctaaaagtcatagaaagccttggaggattttgaatagaggagtgataagaccggtcttatattttaagaaggtgtggtaaatagactaagggaggacaaaaaatcaaagaagtccaggtgagagataatggtggcatggcataggaccatagcagtgggaacggtggtcagtcatatttggaactttatttacttatttttaaatagatctaatgcaaaaggctggtatggtagtttcggtggggtatgtgagaaaggagaaaaaggtgattccttcgattgaacatttgcaattgagtaaagtgcaactggggaaagatgtctgtcaccactggatatgagggtctgaagtgcagaggaaacggtgttccagggcctgcatgtaatcatccagctgatatctgactgagaagtggttggagaactgagtcctggggcaatccattaatcaaatgtgccaaatgctgctgacagatggagtaaaatgaggactgggaacgaccattggaagtcactggtgcaggatacattggggtcagcggtgaggagaaaagctggattgggttatgctcaacgtagatggatttcttcaggaaataaattgatacgtgcgagggatttaaaatgggggagtccggaagtggtggttcacgcctacaatcccagcactttgggtggccgaggcgggcggatcacttcatatcaagagctcgagatgagcctcgccaacacggtgaaaccctgtctctaccaaaaatacaaaaaaaagaaaaaaaaataggtgaaaccccaactattcgggaggctgaggcacgagaatcgcttgaatcccggagactgaagttgcagcgagccgaaatcgcgccactgcagtccagcctgggcgaaagagaaagactccgtctcaaagaaaaaaacaacaaaaaaaccctgcatgtctatattttcgaatttgtatgtaagacgtcttaattgtatgcgttaaattaaaaaaggacaaaaggaatggaactaccagcagcgactaagtcagtaaaagagtggtaatggggaagggggtggaatatacgcaggcgcaatagcaagcgtttcttttggaggttattttcgtgtcataaatttctaaattcacgttaagtcttacaagagcatgttaaacattaaaacataagattgtttctggtcaataaggggtctataaaaaataaagcaataaggtgtcttgttcaattttatgccttaattcaaaaagaaacgaagaaacggaaccctcagctacgacttttaaaagtcagtaacgggtggatgggaggagtcaaacatacgtaggcgcaacagcgagggatcggtctgaggcggagctagaatttcgttaaaggacagctcttacagccaatcaaggacagagtcggtggcttcttcccggaggagaccggaagttggtttcggctgcagaggggaaggcggctaccagtgtaaagccagagctgaggtaagtgggcggcaacggtttggggccgccgcctgtgtgcgtttttttcttccggaccccgcagcttcctctgtgctgggctgggaactggggaggcatggctgagttcggcctccaaaggcggtctttcgtctttctctcccgagtctctccgagagtgcggtctctccgagagcgcggaggcctcggggtggacagcctggaggagggggctctaagcgtggcagtctcggggcttcctccgtgttgggacgccgagccggagtggaggttgggagacctggcgtctagtccccgcgccgctgtttttctaagctgtgtggccttgggcgagtcatttgccctctccggctctttgtaacatgagagtagccctccctgcccttccttcttctgggagcagttatgaaacagctgaggtatgggggcaggcgagggcggtagatcccaagcctaatcgtcaggtccatctggagaggttttaaaagcgacattctagggcccattcacagtagacagaatgaatcaaatctctggggctgggaccctggaatgtctgtcgtcttctggtgaagctccttctcccccagtagaacaaacactagatgttggatcttgagttaagaaccagctctgatgcttggctctgcttttattaaaaataagacctccatcacctttgaaaagttccatctagagagacagtagagaaagaaatataatttttgtgatatgccagtccttattgtacagttagatgcttctcggcttagggatataagagagcttgccctttggagctaaagggacctgggataagaattcctgttgtgccatttattaaccttttgatctggggcaacacttcccctcattgagacttcggatcctcacttctaaaatgaaattgataatagaacttaattcgtgggaccgtgtggtggctcacgcctgtaatcccagcactttgggaggccgaggtgggcggatcacttgaggtcaggagttc

SEQ ID NO: 10733 - DNA, 6000 bp, Homo sapiens
cagcaaaaatataatttgtttctgctgatgttagtgattctaaacagtcacaggtgctcagattgatgaaaagcaaagctggcttgtcagattggatcttctttagagatattttgaggtgaactgagaaaaatctgagtattgactgggcagtagaggatgtagagaactatactccattttcttaggtgcggtaacggtaattggtaaaatttttagaagcagcagcttggagtattcaggagtgaagtgtgttgatgtctgtagctctctaaaatagcttagcaaaagacacacacacatagataaagcaaacatgcaaaaattaccaattgttgaatctagatggtatgcatatgggtgatcactagaatattcttttaattctatatgtttgaaactcttaaaatgtggggaaataaaaaatgttttcagaaaaatctgaaaattccagacaaacaaaaaagctgacttatttctatgctttctcttcttatagtctcaggtattagttccataccagggagaaagaaatacatttattttggtgttaaaacaatataagttctattgctgttttcagttatccacgaaaagtgtttattcagcaccagctatgcgtatgaatcacttagtgttaatataaagttacaatttcatctttatctccctattagagaataaaagttgacaatcaaatactacagacagaaggaagggaactaggccaggtgctgtggctcatgcctgtaatcccagcactttgggaggccgaggcatgtggatcacttgagcccagaccagcctgggcaacatggcaatatcttgtctcaacacaaaaattagctggtgtggtggcgtatgcctgtagtcctagctgctcaggaggctgaggtgggaggactgcttgaccctgtctcgaggaaaaaaaaaaaaaaagaaggagggggaactattgaggactttgtaccaagaatattagcacacatcacttcatttatttttcacaacaaccccgcaaagtagatattatcactatccctattttacagacaataaatggaggtgttcttaagttacgtacacttggcacagggtcccatagctagcagataggaagcatctgaatagaagagtaaatctctcatatactgctggtgggaatgtaaaatgatgcagccactttggaagactatctggcagttcctcaaaaagtgaaaccatagagttactatatgacccagtaattctaccaagacaaatgaaaatgtgtccacacaacaacttgtacatgaatgttcataacagcactattcataaatgccaaaaagtggaaataactcaagtgtccatcaactgatgaatgaataagcaaaacacggtatatctatctacacaatggaattttatctggcaagaaaagaaaattaagtaccaatacatgctacacatgcatggacctcaaaaatgttaagtaaagtaagccagacacaaaatgctacatattgtatgattctctttatatgacaagtccagaacatgcaaatctgacagaaagattagtgactgcagaacaattaatgattgctgagggctgggacgagaaggtaagcaactgctaatggatatgggtttttttttccccggcgggaggttatgatgaaatgttctgaaattgattgtggtgatggttacacaactctgaggatatactaaaaaccactgagttgtacactttaaaacaggtggattatatgtcaattaagctgtatatatatatatatatatatatatatatatatgaaaaaaagagtgaaccgccctttaccgaataatgttgcctaacaaaactatagttttccttatagagttggctctcaaaatcaaaccatgagggtagccaggttgaatggattctatatattatctagactcttctaattagggagttgattattgaattggatatctttgaatatctggttgtttgaattggataaagaaaacctcaaagtgcccagaaaacattaggaacaagaaagtgtgtgaagaaatgaagacatgaaaattctccctcatattcccaatgctggctatccaaggttctttggattttggccccaacatgtgaaatccgttatatcattttctctagatttagaaggcagtgcataataaagtggccatcagttcctgcggatttgcaacacaagactatttctatgtgactattagcaatagttggctctatcaggaattcaggaacgagtcttttggaatggctagaactggaacatatatgcactctttcaaactttgtgctgacttcctcctcaatgttggatgcatttagacaggaaggaagataacctttcgaatcctgaatggtctgccattgggcagtcataaacataccacttctttccttctagcaccctgggtaagttccttttatgaccaagctgtggcatttagacatttccttatgtttcttccaggtacttaaggacaaatttagctcctggcttttcctgatttgggtgggtttgggtgcctctagaaagtacttcctctacacttgattgagctcttttatttgagctgctctcgattcacccgccccacccccacttcttttttcttttgcgttgctttttagttctgtttaattacctgcttctggcaatgtggagctttcccataactggattagcagcactataatagcagtaaccctttcattaccagagtaattttctttacttgttttgaacttcagcatttacaggcagctgctattaagttaaaaggtaaaaagacatgtgactttttcctgcttttacaagtccagaatacttccagtgagggttacagggctttgaagccattttctccactttaaaaaaaggaaaggtaagagctgaagtaggcctctcctccatttaaaacacaaatccagttagagaccagcctgaccaacatgaagaaaccccatctctactaaaaatacaaaattagccaggtgtggtggtgcatgcctgtaatcccagctacttgggaggctgaggcaggagaattgctcgaacccaggaggcggaggttgcgatgagccaagatcacgccactgcactccagcctgggcaacaagagtggactccgtctcaaaaaacaaacaaacaaacaaacaaaaaccacgcaaatccagcaaccatacttccttttagaatcacattttcaggattctgccatttatccaagaataataaataaataaagttagaatttagtgttacgttcattttgacttctttgtaatctgtttctggccttaggttttcttgactcagtcagatgtaaagttgttaaaacagggaggggatcaagataaggccttgctatcttggtccatttcctattccagtcattattcatgtgacctctgtaatttttttacttaccaggctagattaagagactcatgaactgcatcactgggatgtgacaggatttatgactatggtgaagtagtctgaggcacctggatgaaaggtggttatagtgagttatgtacacaattcccacacattttaaacacttgattcctacagagctatcaaactaatggaaggcaagttactcagagtttggttgactgatacctccagggattgcattttctaaatacagagcttgctttcacaatttcagcaggatacaagagtgttcagaattgggggtttaccattcaaagggcagaggccagagacttgaatttacaaggagggtcctcaacacagacatcgagattacagtacattaatttctcttgcacatgaagaagttgaggcttcacaatttcagcatgacccagtatagttgcaacatcttacccatcactgggtgtgtatcttctgtgtacactggccctttcaacatctaaggccaggctaggtgctcatagcaactggctccccaggaactaacgaaagagaaagcaagaaacagtggaggggttttggtgatggtggaaggcaggggagatagaagtgggggttgcagaaggtcgtggtgaggcagagtggcagacaaatggggaatgagaagtcttgccaagcccagaagactatcgttgtgtaaacacacaatatgcttcaggctatgtattctgggcaacagttcctgccctaaaaggtgtggacatttaaattagggtaggattgcgcattctgtgatagagactggcacagagacaaagtggaactcctctacgttggggaggggaaaacatacattagcctgttttgaaccttagaccaagacaagacaaacacacaaacaccatttaatttcatactgcaataaaattctttgtaccaaaccatgggatcaaaattgttacagatactcagtgaacagttccaatgcattcattcatccagtcacttactccacaggggtttgagtgcctgcacttggtgctgggcacggctgagccatcccagacgccaaggagtttacagtctagtccagtcagtgacgaggttaaaacgaattctcgcatcattgctactgcgaatgcaccgggacaggatcagcccttcaaattctcccacgtggtccctgcaggtgagtgtgggtgtgagcgcttgcggcccgtggtgtttgggagtgagagagcacgtgtgtcagaatggcgcctgtcacagtgcgcgtccaggtgtctctgcagtacgcctctccatagccacccgagccgggctgtatgggcttggctaggcttatgtctcccgcccacgcaccggaggcggtgcggaaagcactccgcgggcgcgattgtgagtgagcgcgggcgcgcgcgggaggggcgcgccgcgctggctgggccgcgcgcaggcgcagagtgcggaagtcgggccgcggccgccgcagagcgccgggggcgggaggagcaaacgcaggaggccatggccgccgacgccggcgccggctgctaaggggctcggcccgcgagcgcctgctgccgcggacgatggtgaccgtacgggccgggccgctgccgctgccgctgcctccgcctccccagaagcaacatccgaggctcggcgcagaagagccgccgctgtgagccgtgccgtaccggcccccgccgccgcccgaggagaacgggagggcgggcgagagagccggggagttgcggagcccgcccgccggcagcgccgctccccagggagggagtccgcagcctgaggtgaccacgccgcccgcccggccccttcccatccccgcgccccccggccgcttcccacggcctccctcccctcccccatcgcgtcgcaggctccttcctcttctccctgttcgcccctttccttttatctcgcttcacctccctcttctccctagcattggaggagtccacatcccctcttcagccgcagcacccctccctcccatcctctagctcttcccgcggtggtcgcctccctccgaccctgctctcccctcctgggccccgcgcaaagccccctctgttccagctcccgggcctcggctgcctccccgccctcccatcccttcctcttcccagggcctggagcgctcccttacattcctgagatgcccttcctcggggctgtccccctttgcctccccagcatcccatttctaggcctttttcaagacccttccagagcggcccctttccagctccctttctcgtttccatttccaactttgcctcttttgcctctttgttcactttgcttccaagctcccctccctctttcccttcgtcttaccctgctttgatctacgcagccccaaactcaagctccccgctttcaggtggtgcgaggttgtttgggggtgcggaagggcctgccagtccatttttcgaggggggcccattgctctgcatcccgtccgtcagtcccttttatagtaagagggctcctcatcccttcctttttgtccccgtggtttcctctgtcttgccatccc

SEQ ID NO: 10734 - DNA, 6000 bp, Homo sapiens
caacatggtgaaaccctgtctctactaaaaatacaaaaaattacccaggtgtggtcgtgggcgcctgtaatcccagctacttgggaggctgaggcaggtgaattgcttgaacccaggaggtggaggttgcagtgagccgagattgtgccattgcactccagcctgggcaacaagagcaaaactctgtctcaacaaacaaacaacccccaaaattagctgggtgtggtggcacgcacctgtaatcccagctacttatgggcagctgaggcaggagaatctcttgaacctgggagacggaggttgcagtaagccaagattgcgccactgcactccagcctgagcaacagagttagactctgtctcagaaaaagaaacaaaaaaaagcctgggcacggtggctcaggcctgtattcccagcactttgggaggccgaggcaggtaggtcacgaggtcaggagttcaagaccagcctggccaacatggtgaaaccttgtctctactaaagatacaaaaaattatccagacttgatggagcacgcctgtaatcccagctactcaggaggctgaggcaggagaattgcttgaacccgggaggcggaggttgcagtgagctcaggtcacggccactgcactcccgcctgggtgacagggcgagactccatatataaatataaatataatatataaaatataaatatataaaaatatataaatataaatatatataaatatataaatataaatatataaatatataaaaatataaatatatatacacatacatatatatatgtatatattatatatatgtatgtgtgtatatatatatatatatatatatatatatatatatatatatatatatagttacaggaaattgcctactgaggtgccactaaactcaccgggaagccaccaccctctgaatgtcccagccccctttgtgtgtggggaggaagggatggttctataagccatttgctgccatgtgccacaaagcaagaaggaaaagaaagtacactggaaccaggatgagaagccccttcattctgctgtgttcctctagtgctctctactgacaaagttaaacactgtgccagctggcagagaagtatttacaggatcctgctccagtatttcaaagcatagaaaagaaggttagatttggagctatgaggttataaattgatggcaggcacatacatgttctgctgcagaagaaggtatttgattacggagtgctgtcctgagaccccagaaggagtgttacattgtacagtttatgtaatgcaccattgtgcctttgtacaatctaagcaattctgggttctgaactggacctcaggggaatcacgacctgtaccactttgttatgatcatgtcttgcaaacctcagtgaagagctatctgaaacacggtgggaaaatatgcctcagggtgttctgcctttgtctatgaccaaatctaatcaacagctgccatcaagcctgaagcaataagagcacctgagttcttgtttgagaagaggtgagagcaaggtgataaagccttggctcagcttgcctcttacgtagcttggataagacttcttttatcatatatatagtgtttatttatttatttattgttgttgttttgagacagggtcttgttctgtcacccaagctggtctggtacccaagctggtcattctgtcacccaggctggaatacagtggtgcaatcatggctcactgcacccttgacctctcaggctcaagtgatcctcccacctcagcctcctgagtagttgcagccacaagcgtgagccatcatacttggctaattcctatgtatgagcttttaaccccactgagctcctggaatttgacctaataatattagtacttttttccttttaaggcagcatacaattttctttttttttttttgtagatcatggtgcagccacagagatggtagcccctccctatgctcccaggtatacgattttaataaaaggacagaaaccttgatttatctccactacagttccaatgccaggggatgcaaactcaaatatctatacaggttagggatgcaacttaaatgagtgaagcatgcagatacaaggcaaaaaggagtgatggcaactgtggaaaaccatagaatatatgcttaaataaaggtagttgctatttaacccctgcatattgttgccatgtagatctaattgtcagatattctaatttttcaagaaaagctggaaattcagattttgaaaacctgaacatcaaattttaaaaacagtaaaaaagacggtataggacaaacatatgtatgtgccgggtcggcggggggagggtcacatccagcttgtgactcctaccccatgcctgtttttatgcccctgtacaatcctttcccacactgactatgggtgtggccatactactagttttggccaacgggacattaccaagtgtggtgcataccagaggtttgataagcatttgttcactggggcttgtcctttctcaagtcactatgcagacgtttgaatgataaaaagccacagggaggagaggccctagaagatgaaaagtcattttgaatgagttcccagctgattgcatgtgggccccggctgagcccgggtcagcccacacaattgtaaaatcataataaaccattgttattctaagctactaagtcttcggaggtttgttgtgttgcaacaggtaactgaaatagaggtcatatctaatccctttgttttactaatgaatgtcctaagggccatagtggaacggacctggtgaaattcagatagcatgacagtggtaagaactttccaattctgtgctcttcctattgcttttctttcaattcccttggtgaaaagcaccaggtaaggactatgaaacttcaaagtctacctgcagggaacttatactgtgtcctgaatgcatgcaaattactgtaacttggtccttggtaatggaaagatttctaggtcatccagcctctttgactttataggtgcagagaatgcaaaaacactttgagaaagtgaaaagcagcctctgatatctggaagctggcctggtacaatcagccatgccatgatgttactagaccacagcctggcccttatagctaggctttgtgttttcctgtagaacaaaaacaattccaaagaacatcaacatcagacgaggtcattctgtgaccatgatagatccagacaaatacaagaccactctataatcaggtctaaacacgataaaaagataaaacctgatgattgtccaaaccacaaaaaatgactcaacatccccacttggctaatatgagggagctgctgctgcacttttttttttttttttcgtttttgagacaaggtctggctctatcactcagggtacagtggagtggtgcgatctccattcactgaaacctccacttcctgggctcaagcgatcgtcccacctctgcctcccaagtaactgagatgacaggcgcgcaccaccaggcccggttcatttttgtattttttgtagagaagagtttcgccatgttgcccaggctggtctggaactcctgcgctcaagcaattcgcctgcctcggtttaccaaagtgctgggattacaggcgtgagccactgcgcccggccaggctgctgtttctttatctgcacagctttagcctcaatctagaattcccttcctctagataagatgaactgagatgctcaatcatggaacgaccctctcttcctgacagtatctaatccagtgaagctctcacttccttaaaccctctcccaaatcactaacaactcttaccgagaggccctatcgttcctcaatgtgtgttctcagtcactgcaactagtaataaacccagcttgttcaacgatccgtgtcttcctggtgggatttggttagagggcacggacagacctaagttacacagagttggaggctgagttcactagaaggagtctccgcttgtgtgttccttcttagccactcttttggttagtgtctgtcgtccctccaccagaattaagctccatgagaacaggagccttgtctgtcatgttcagagctgattctcagcgcctagaacggtacgcagcggaagctggatgcttaaaaaataaccattttctgaacgaatgaatgaggggctcgatatacgcacgtcccctttaatctcgcagctcctcgcagatcgtgtgacatacagacagcaccacagcacatttcccaaaaccccgtctttcccgaagaaatctcgaaactctcactcctgggatgcccatcctctcagagcctcttccccaggccgagcttctctcactcgctggccccttcccacacctgagccccaggtctatacaccttcctaacgcacctagaacccacctgtctccaccatctgcccctaccatcagacactgccggacgggccgcgcagctacctaggcgtctagggagcactgcggcatggaccgcgcatgtgcggaaatgggtcgcatacgcaggacctccgacaagtgaggagttgcctcggagtttccgtcccggtctgggcagccttgggctgccaggaagtcaagagaagctagccggaaggacaacccgggcgcacggctttctgggacacgtagtcgtggcgctctcgaggccctgccatgagcaagctcttaactcttcaggtctgcacgtcctacgcccaccgtccagtgctactctcagctcggagttcagcttcgggctgccaagagccagcaacctggtgtcagaggctcggtcccacaacgctctgcgggccgcggcgcctgctgggaggtgtagtccccgatctgcgtactgcgttcgccgagggggagggcggagctgccggcggcccgggcgggctggcagctagagtgggtgcgatagccgcctccgcctctgccgcctccgccgtcgcctcctccgcccgggccgttcgctgctgcgcggggagagcgaggcggggccgccggggccgccatggagcccgactcggtgattgaggacaagaccatcgagctcatggtgagtgcggcccgctggaccgtctgtgcttccgtccgtccggccccgggcgggcctgcccacctcaacgtccggtgcgaggccggctctggcccttcccagacgcctcgacccagacccgggcccccagccttccctggcctcggacctggcgcgggctcctctgatccctcgacatctccggccggtcctggcccggccccctccatgcccctcgcttctccccctccccctggtcccgtctccggtcccagctctcggacgaccctcgctcgtttatgctgtagacttaggtcgcactcgctctagcaccccattctccttcttttagaaagggatttttttttctttcctctgtttcggcccaggcccgcaccgcgcttgcaagccccactcaggccgagtgagatggtgggaaggagtacggagatgggttggggccgcctgggcctccgcgtcctaggagaggtctcagcacccactccccagcctaggtctgtgtggatgccaggataggccctacagagctgggggggcagggagctttcgggtttgaggctgtggcggataaggaggcctctttcccgggcccttgtggtgtccggcttctcggacaaagggtttcctacccggcggagagggatgtttgcatagcaagggcccaggtactctggattccatcctccaggaaagagaaggcgcaacttcacgttttccagagctgctttgggaaattggagatgactggggagggagccatcctcatcactgccgcgaggtctttcttctcagaaagaaaaaaaaaagaggggaatccttggcccccgggggaagcgaccactcttctgttagaaaccactggcagccaggccagactcccggtccgtggacaccctccaccctcctccgaagctttaggatttgaaaccag

SEQ ID NO: 10735 - DNA, 6000 bp, Homo sapiens
gccagctaaattttaaatgtttttatagagatgtagtctcactatgttgcccaggctggagtatagtggctattcacaggcatgattatagtgtactacatccttgaactcctgggctcaagtaatcctctcacctcagtctcctgagtagctgggactactggtatgtatcactgtgcccagcttatagtttattcatttttaattacacagtagtggttctttttttcttttcttctttttttttttgtgacagggtcttgctttgtcacccaggctggagtgcagtggaacaaccttggtggctcactgcaacctctgcctcccgggctcaagctatcctcccacctcagcctcccgagtagctgggactacaggtgcaagcccaagtccagctaatttttgtattttttgtagagatggggttttgccatattgcccaggctggtctcgaactcctgagctcaagtgatctccccacctttgcctcccaaagtacagggataacaggcataagtcaccacacttggcccagtagtggttcttaaaataaaatcagagcattacagatatattaaggtttcttttgtccactcccaattttgtacctccagcccccttttgaaaagcatcctctggccggacccggttgctcactttgggaggccgaggcaggcggcttacctgaggtcaggagttcaagaccagcttggccaacatggtgaaacccaatctctactaaaaatacaaaaaattagccaggtgcagtggcacacgcctgtaatcccagctactcaggaggctgaggcaggagaatcgcttgaacccaggaggcagatcatgccattgcactccagcctgggcaacagagtgagattttgtctcaaaaaaaaaaagtatcctctattatgtgtttattatatatccctgtatcttcctaggcctatgggaatacttttagatatatttactaccttcaaaaacatgtggtattatttgcataagaatatgtgtgtttacgtaaatggcatcacaatgagcatatcattcatctttctttactctgtgctaggcattgttctaattttgacgacacagcaatacacaaaataaagtttctattctcatggaccttacattatcctgccacttggttcttaaaattaatatcatgtattgaggtctatgcgtgatgatacatgtagatctgtttcatttcttttttctgagacagggtctcactctgtcactcagtttagagtgcagtggtgcgatcatagctcactgcaacctggaactcctgggctcaacagatccttctgcctcggcctctcgagtagctgggactacagacacacaccaccacatgcggctacttgtttgcttattttttttttctggccacacggcatctgtataattttttatttttaaatttaatttaattttttgagacggagtctcactctgtcacccaggttggagttcaagcaattctcctgcctcagcctctcgagtagctgggacttactggcgcgtgccaccacgcccagctaatttttgtatttttagtagagacggggtttcgccatgttgaccagactggtctcgaactcctgacctcaagtgatccacccgcctcggcctcccaaaatgctgggattataggtgtgagtcaccgtgctaggcctgtttttatttttagtagagacaaagtctcactgtgttgcccaggctgatcttgaactcctgggctcaagtgatccacccacctcagcctcccaaagtgtgtttcatttattttatttagtttttcatttcttaattgttgtatgttattctatgaatatactatataatacatcattctcttatgatggacatttagttttatatcaattaggatgttgtctacttcaggtaacagaaaaacatgactcataatggtgtaaatattaaggaaacttattatttcacatcatagaaaacccagaagttgaacggttgccaggtatatatgattagggtcctaactctgctattttctgttttttttttcctctcttctaagctctgaaataattatatgtttttatataacaaattaccccaaaacttagcggcttaaaacataggccaggtgcagtggcttatgcctgtaatcccagcactttgggaggctgaggcggaaggatcacttgtgcccaggagtttgagaccagcctgggcacataatgagactccgtctccacaaaaaaacaacgaaaaaatagctagccacagtggcatgcacctgtagtcccagctacttgggaagctaaggtgggaggatagcttgagctcaggagtttgaagctgcagtgagccctgatgacaccactgcactccagtacgggtgacagagtgagacctttaaaaaaaaaaaaacaccaaaaaaccataaacatagttttcataggtcacgagttgggacacagcttagacaggtctttggcttaaggtctctcctaagatgtgatcaagctgttgccctgtgagtctttccatatggctatttctcacagtatagcatttggcctgagtgagcaaattgagaacttgagatagtacccaagaaggaagccatagagtttttatcacccactcttggaaatgacatgccatcatttctgccttattctattgtttagaagtgagttattaagcatagcccacacacaagaagagagattacacaagagtgtggttgccagcctgtgggatctagggccatcttacaggctgcctgccataggctgtctgtcctcaggtttgcagaatggctgccaccaccaatgcatcaatagtcttccctgaagtaagatgccctaaaaggatctttttggccctgcactgaaaccttttctgatctccccactcctcaattcaattcaatcaacattttttgagtgtttgctttaggacaggcccattgctacttgtgaggattacatggatcatgtcttcatagagctcacaagtcttatagaagagatatagactcatagagcaaagaattgtagtatactgtgggagatcgaatgtcccagcagctgaggaaggatgcaggagaaatgaactgaggttcaaggaagcagtggaagaaatggttcaggtgggttttggaggatcagttggaggtaggtggcatgggggagatagggcaaaggcattccagaatgtaaatgttacagaaaagtattaagaataatgtgcctgtagttccacgttcgattaccctactgttaacattttcttacgtttatttttaggtctctctctctcttttttttttttttgagacagagtctcactctgtcacccaggctggagtgcagtggtgtgatctcggctcactgcaacctctgcctcccaggttcaagcgattttcctgcctcagcctcccgaatagctgggattactggcatgtaccaccacgccaagctaatttttgtatttttagtggagatggggtttcaccatgttggtcaggctagtctctaactcctgacctcaagtgatctgcctaccttggccccccaaagtgctgggattacaggcgtgatccaccacgcctggccaggtctttctttttaatagaaatcatgacagatctatctgaagtcctgtttgcttctccccacattttccgctactccttctttcacccctttaccattaccatggtatccatctagttcatcttatatacttttacacacatagattttctgtaaacagtatatactgttctaatttacctatttttaaatttatataaatcatttcacagtgtacatatttgttggcatgtcgctatttcaataacttaagtagttgtgacctagcaaatgttgacacatataggattcctttgttttatttgttgtagtatatcactgtagggacatttggtgttttatttatgcgagacttattggacatttctgctgttcacattttccgccaggaagctggcctccttgaacatgtcttgtgcacacctgtaggagtgtctgtatttttcttttctttctttccctttttttttttttttttttttgagacggagtctcgctctgttgcccaggctggagtgcagtggcagtgacctgggctcactgcatcctccgcctcccggattcaagcgattctcctgcctcaggctcctgagtagctgttattacacgcacgcgccaccacgcctggctaatttttgtattttagtacagaaggggtttctctatgttgaccaggctggtctcgaactcccgacctcaggtaatccgcccgcctctgcctcccaaagcgctgggattacaggcgtgagccatcgcacccggcatttccgtatttttctagacgtgaaattgctgggtcataaaatggacattttaaatttcatcacacggaattgtcctcaaaagtggccgttctatacattttgccccacagctatctctgagtctgttgttactccttgctttcccccaaagcgcaagcaactgagaccgcgcaaggtgcgagccggctcacgggcggtcagcgcctcccgcgcagttggtacgtcccggatggctcccccgcggcgggggttggttaagtctccgcgcgctgcgcctgcgcccgccccgagagcgtgtctctggcatcggacgcgcgcgcccctccccctccccccgcgctcccaacgtgtggcggctcgcgacccccggcaacccggagaaggtctacagagcggcctgcgccagcgagtgagtacccgccgcctgcgcacagctccgcccacccctccctgcctccttttcttcctcagcgggtccgcggcccgctactctccgggaggggcgcttcccgacgccaaggtaggcctctcccgacgccggggcggcccttcctgatgccggggtgtgtctctcgcgacgcgggggtgggctccggacgccggggctggccttgccgaagtcgggggtgggtccctccggacgccgaagtgggctcgggatgcggggctgggaccctcccgattccggggcggattccggacgccgggaccggccattactggtgccgggttgggcttctccagatgccggggctgggtccttcccaaggttgaggtgggttcgggacgcgggttgggtctcccctgacgccacgcagggcccctcggaacgccaggttgggctttgcaccttcggttgccgggcgggtccctttcacacctggggggcggcctgcatcctcccgggcgtcgggcgagcgccgagctccctcagccgtggtccgcgccgcctcacgcctcggggcgccaggcccgcgctccttcccgtgccgggttgctgttttgttgtgtgatcctcgttttctctaattatttgccccgaaaataacccccagcgcactccttggagatccctatcgtcctagacgatttcgcccccgcagggccggcgcgtttccaggtgcttaggcagcgccgcaggcttctcgagcgccacagccggcgggctggtgccctgccgctcagttaacggggcgcgagtcccgggcagtagtggagctggatttgaatcccagcagctggactccagtgttctttcatttaatcactacatcgcaccgagatatagaaatgacacccggaaaaagtgaaaagtttatgcttctgtctttattgttttcctgtcaagggaggcagtgccttgtagtcgaatgaaagtgtgtttttggaatcagatacattcagcttcaactctcagccctttaccagcttatccgctgtttgcgttaagtttcctcatgtggaacatcgtgatatgaatacctacgacgcagagttgttgtgatactagatactaaagtgtttggattgtattgttacacacttgtcctaaactgaggctgaatataaactgaaaaaatggaaaatgaagtatcagggatgtatgcgtgtgtagg

SEQ ID NO: 10736 - DNA, 6000 bp, Homo sapiens
agctaattttttgtatttttagtagagacgggtttcaccgtgttagccaggatggtctggaactcctgacctcgtgatctgcctgccttggccttccgaagtactgggattacaggcgtgagccactgcgcctggccgagatcagactcttaaagaaactactctaggcctggccgagatcagactcttaaagaaactactctaggcctggccgagatcagactcttaaagaaactactctaggcttcaggacaaaatccagatcccttagtagcaaggccttccaaactagggctccttgaccctcaggggtttcactccctcctaaggagccctcaaagctatccctaccttacctctgcacctacgctgatccctctgcctggaacgcccttcctttaactacttgacctttacttttcaacccatgaggctggccaccaaaattagaatcttccacaggccaaagcctccactgggtggtgagaatgcaacacttagcagaaacagagcagtccttgtgaggagacacctgagggataagaagaaccagtatacactacaccaccgctgtgaaagcatgaaacaaatgtgacctagacctgagggtcccagaggcttccctgaacaggcaacctaagctgagaccccaagaaagcttagattgaaccgagagggttggggagggatgtgatgggccttccaggcagaacaatgtgtgttctgtgtgggagagaactaatgagtttggaggaagagcggaggcccagtctggccacaaacacaagagtatgggacacgccagaggaagccacacggattttgcagggagacagtaaggattttgctcatcatcttaaagtacgtaaagtacgtgggaaagcctcctgcacagagttttagctggcagtcagcaggccctctggtcctggccacgcacctttccctcagcctcgcctcagcattcaagggaaaacctgccaccgcgcaagccctccagggtctggaatgctggcaggaggggatggatgcctctgctcctggagaaaagggctctggcagggaagcctgaggggctggttccaactgtacaggtcctgtggactcctcagaaaaggaatggtgagatggattttcataggagagcctctccaatttctccttgggacttttttttttttttttttgagacggagtctctctctgtcgcccaggctggagtgcagtggcgccatctcggctcactgcaagctccgcctcccgggttcacgccattctcctgcctcagcctcccgagtagctgggactacaggcgcccgccaccacgccctaattttttgtatttttagtagagacggggtttcaccgtgttagccaggatggtctcgatctcctgacctcgtgatccgcccgcctcggcctcccaaagtgctgggattacaggcgtgagccaccgtgcccggcctctccttgggactcttaccttgtatggaatggaagtggtgcctctggggtcccagacacgggagagaggaagcagcccaggggctgggagaagtggtgagacccagaagaacggtggacccagtcaggaagggtcctgccagcagggcgtgggccagcctcggggtcttccccaaaaggcaggtaggggcctccagcaagcttcccacctccgtgaggctggagaagaggccccctggatgagaaggaagaggccggcaggtccggcgggcgcaggcacaggtagacttctggtgggaaaagcgtgactcagcctcctccagcggctgcaggacgtccccccgctagaaagggccgggctccctttgctgacccagagtcaacccagcgattcctcccggggaggcggggggccccggccccggcccagagcgcatgcctatgccgggagctgggcgaggacagggcacagccacagctgggtgcccaacgggaaaggcggccgttccccctcaagctgcacctgaaggggtccccagggtcgaggccacttctccttcggctcagggttgaccttcagtgaccactgtggcctgcgggcatcccctgggagggacggagggggatggaggaaaactccaaagggaaaggccgaatcctgcagggtctggtcgtcggaaagccaaccatacagtcagccctccctctcctcgggctgccgtcgccatccgggtccacacgggctctaagacaaaaccccaattgcccccaaggccccataggaggggcgctgccagaatcgcctatttttagtgaaagagaaccgggccgggagacggcggcagggggccggagcattcccgaggtctcggtctgggtgtcgcgaggcagggaaagagggcggccccggagcggagcgggaaagggggcggggcagggtggggccggacgtggcaacctcccgcttccgggacagtgacccgcggcgcggcaaggcctttcccttgggcgtgggtggggacctggactccctgtggaacgtttaagaaaaagagaaccgaatgaggtttcgcgaaaggaaaaaaaatgtaactgtgatctagtgctgttgacggccgcgaatggagaaaccccgtgttctcgaggacaaattggaactcctcggcgttttaggtcctcaacccgggaacccctcgcaccgcgaatctcagtccacagcgggaggcgggtgtggtcgttcacctatttgtgcccgagggctcagggaggcgctggcatgacccgagtggggggcagcaagctggttagcgggagggtgaaggcagcggtcttccacgaccaccacaatcacctgggtagggattgagtcccgtattggaaaagcgaaagaacagtcagctgggggtgccaaggaggcaggtgatgtatacaaacctggagccttaggatggtccacaggctgcggaggaccacagccaggacaacgtcccggaaagcccaagggagactgcggcggaaggcaggggaacctgcagaggaccaggagagcaagctgtttcagggagggatcctggccttccctgcacacctgggcgtctacagcctccggcagctctgccaccctccctcgcctgtcttctgcctttacgcaggctttctagcagacattgccaaggttcttctccaggccttcaaggccctaggttaactgcaccctccatttccctgctctgtcctcagcccctccacactccagctcagtacgttggcactaactcttccctccgattgaaatatttttcccccatttgacttccctccacaggaacattattctcccatatacccgcagggctctctccgtgtctctgttccaatgttctcccctcttcgcataccgtaggaagtaaactgcaaataaaacaaaccagggtcccccctctgtcttgttcacagctgtgtccccaagacctaaaataaggcctggcacccaagaggtgctaagtttcacaacatttactctgccttgttcagggcgctttacatttgcttcttcactttccacaccaccatgtaatgtagatactaatattatttccaatctcatttcacagatgagaaacgaaagttgatagatgtcacaaatagaaaagtatatacttaggtataatgccccctttattttgcatagatgttggtggctgctatcatcctgatctgtgcccctgtttaaaactacttgaatagacatggtgccaacactgtctcttatagtcagagatgggtgagaatgggagccattacttatttaaattcctgcggtcgagcggaaggcagaaggacagttaggtatccgtgttccaccgcttccctgtctgggcacgtccttcagggcacagttggacccccagacccctgggcttttgtgtacgctggctgggcccagagagagctttccactagatgtccccagaagtcagaaccttaaggtcctcctttgggcatttccgtttctgcgagagcttcccgtgttctggcctaggcaggaacggattggcagtctagcaacacacagggcaatttttactttattattttattgtatgtatgtatttatttatttgagtcggagtctcgctctgctgcccaggctggagtgcagtggcgcgatctcggttcactgcaacctccgcctctcaggttcaagggattctcctgcctcagcctcccgagtaactgggattacaggcaccccccaccacgcctggctaattttaattttttttatttatttatttggaaagaggttgcatcatgttggccaggctagtcttgaactcctgaccttaagtgatccacccgcctcggcctctcaaagtggtaggattacaggcatgagccaccgcgcccgggaaaaagagaccaattcttagttcatccagagtaaccctctcctgccttagtccagcctggactaagtccttccggagttggtgtgcatcagaacaaaaacctcgtgaggggagaacaccctccggaagcacagttttaaagtttatttttaacattttaatactctactttttaaattgcccatcgttacccacgatagtgaaatgaaaattaagctcccctggggttgccccgtcaaccctccccgcaccaagtggaacaggcggagctcgagctatgccacataggggcggggaagcagcccggcggtcctcatgggaatgtgccgtacacttcacctctttcgcttctcgctctacatcatccctgagaagcctttttaaacacttgaatgtgcttgtttcagagtgtatttgtaaagtgcagtcagattttgttgtacggaagacgggactgtgatgccttgcaatttccctctgccttttgcattacatggcgccgccatcttgagcagaaatgtatcatggggctcgccattttgcatggtcgagcgggtatttccggttccggcggggggcttttctctctctctttcactgcaaggcggcggcaggagaggttgtggtgctagtttctctaagccatccagtgccatcctcgtcgctgcagcgacacacgctctcgccgccgccatgactgagcagatgacccttcgtggcaccctcaagggccacaacggctgggtaacccagatcgctactaccccgcagttcccggacatgatcctctccgcctctcgaggtacggactaaggtagatttcaggacccgagattgcagggctgggggattccgcgtgtcgtgtagggaattccgcgtgtggtgtggcaggccggtggcgcgcgagttggcggggactgacagacttctctgccccattgtgaattggggcgtgcggacccgagcctaggcctcaacccgggcgaaccacattgcagatgagaacctacgtgtacatcagctcgcagctgctaggagggttggagagttggaaacttttaaaatatcttttgccttctccttcgtagtgtggccgggggcctacgggccgggcggggcggtgatgaccccaacatgccatctgagtgtcggtgctgaaatccagaggctgtttctgagctgccgcccggcccaaggctcgtggggaggcaggtggactccagaggacctcgtggctcaagtgtcggcctactttttctgcccctggttctccccgtccctatccctgtgttcctgactgcgtttagacgcttcttgtgcttccgctttgctgctacactgttaagaattgtctgacttttgaatcatgtctggctgttaatcgtaaaatttgttgagtgggacaggtttcagtaaaagcatccaatcctgtagcgcctgaagtggcttttccagcattcattactacatttctgtcggccctcagaggtaggcataggaggccccagctactctacagccacaaactgctgtgcatttggttgcagagaagacacaaagtggctgttgagttcgtctgagtttcaggaaagggtgtctgtatttctggcacctaaattaagtt

SEQ ID NO: 10737 - DNA, 6000 bp, Homo sapiens; identical to SEQ ID NO: 1131

SEQ ID NO: 10738 - DNA, 6000 bp, Homo sapiens
cacaaaaggacaaccttattttgtaatttatggtgaaaatacggaagcatcagtattttattatgagaggccagtttcctcagcacaggcctctcaaaggtgagtaccaacgtcaggctggagcatgaccccggaggccggccaccctaactgagaacgtgccatctggaccctccccaagtcccggttccagagccagcagccctagggcccggcccgaggctgtggagcccctcccctgaagactccactgcggacactccacggagtgaatgctgctccccttctcactttgttgctaggaatggccagactggggcccgaagcagggaatacagagggctttcgggcatggagtgctcttaacatctaccctcaggcgctgcctgatcctctcatcgagtttccttttctcccactctcctttaagtctgttctgttgtgtttctgtgagtcagcaaacccttcagtaagcataaaatagaaaagtcaagctttccccaggggaatggaacctaagagagaaatctaatgcctttctaaactacactaatgccaactttatcaagcatttgttttgctttcttcccctgggttgcaaaaccaatgagcagttgctaattctcacagccagtagcaagaaacagagctaagagcaaagtactcaggagacagaaaaacttactatgctaaaaaaactaaatgctcaattagtgtaagacaaaactaagaattaaaaagaagtatgtttttaaaaatgtctagtctcaagccgtgccacaccggacacctcactgcttgaaacaacatgtcctatttacgccagcgcagtaacttagaaagaaaagaaacagacttctaacagcgtgcaacctgacctagtttctagaccaaagcacagagaaaacgttcacgaccaatcatttccttaatgctgtgtctgtaaaacatcatccgaacacagaaacacctgtgaaagctcaaaaactagaaatgatctaaggtgaatgaagtcttcacaagacatgaatacacagaactatgccacgattacttcgggcaatgaaagtaacttaccttaaattccgtaactgacttgtattcattagctacaattttgtctttcatggtgccaaaatccatgggatgttttattatcattgaatatccaggagcaattgcatccgtgacaggaaaagcaaaaaatccatggggatcttttctgaaagcaaagacatcttaaagcggaaaaatctagatttctaaatgatacaaaatctcttacaatccaaaaattggatacaactgaccgaattttgtttcttaaaaataaaaaagttacgagcgtcttttaatttattgtgataggtatttcagatataataaaaattcccccaacgcatcctggcggccatcaatgtcccagctctagccttgacttccctcactctactctgacttcagagtgagccactaatgagttcatgaactcttcctacgcaccccgaagtggactgggagtcaccaagagaaggtgcagggtctgtttcacagctgacgaggctggcgtggggaataaggcctcagaaaagatgacaccacacccccccagacactagctcttcagaaacgccccggtttacctctgaagctggcggaggaagtgttccaggagttgctgaataggtgtgctctcattttcggctgacaatttaaggaaaaaaaaattgaatacaagactttggtatcccttcattagagagctccaagttcacagtatctgtctgtctggtgtctcacagcattttaagttccaccgagaactggggatataaagatacatccgactcagccttggctcccaccaagctcagccgggtagaaagggcacccccacagcaggagtcataaaaatctcttgtaataaccggtagcccttacatcaacaatatgtggtgatcacttagcaatgttttcagctcataccactactctagacaagaaatggacgacggaacaaacgctctggacataaaggttgatcctgaattcaccgattattatttcacttgaggtcccttaaaattcaacaaaaagtaaataaatggccggcgtggtggtgcgtgcctgtagtcccagcaacttgggaggctgaggtgggaggatcgcttgagcccagggttatctgagcccaggagtgaatcacgacactgcactccagcctaggcgacacagcaagaccatgtttcaaaaataaattaaaaaaagaaagtgcctgaagagccaaatgaccacaggagctcagaaggccaccagctttccagaactttccttcagtggagccagcaggcctcagacagtttctgacggcctgaatgatcgcagcactagcctccccactccctgatgtcccatgtcccaaagcccagccgtctgtttccctataatccaggaaccactggatgctgagagttgctgggaagagacaccccttgtcttaggtacaaatgcctcatcactgtgagttgtgcacaggaaggctggggacaaagagaactcagagggcaagtccttgtcaactggaaattccagccaaatgccatccttcgcagatggtgcccacgacagagattctactaaaggcctccagcttcctttgtctcagcctatggtcactttcagcaacttcagacccaccatttgggcctcgaggtcccttcttcccaaggggaattacctgcgttttcactgacatgcatctctcttaccagtctgacccagatggggctactgttccaatactgtcttaagtgcaaacaaaaccaaacttcaagacccagggctggcaaactttttacataaaggccagacaaaaaacagtctaggctttgcgggtcacatacgattggtctctgtggagatgcctttttgtttctttttatgaacgcttaaaaaacatataagccatccttagctaacaagttaaaaaacaaaactgaagggcaccagtggtaactggccacgccttgctctagacattcagagacaccggaggaaacctcaggccagaggacacctgggatgaggccctggaaataccagctctcctccctcccatgcttctccccaaagcaacaggacacggtgccgacccctcatttacaacgatgagctgtgaacaccaggagagtctctaaaagtgcacccttgcctggctgtgtccggcacgctcggactggccgatctgggggcggctccacctccaccttcttcccaggatcaaagtcgtcagcctctccctccgtgtcacagtgctccctctctcgcttccgcttcttctcttcctgggcggcagagtcaagggagtgagaaaggcaggagtaggcgggatccggacaggtctgcccaatcccctcgcagttctcaggggagggacagaactaagggaaaccccctccgagatcctcctcatgccaggctccctcctcacagagaccctggcagggtctgctgaggaacagcacacccaggatcctggaactgagtctgcgggcctcagcggttcgcgttttgctaccaacggaacaccccctcccctcctccagccacgcaggcgcactctgcctgggtcctgggaccaggctccccacgggctcctcgtgggcagcgtccgggccaccgccgctgctcctttacctttcgcttccttctttcctcatcgtccagatgcttctccttctcggacttcttcttcttcttctttttcttttctttgtgcctctctcgctcatggtctgacctgtcatcatagtaactggagtcgtggccggatcctgagagttcagtcacttcacttcctccgaccttcaggactagctttagaggcttctccaggggcttgtcggcataatctgcacagacacagaccgagttctacccgcgtgctcaggtgcaaacgccacgcagccaggtgagacgtgaaggtgctaagagggaaaggcctccctaaggagtacagcggggctgccaaccagcagggaaagacggaagggaagaccacagtggcggcatgtcactgcctccttgttctcccttcccctccgcagggagcttcaggtccctttcgagccacggtgtcctcaccagaggccctgtgggatgttgttcacattactcgttcaagaagatggattaagagggacctggaaccccggagcccgatctccctcctagaaacccccagcacttcggttcaccctcgcctgacttcctgcaggcgcccgtgctgcccgctgacacccatggagctgctgcgggagcaagggagagggagggaaaggcgggagaaagggcagcccagcttctccctgagctccacacaaaagccagcacagatgcttccctagtctccaggaccggggtgagtgggcttgcagcctcgaacccagaaccctctaccaggaacgtaagcgcctacccaggacccctcacgtgtgcccggttccctgcccgaaatcccaggaccccctcccgcgtgcccagaacccctccctcgtggccaggacctcgcccggtgcccaggacccccgtccgcgtgcccggaactcctcccccgtgcccgggaccccgcccgccgcgcgtcacaaagcgccgccgcctcaccctcgtaggacgagcgccactcggccttgtgcttcttgtgcttcttgcccatggcggcgccggcggcgggcccgaggcgggggctgggaacagctggcacccggtcggaccttggccgccaccgccccctggccctggctggccgcccgcgctcgctgcgccgaggttgccgagctcgctgggccgcgccggaaacggggcgaggcggggccgcggcaggaagtggccctgccgggcccgagcgcttccgggtcaggaggtggtgcgcctcgcgcggcagattcgaagctagggcggggcccgcgggctgaggcagcggctgtggcggcgacgctgggcgtgaggtggcggcggccgcgccctggttgggtccccactgctctcgggggcgccatggacgaggccgtgggcgacctgaagcaggcgcttccctgtgtggccgagtcgccaacggtccacgtggaggtgcatcagcgcggcagcaggtgagccggacctgtccgacacatcctctgggcacccacccgccccgaccccagcgcgtgcaccgagccccgaccccagcgcactgattctgatgcgaccgaaccccagggtactgatccggcccgactggacccgggcgcacaggccgccgggccccgaccggatcctagcgcaatgacgcgaccccaccgcagggcactgacccggccgacccgagccctgcgcgcaggaccccagctcacagattgagccccgacccgacctcagctcacggacctggccctgaccctgcccctgccccggctgtcctccagtgcattgatgtggccctgagtcccacgttggagaataggatggctgcgcattacagagagctctagtctcagccgaaagctgggtggttattctttgagccactgcttctcagaccctttaattgttcccgttcctcacggactcgatgttaaatttttagggttcaaagcacatcccactcatttgtgaccaagtcagttcatggtatggtggggcctgtgggctgtgctgctccctggagtggggggaactcagcggcggggccagaccttcacagaccctccttatgtccacggagggtggattgaggtcaggtgagaccaccagcctcagaggggatgcagaggaagagacctttcctttaacagaatagctgttgactgggtattttctaggtgctggagttcagacacgtcagcataattgcaccagggcccagagacacctgcacaaagccccatcacagcctggcgacacctgtgtaaacaccttagcgctcagagacacctgtacacagtgccaccgcagcctagagac

SEQ ID NO: 10739 - DNA, 6000 bp, Homo sapiens
tagttagcactttgcaggctgtcactgttccaacatgatagtgcttttgccagtctcactactggctgtctcagaatgttctttaaatgaaggcagcccacaacccaaatggatttatagactttgaaactggaggtagtcatctgacagctcgcaatctcatcttgggcaatgtatatataatcaatatcctcatccaaaaagtaaggatgtcattattttattaggctgaaattgccaagatttaactgtttttgacttaataaaaatagcaatttcatttgatttaacctaaaacataatatagaaataaaatttaaaatatgcaggccgggcaaagtggctcacacctgtaatcccaccactttgggaggtcgaggcaggtggatcacctgaggtcagaagtttgagaccagcctggccaacatggcgaaactctgtctctactaaaaatacaaaaattacctgggcctgttggcaggcacctgtagtcccagctacttgggaggctgaggcaggagaatcacttgaacccgcgaggcagaggttgcagtgaaccgagactgcaccactgcactccagtctgggtcacagagtgagaccccgtctccagaaaaaaaaaaagaaataaaatataaaatatgcaactataaatataaaatatataaatagaaaatataaaaatatctgtctcatttacctgaagggtgacaagaatctaaggagatagtatacatgaaagtgcttgtaaatctaaggccattattactgcgactattatcattactgcaagctccaaataaacatttaaaagagactgagaacagggcacccttctacttgatcagtgaaagtataaaccaagtcctgtgggtcttgaggaattctgaggcactgagagaggctgagcagtgcatcgcttgactacctccctctcagtgttatgagtctgcaggtgcttgaacttatggccatagtgctggccctagaagttactccctcttctttgccattttttatttttttatttgagacagtctcactctgctgcccaggctggagtgcagtggtgtgatcatagctcattgcagcttcaaactcctgggcccaagcattgtcccacctcaacctcctgtgtagctaggactacaggtgtgcaccatgacactcagataatttaaaatatatatatatatatatttttagagacagagtcttgctatgttgcccagactagtcttgaactcctggtttgccattctttaaaaacccagttctatactgcaggagatagtgtttggcacagaatgagaatcaacaaatagtagctgagtgaatgtatgaatgaatgaaccaaaggaaggcaagccctgggaaaatcacgtagtggtacattcttgtacaagtgaaatgagatgaagctcagcacccaggacacagccttgagtgggagctgaatggccaaagagcaccctgtgaagtatccattttatgggggattgcgtgggagtaaaacagccacactctatttcctttgctttggtcctgtgagacaggatgtggggaggcagggataatttaacatgctgaaatgtgtagcgtttcccagcagaggcagtagcttccatctttgctttcttctcgctgtgttcccagccactgctggtagtcagtaataagtgcttagatttgtttgcagtcgttctactccaaacagtagctgctactaggtttacatctcttttgttgttggttttgttgttgtttgtttgtttgttttaagatggagccttggtctgtaacccaggctggggtgcagtggcacaacctctgctcactgtaacctctgccttttgagttcaagcaattctcctgccttagcctcctgagtagctaggattacaagtttgggctaccttgcccagctaatttttgtatttttcgttcagatggggttttgccatactggccaggctggtctcaaacttctgacctcaagtgatctgcctgccttggcctcccaaagtgctgggattacaggcatgagccaccacgcctggccaacatctttaagcataggacaccactagttacttaagtggcatcactgtatattctaagagtcttttagttcaatatggcatatttgtagtgttgttggaagattttatagagctctgctaaatgctgtactcaaatgagatcccaccaatgtgagattgtttctaggaaatgacccctttttgaagaccagttattcaaaactgctgcatttcaaagttaaggctgatgacccagggatgcaggaaatgattgatggctctcctcaagagcacagcagaatctttgggaatttcttatggcccagatttggggaggctgattcacctcatttaagtcttcaagagactgatatattgaaaccaataagaaatagtctttctaatgcctggaaggctcatattctttgttcagggccttcttccgttaaattagtaatcagagagggcatcagagaatcagagcaatcagaaagggagattcggggttttgaagtatctttcatcaggttcatggtgaggtcttgtggctgccctgtcagagtctttcgctccagtgacaggaaatttcataatttcctttcgtagatagtactggataaaaactgccaacttctgtcttttttaaccatcaatattttacattctaaggtgacctctcctttctttcctcaaagtcttctgtttaggatacaattagttgagtagattcccgcaactaaatgataatgaaggttttccaaatccaactctttgagattatacacaggtttctttggctggagtcctgaatgaactcaagcttatcaactgcacatctacccaccacagataaccaggatcaccttgaactctctactggacttatttctaagcccctgggaggcatctcacctttttgcattttttttttttcttttttgagacagcatctggctctgtcacccaggctgaagtgcagtcatgagatcacagttcactgcagcctcaacctcccaggctcaagccagcctcccatcttagcctcccaaatagctgagactacaggcacatgccaccatacccggctgattttattgtgtgttttgtagagatggggtatcaccatgttgctcaggctggtcttgaactcctgacctcaagtgatccgcccacctcagcctcccaaagtcttgggattacatgttgtgagccactgcgcccagcctttgttcacattttttaccagcaagcagtcctttttgtggtgagaggagaatgtgggaaaggctgtggaggacaagcaagtattagaatgagagatttcatcctaatggcaaggcttgttgacttcccacagtcattagctcatttctctttttagatgctctttgcgctcatttcactattgtaactatacttactatgtgatatatgagactactatccaggcttctgtctctgcaagtggaccagtggttcttaacccatttctgttcaaacctactgcagaaatatgacatgagagtcctcagtaacagcagttcactctgaaattggtagtttccaaaaatattcctgctatcctctccatccttttctcccttccctttgttaaaaatcactgaactagaatatgagctctttgaggtcagagatgtgctcttctttgattccaaccacctaacacatggctgggacagtgctgaacacatagaagaatgcctgaggtcaccagtttgtttgtgagagggccaggaccacaactcaggcagtctcaatttctagaatgctacacttttcaactactgtaacttttccagttttgtctctgggatgatttagtactgctgatttttttctaaggttttttttttaaatttcacaaataatagctgagtatttttattgtaaaggagtcaagcaataattaccattaacttaaaaatattttaatattttattcaacatttaatattgataggattttaaatgcaaaaccgcttgtcagaatagcaattttagttttagcatctattattattcattgattcacttattaagactgccagcatcttggctttcatagccttcctttttaatgtgcttttaggacttgtaaataatgtgagctaggactaaaggcgtgtcttcttcttaacagatggagaagattaagacaacattctgaataattagacacaaaaagaatgttcttagtgttatagttatttttaaagacaccttttttcttcattgaaaaattgaaatgtttccctttgagttatatacccatttaaatcaaaatggctatctttattatcttaggcagttccaattcgctaaggatttcagttggttcatatgtgagaaaatgttatccctctaattttctccagaaatcctgcatgcacatttttctaaagtaacttattttgtaaagaacccttttcttttttttttctataatgatctggcagatgaaaatgtaacatcatttatttcttcctgaaatgaattactggttttacatttgctttattcttagactatcccaccatttcatcttagatgagatgaagagccagcattctttttgttccaataaacaagtaaatgccacaaacagtattgtctaccaggtaccaggcactgccttagataccaaggcttcaaagaggaagaagagaggttccactcttaagaaggtccctgtatgtagggaagccgtcaggtaaattgctgaccaccattcttgtggcagatgctgtaggacacatgatatagtggggcatggggcacaaaggagggaccaactggcatctccatgcgggaattcagagagggcgtcttagggaaggagagccttgaaatgagtctggaaaggtgattaatttgtcagaaataaggggaaaggagcactgtgggcatgcatagagcatggagatgtgagatagcgtggtgcttggcaaaactgtgagttgttccatttggctggagggcctaggcactgaggcaagggccagaggatggcctcatagctgcacatactcatttttttttctggagcacattcttggtagttggtatacttttcataagacatagtggagtagacgatggacgaaaggaaaacgtgttgtaattgcaaatctttaaaatgttgactggggttgatggagtaattatgaaggatctaggtgatgatagtcaacaaataaaataaaataggatccttcctccttccaaaatccccagaatctatttgccattggaaatagagcttttgaaaagagatatgaagcaaaccaactcttgactgatgtcattttcagctctctccccagccttcatgtgttaacctggggatgatgtggacctgggcactgtggatgctcccctcactctgcaaattcagcctggcaggtaggttgacctgggcccttttacagatcatgtgattattattgccttctttggacaagagttgttaactttaaagcgacacctggattatggacatccacagatagaaaaggggacttgtgaacaccctgaatttgtgtgtgtgtctgtgtgtgcacacatgcatgcaatttcacatatactcatgcatgtgcaaatgtggcaagatggcttaccatattttcaaagggagatacaacccccaaaatgctgagatctactgttttagaatatagtagtctctccttatctgtgggggaatatgttccaagatcctcagtggatgcctgaaactgtggatagtaccaaaccctatatatagtacatttttccttcacatatatacctatgatgaagtttaggtacatttaggcatgaagagattaaaacaataactaataataaaatggagccattaaaacaatttactataataaaagttaggtgaggtctggcacagtggctcatgcctgtaatcccagcactttgggaggct

SEQ ID NO: 10740 - DNA, 6000 bp, Homo sapiens
atcagaaacctggtagaatgtgtcagagtttatacatacgtaaacctgggcttatttatatacttaaatggatgttttccttagcataatgtcagttaagaccagtggatatggagcaaataatttgaattaccctaaaaggccctctgttctaagttgtcttaagttaaaattatgaagagaggtattcattttacccttagatgaagattttggttaatttttgttgtctattctttttttcatggtctttgttcataaatgatgtccagaaaaagaagaagttttctaggttgaaagctgcttgtgcaacatttgccacttgatggtgacttgtacatatgaaatatagtattcagtttgtaacttttgaacagtttaaggatcaagagacattttcctaactatatctgctgagaagtgaaacaatgggctgtatttgcctctgaaatgagttttacgaaactttgaggaaagggagaatgatacatattgttttaaagaatccagaaggtaaagttagttttccagtgtgtctaggcctttgaggtcccagagaaatgctgacattaaaataaaagttttcctacaacactagcagcttcgtgaaaactgtacttttgatttactaattagtgagtcatatagatcaagtgacagtaatacaattatgtacattagttggtgtcaaatttggacatacgaaatatacagaaagttgatggttttctcccaaagcaggaattactgattcagttctaccagcagagggctcccttttttaagctaataaagaacatgtgtcttgcagatcactttttaaacactaaaattcaacgggaaaaagattcagctcacactttcctaatataataggacctctttggtagatgattgtacatattgtgagaaatttgtttaaggcaaagtttttccaatctatttcaagactttctatacgttgagagagtactgctttccagtggcttattttcttctgaaacagaaaatatactggtggacttaacagagcattttaatcttagaaggttttgacatgaaacatcatgtgaatccagacaggtatgcttaggagactgatgtttccaatgtttctagctttagaaaggctatttttaaaagtagggcaagattatgcagctcaggatgcaagggtattctctgaactaaccatatgtccctatgatcagatggcagattcacttatagactgttatttccattgggaaagtttttcaatattatatcagttgcactaaaggaaagtttgtaaaatcactttcattgtgggtttaacagcactttccagatatttcaagtaaccctgaagctagttgctgctgttggcctgtgtggactttatgtgaccactggatcactttcccatgcagagtatgagggtattattgaaagaacctatgtcttcaaagggaatgaaatgttttgttttaatttaagcaagctaaaaatagaaaacagaaaaaaccagagttttgttaggggtgtgaaattttttgcatgtggcttaaaagattaacttcagttttgtccatttttttttacgttctctagcaaagggaagtgaggagcagggacaatgggtagagaagggcatttgaaaccatcagaagattgggttctagtcttagggctataatcttctgtaaaccacttcacctccctgggtcagatttcgttttcccctctatggcatgcaggaattgattgaagtgaactctaaattactttctggtgtaaagtttggtgatttccctggataaccttaaagctatctatgctcatgcaactgaaaattttcttagatcaaattttaattaaatagtagtcagtaatcccaagtctggtccattgccactttctcaaataaagggcaaacatccgcttagaaaggtatgcccttctctgcccttctatcctttaccccattagctggcacataaacctaatgcagagacaccttttaattagcaggtcatatggccatttaaatgcgagttgcaatcgacctcataaaaatagccgcagtgttgttttattctgaatcgtcacatgatcatggagtatagtatgcatatggtgtggggtttaatattcgtccgaggatgccctcctactacttactattgaacatttttgtaatctcctccctgcccgagttgctcacaagggctttcctgttacacctgcagggctgtctgtgctggtgtgtgggaggaggtgcaagaggtggacacgagcgaggcgctgtgttctgggttgttccaagaggttcaggcctttacaagtgaggctttgattctattttttgctgaactagctcagccacttcctgtgtttggctgtgcatagtgcctcgcttcactgtcggctacttgagccccgcgagccagccagcgcgctcagcagccagtgagactattttaggtcccctcacaatggccttctcatttcccaggcgaaaatgagcaagttggtcttgcattggccacttgtcagccgatgacaactttgacttgggctcccctccccctcccgaaatccctagctcagcaaatatttgaacctgcccaagttaatcatgaagctgcgatctttatctaagggagacgtgcgagcgcctgggctcctttcctccccgatacagtagcgaaatccagttggcttctcaatgaggagccggcagtgagcggcggtggcccggacgcactgccgggcggggcgtggggcggagggacgagccgagccgagccaagcggagctgggccactgtgcacgcccggagggtcctggcggcgcccccgctcctgcgcgcactctcggcgccggacacgagcactgcctgccgggaacaggctggggggaggtgcgggggcttggcccacttggtggaagaacagctttggggattttttttttttcattgtcggatacaggcatttcaaagggaaaccgttgaaatgcataacctgcaaagtaagttgccttgaatttgtgcacttctctgttccttatctgagcggtgcctttctgtagtttgtcttggagtacgtgtgtgtgcgtgcgcccctgtaagcgctgcctggggaggacagatgggagattaggggagacactccccctgtcctcgagggggacagtggctgggaaagatagggtttaggttggaatttcagtaagaaggtactaattacaacgtgcttggttggaagttggtgccaggccagggcttggagagaccatgggaaaatcacctgtctccctgccttctccctgagttagtttgccacagaagatccaacagccagactggtttgcaccgacggttcccaaatgcatggactggcactctgggctgttacacccgccacagctgctcggagaacttgtctccttgcttcgggggagggtcgacattttaattaaactaaaaaagaatgtttttctgaatcttagggcatacagccacttttaccatttttatttgaatttgagttcaggtaaacttaggcaaatagaaaagtgggagagggtgggaagagacaaggtgagcctgcttttcccaatactgggaaaatgaattaaactagacgggggacgtcagagaacagaatgccttgcctttggtctgctttttaatatattttatgatcccaaattttacagaaagtctcaagggtttctgtgttttttaaatggtcaaatatgtgacatacatgtgtacatagatcacagagccccactgtagttttttaaatgagccacatttaccttggggaagagcccctccccccccgccatcataatattgtgaatgtaaagagagattggttcacaatgagaatgtacagtaggctcctataagggtgacaggattatatgcagaatgactttgaagagccaaaattgatttatttatgttaagtagtgctaagaaggaatatttgtcccggagtgaggcatttgagatagagggggaaaagcaaaaaaaaaaaaaaaaaaaaaaaaaaagtgattacatcatcttcccgttcaagcagtattagtagcgaagatgggttcatcagtgaaatattttgcaaagataaatatacctccactctgcattctgatctatagcctctttctttttggaagaagcattttctttgcccagtttttttaggcagtcacattaaaattctcattaataatgttgacagacaattacgtttattatttctgctaataggcatctgcattcctattcagaattttcattgttagtctataaagtctagttttaactttggaatgtttggtagaggaggacatctatacattttcttttaactgtcctttctaatgtggtacatttgtgacagtgtttgaattctgggttttcagtgaattatggaggactaaaataccaggagtagtccgtactgcttctcttatacatgagagatatctaaggactataaaacataacttaagtatacccttttaatgcctttgtaagatttttaaaccaaggaatgactgggctatctataaacccagatgcactaagtggggagaaaagctcggagctgcagcatatcagcttttgtcaacctgccaacagcagagcgtaccatgctgcaaggagtaataaacaaggaattagaaaactcgctgctggagaacagtcaaattaaacacctttttgaaaggatgagcatgtatatattgcagttctattaaatgtagcttcttagtgaggttggcattatgttaaggctggtatggaagagaactgatgaagcaggagtggtctggtgacatttttctgacttgattggctggggcgtgtgatgtaataggtttcagtgcagccccttataggttttaaaatgaattccaagacaccattacaaagaaagccggactcttttcttataactgagctcagccaaggaaactcttgcacaaatgtacaatactgtttggaatatggaagacctggatttagaatatgccaagacagatataaattgtggcacagacttgatgttttatatagaaatggacccaccaggtaatactgcagtattattgtagagagttagttaatttcgtggctttttaatttttcgaaagctactgtaaaagatcctttttggatttctgtttttattaatttgtttcattgataaaaattagtttgctcatggcttaaaaattaaacagattgtttgactgtctgtggaagcaagcagctcaggctgtgtgtggtaaatgcttattcttacttgaatggatatgaattgaactccagtttttcactggtgtcttttgttaatcgagatccttccctgggtgagttatgttgtgggatattgtccctgtaattaaaatgatgcatcttttgtgctgcttttctctgttgccagtggatgagaacagtgtagcactttgcagtgataacacttggtactttagaaagcatgtaaaatgtagcagtgattacaactcagttctctaaatgttgagactttgcttgctctctcatattaagatattataatgaaaaaagaagttgactttccattattgttagtctttgtaaaatattcttggtagatacctgaaatcattttttgtataagttaaaatagtaacagtgctttaaaacttatgacagaatttacctaaaaatcctagatttattttgtttcctaagtaagttgttttattccaatgttagctctccccctgcccccatttaaggtattcaggaatactgcagtcttttatttgtcaccaattggtatatatgaatactgatttgacattgaggaagggggatatcatttttaatcagacctagtatatagagcacaatttatccaacagaatattaacatattaaagagatttagggcacagatgagagtttcttaaagtggcttttggcagaacagtgcctgaaatactaag

SEQ ID NO: 10741 - DNA, 6000 bp, Homo sapiens; identical to SEQ ID NO: 3029

SEQ ID NO: 10742 - DNA, 6000 bp, Homo sapiens
cttcacattagatgagagcttaggaattgatacagttccaattatgaaagaaaagcaaaggagaagtccagtgctatagactgggaaaatattagggatatagggaagtggcacagcttgaagtctacctctaatccagtactcttgcttagcattctacatcttcagagggctgcatggttcctataggtgggggctgatgagacatttagtcttgctcagatttgtctcatgagccgggaaggactcttgaggtagaaatatgaagatataactatggggagcaaaagaagacaagaagagggaaaatggaacagggactaattattatgaccatctccaaactttagattgatatattactcagaattcaagctgttcttgaaaccattacaagaaaatcacagctttagctaacttccatttatcacaaaacaacattctttggatagccaaacttacataaaaactgccaaaattcaggtctgctaatggaaaaaaacaaaaattaaattgcctagctagagatttagtcactctttttggcaagacacttttacatttttatggtgttttagcttttccctatggagcgttttcttcatggaagttctctctcttaagaatgtattcttttctccatgaggttttaacatggtctacaagttgtcttctcttattaatatcctgtctagcctttacctttaatttatagatgatatactctctgcatggaaaatacccctttgaggagtgctgtgaactgaattttgtctccccaaagttcatatgctgaatccccaaccccaaatgtgatggaatttgtagggcctttggcaggtaatagggttagatgaggtcataaaggtggggacttctgtaggattaagatgaagaagagagagagatcaccctctttctccatgcccacacattgaggaaaggccatgtgaggacacagggagaaggtgccaatctgaaagtcaggaagaaagatctcaccagactttgaccatgctgacatcctgatctcagacttccagcttccagaactgtgagaaaatgaatttgtattgcttaagctactcagtctgcaatactttgttatggcaacccgagctaagacaaggaatcctggaaatgtgattttattaaacatttctgaagatcaacattataacatgtaataaagcctctcagaaaagttttgtgattattgtacatttattttaccacctaccaaatacttcaaatcatccttctaaggatggtataaaacagtgtcttgactttttcgagctgtactcatgtaacagtctaaaataaaggttgctaagcgatagcttccccaaaacctgatctagctgttgtatgtgactggctttctcccacaatccttcttgtctctccccttgactgtaggcttgacggggggaagaaattattttcctcttcatcgtagtaaaatatgttgctctactcccagcccctggctattgttacagttctccattttgcatccttccccgttctacttcattgtttacttcttcctaattacatctttcttccaggtacttttcctttaaaataatgttaaaaaataaagaattaagtataatttggtgatgcctcaggccttattctggcaaccagttaatcaccatgccaggtttaccattacagttaaacaaaatatttgaaagaaggaaatgaatgttttatctgtttttattttgaaaagtcttagtaaatatcttagtctcataatttcctgcttaaaaccataatcaaactgtttcatttccatctttcttcaactttaagttttactgcttacaaaggagaaaaaatggccagctttacattccacaaactctacataccattctctgtctcacacaaagcatctgcaggacatgtagagaaagcttttgtgaaaagagaatttgataaatgcaagtttccaatgtactacaaaacttgtgacaacagtatcacatgaatttatgcaataatcataatgaaaatattaatagaatataaatacctgaagagtggcaatgccaggaaatgtgaggtgacacaacaaataaactatttgatttgtaatatagcagattgacaagtataatctggctgcttaggttggagcatcatgctataagataaagagttttgcttgcaatgcctgtgtattggcttttccttcattaatataagctgttttcacattgccaatttttcatatatatacatactttttttttttttttttagacttagtctcactctgtcgcccaggctagagtggagtggcgctatctccacttactgcaacctccgcctcccagattcaagcgattctcctgcctcagcctcgagagtagctgggattacaggtgcacaccaccacacctggctaatttttgtatttttagtagagatgcggttttgccacattggccaggctggtcttgaactcctgacttcaggtgaaccacctgcctcggcctcccaaaccaatttttcttataagttaatagaatgacctgaaaatttaattgcctcctacctaggttacttgctttttttttttttttttttgttttgagaaaagatcctactatgtggcccaggctagccttagactactgggagatcctcctgcctcaagcctcccaagttcctgggactacaggcattcaccactacaccaggctttgccaattttaatctataggagcttataggccaaattttaaccaaaagtcttccctgcagtgttaaaaatgtaaacatttattcccatacgtttctaatataatttaataaatactagtcaagtgaaacagtgggagtggagaaggaacaaagaaatctgtaactggttgtgagcaattcgttgtaagtaccaccgtacttagaccagcccatttttaatttaaaaatgtgttttgatcatatatttatacacttgactttctcaaccatttatgaaaacttagaagagtgggtgttctttatcaaaactgagttttttgaggtagagagaataaaatggtttgttgggagttgaggacaatatttagagtttcctgtgttgcagacacttctcttctattgagtgagatgttgttaactttgtttcttgtctattagtgggtcctgggagagatcagaaattctgggatatgtcatctgccctaggcaagtcattcacaattctgagcatgcatacatcttagctgcttttgagtctcctacagaatgatggtgtggtaagcatggagcaaagctcttatcactacccttctaaggctggtgatgctagtcacttcttaacttccagtttggggaagaagtgagaagagaggtttaaaaaaaaggcactgttgtattacaaaccaaaatcaaaaacagatttctatactaactacccttccaaaggtaacacattagctataccgttaatctagcaaagcagggaggaaaatgaaggagtgcatttgtttcattagtcttttcgttttgagaggtagacaggagagatagagatacacaagactcaagtttcttgatacagtaagtatattaagaatataaacgggtttgataaaatgaacatttaaaaaacatggcaccaggctgattcttcttcctgcacaccttaatgcctaacttttgaaaggacttgagacataagaatcacaattttaaaaaattatagtttccatgccttcatggtggatcaatttccatagaagtctaccaaaatgacttatctccatcccagggaagcaactgcaagagggaaaatgaaaggaatgcagtctttctatgtaggcagagtggacttaagtgtgagtcagaaacaccgatttcagtttgtgcgctgcaacttgataacttgggtgatgtttggcttctcagaactttgggaggtgaatttgaaaaacaggtaatgccacactatatagttcagaggattacctcagcttacaaacagcaaatgagacgcaaatgtgagccataattcacatttctaagcagttggagccctgatatggcactggggttacaaacaagcggggaaaaatgtcaacccagtgatgtcatactcctaggccgggccctaagatttttttggaacctggcgggctgagcacaacagggaaagcctcagcaccctgacttggcacaatggtacccttaaggctctttgctcactcagttcttagtagctctcctaaagcatggtggtgttctcttccagttctctgcgtagactttgctatgcttctccgcccactgcttcatccagagaaacactcgtatccacagcctctccccactttccctcacgcacggctctagaaagacggggatagggcgcggcttaggctttatacaccttgccagccaatgaccgcgccgtctcctttccggtcggcgatccgaccaatccaagaaggttggtgcaatcttcggctctactcggctgttttcgctgatgcgggcagcttgggggccgccgccgctaaacagacgctttcctttttaattttttttccatgtgttcacttccgggtccggcgtcgatccggatgcccgaggcagaaggatgtttgacctccggataagcgaggcgctgctgtgcattcattccgggctgcatcggtggcgacagcagaggctcgggcggcgactctccggccagcggcggcggtaggaggcaccagcggcagtgcagggaccgaatccgagcagcgctgcgttacctctctctctcgctccttcccccctacctcgctcgctcgctcgctcgctccctgcgtggctcgctttcctcctccggccgccggcgggtgtgatgtgccgccgccgctgcccccgccggcgctgacggactgggggcgccgcccgcgcccgggaccgacccctctgctcgcggccgcgcctttgaggtaaagccccctgcgcgtaggtgctccgctgccagccccggcccggcggctgcctcggcgcggccgcggcgccctccctcccgggtggggctggggtcccgggcgggtggggtggggtgcggcgggggcggcgccgcaggcgcgggtgtcgggggaggggtgggcgaggaccatggcgggtggcccggaggcgtgggcaggagggggccgcggtcggaggctgagggcgcggagggctagggggcagcgggggccgcgggtggcgggtcgggctgggtgcaaaagttgccggagtggtgcggcgcgactggggcggcgagggaggtgggccaactgggccggcgggggcttccttaggagagattgggaggtggggagtgtcgcccacggtgctccttgactgtgtccagacaattacctttggagtaggggcttcaggcaggaaggaggcatggataggctgggaggaggcgacgggggccagcgttcagctcagggataaacttcccgttggagtgtttaaggggttgggtggggggacacagggatttacctgtttcttagagctttgactcagctcaaaacttaaccaagacattagtcaaaggttagcaaaatcactctgatggttactctcatggtgccggtttgtttgtttatcccacatgcaggggaagtgacactgagaagcatcgggtctcttggtccacagcctccacatttcttttcagcaggatgaggagggagatgtgtgtctactcgtggggtgggggtagtgaggcctgtgtcatggtcattccccttctcccacctcatgttttagggaggaaaagttcagatgggggagagagtgagtgtgcctgtgtgtgtgggagacagctactgttgatacactgtgtgaattactttcaactcttttgtagtaagcacccaggctggtcagtggctccttttaaatcttctattaaaatatttactttaaattagagaattaaaaatgtacttatttttaatgaattaagaaaataagtca

SEQ ID NO: 10743 - DNA, 6000 bp, Homo sapiens
taaaggagcttgaaagaaaaggaaaggaaatgtatattttcagctctagccatgattaagtgggctcaggccatgagaacattcagatgatttacatgacgttacatgaagagccaattagcctaacaacttccgaaaaatatctcgttcaagagcacccattagacacttggaatgcaccaggctgctgttctaagctcttcactagggtacagtggttcatctcgactgcactccaacagagcagggcaggcctgcgtatgacatccatttaacctatggggagactgaggctcagagagggtcagcaatctgcctggggtcccacagctagtaagtggcacggcagagatggaaacttaagactgcccaaatctaaagctggagctcatctgctccaacaaccctcaagccttgggagtcctgacttagtcctgtttccagcatctgactagtgcaagctcatttgcgtgaagatgaagccttattaaatcaccagccctggcctggtctggatgaatccagaagactctggggcctccttgcagctggtcctggtcctgaaactccccggtcacctccaggggggcaaccacagcagattgcactcactaccctgtggaagaaccccagtgtctatcatctgtgtatgtgatctgagccaattcccagaacaggtggcctcgggtgggctcagcagagagatggtacacactgagatctgtctggttcaagggagagattctaggccctctctgccagcaaaggtcttgggccccctatacagaccaccaagatgattccctaatcctgttgatggcccccttcatgcaacatgagccacccagaaagtcagggctccatattagtgacagcttatttgtcagcatttgtctgccaagaccacaaggcaaataaggactccctctggaattttataatggaacactagagtgtgatagttaggatgtgggctcaggagtcagactgcctgggtttcaaattctgacaccttcattttcaagctgtgagaacttaggtgacttcatctctctgagcttcagtttcctcattagtcaaatggggatacgagtccctatgtcacagggttggtgtgatgattaaatgagataatgtgtgtgaagctcttgacaggatgcctggcacatagtaatcactcagtatatgaggttggtcgttgtgtagacgatggtgaaggaatcagtgctgactagaccagggactcctgtggggccgcaccaacttctggggaacaaatcagagctcttgttcctttccagctttccaaaccctcctaagccatccaggcccacatgaaatctacctccttcaggaagccaccctgactactctagtccacattgatctcaccatatctgagctctttctgtccattacctgtatagactactctagcacctaaatcggctctaataactcttcagcttctcaaagcagccaatggctcctggaaggcagacacctctagcccttccctctccacagcccaagccagggctaggtacacagtagatgatcccttagcaagccttcagactgatttcagtgtggctgtggatgcctgtgactcagcccttctctccctcacgcctcctcacagtcccactctccctactcacccaccctctcctctggttccagccagcagggtggggagttggagctatgaccccataggacagttgttcccagactataaaatgtccaaagaaacttgagggtgggggagttaacagatggggaaaaaaatgttccttatgttctttcaccaaataaagacatgaaaaaaaacacttgtcccaccaccattttagtaaagaaaggatgttttcacaccaataaagcagtaagggcataatccttgattaaaggctaatacgaagctggaaagttttaaccttattgagaaaacaaaacaaaacaaaaagaacctcactgttgttgtgacttttctcctttctccaaggactggagaacacttcagcctccactgatctgtgtcggtggaactcatgggtctggggacagctattctggaggacgttcctgctgaaccagggttccctacaaacacatgaggacccctaaagccattgggttgggcagatccggattccctttcagctgtcccagaggaggctcaccctatgccagaccctacctataacctcaggagttgaggtggcggaggctctgaactcccgtccctgtacctctcccctccgggcagggccgagcccccccttccccgccaatccggagcagatgaggcgagactaagcggcaagcccaccctgggaagaggctggggagacctaatgggcagggtccccctcatctccatcaccaagctgagcactcgtgcccatgccaccccccagccccagcctggggaaaggaggaaaagtgggcaccctagcccggaggtggcgggggaggggggtgtgggggctggtgtccgagacacccggctgggcgggcacagataggatctgaacacagggaagcatggcctagctctttgatccacagccagccacgctgggcctggacccggagggaggcacggctgtcttccggcccggctttgcaccgctgccaggggtcctgtggggccctcagagggagaggcgtccaatacccggccctcccccaaataccctctatcccaactgctctcagaagaggcgtgagcgtctacagtgaacccagcacagaaacctgctaggggagctgctgttgactgcatcgcgatccaaaggaccggcgtcttttgtagatgcaggggctgagccaggccaagcgcgccgtggaggcccgcgtggacgcagacccgggtgccatacagatgcgctggaatccaggcactttcccgcgctccgcaaatctagatgtttcagcctggatcgagcgagggttagagggttagtcaggccagggtcaacttcagagtcatgggctccctaaatgcgacttctagggttgagttgctgtggacgagcgacccatgtcggaatcccgcgcccacgtggctgcccaaagttccgagtctccgggctgcaggttctagtcacggaaccgagttgggagagtcataggggctgggacttggaggatcggctgaggtccggtgctcttggctgtgttcgcggctcggagccgtcgcctgactgaggggcccgtcacagatgtgtgatgtataagctctgcacgcaacaggagctcaataaatgtgcgaaggggggtatacttatgttcgcactgtatgcaggcggcctagaaggaagtccctgattggcacagggatggaggatggggcaagagccgcaacagcgccgcggagttccaacgctgccggttccctggggtacgagcacagcctcaagcagcctcaagccctaggaagcccccagttcaaagcacagggcgcattggagcctgggcacgatacagttcacaccacggctgcgatggtaagccacgcccaagtcccaagggcctaggggacccccgccctccacagccggaggagaaacctgggcgcagaaagcagggggaatatctggttgtaggtgagtaagcggggtcaggagttcccgttagagtctctgcgtttcgggagaagggtgatcattcccaggcttgtccgacgtctctctcagggtgcgctccggaagagcgagccctttaaggctatgccgagtgggcgcgtcccggcctctcccgggagaggagaggcggggcggacctgtgtcccgcccccggcccggcccgcccccagtgcccgccccgcccccggcactcggccggcggcgcctttgatgttccgacccgccagctcgcggagccgctctgccccgcgccctagcccgcgcctgcagcccgcccaggcggagtcagcccgcgctccgcccgccgcgatccgagctcggaggttcggactccgggctcgccgccccccgggccggctccgcgccccgcactcccggcgcccagcgccccgcgccccggcgggcggagcgcaccatgccgcagctggactccggcgggggcggcgcgggcggcggcgacgacctcggcgcgccggacgagctgctggccttccaggatgaaggcgaggagcaggacgacaagagccgcgacagcgccgccggtcccgagcgcgacctggccgagctcaagtcgtcgctcgtgaacgagtccgagggcgcggccggcggcgcagggatcccgggggtcccgggggccggcgccggggcccgcggcgaggccgaggtgagcccccgccggcgccggctcctcccccgcggtcgccgcgccgcgccgccccagttgcgcgcggccctcggggtctccagcgcgcagagcgtccctgccccggcgtcggccccgacccccgcggtcccaccgcccctcactcccctccggttctccctccaggctctcgggcgggaacacgctgcgcagagactcttcccggacaaacttccagagcccctggaggacggtgagtttctgcccggcccggcttcccttcgtcgcgctcaggccctggcctcggtgggacggggacgccaaggaccgcggggagccgggtgcctcccccaccgcagctcaggaggcggcagaacccaggggtggagagtggggggcgggcttcccgggcgccgccgggtcgagtcacttccggtgccctgacctttataggagtaaacagacccccgccatccccgcctcccctcctgcccaggtgactgactaatccgccgccttcaggagacagaattggccaaggtttcttggttggagggcggggggtgggaggtcaagtaggggccacctcggggaggcctgccctccaggtccttcccctaaaacttggcactgccgatactcccagcccgttccttcccaagtcaggaacttgcaggggaccccttggcaattctttttctctcaagagcagacagccttcagtcccagccgctgccagggctggtgtgtctgacccagctgtggtttttccaggcctgaaggccccggagtgcaccagcggcatgtacaaagagaccgtctactccgccttcaatctgctcatgcattacccacccccctcgggagcagggcagcacccccagccgcagcccccgctggtaagtggaccccgcagccagtgccgccctgtgcttgcagcctccttgaccaggtaggtgaggcaccggcaagagacttctgcctggaacaaaatagacgagactcctgtgctggtcttttctcccatacacacccggtgggatctgaaccaaaaggagaactttgctgaaggaaggaggggccgccctggggcacccccctgccctctgcctcttggcttttgtcttcccagcttgctcataagcaggtgcaggctctgtcctggtgctgggtgatgccagggtggggtcttcttagagaacttttgagccgagaccacccttgctcctcgctgctctgatctgagctcagagctttgcaattaactttctaactagcccaggaaaccctgagcctccttggcgcttggaggaatgggcaggaaagctgatctgttcaggtcccctggttgtgcaggagaaacgtgctgtgttcggtcggctgtgtcctgacgggcgtgagtgtaccgttgccaaagaaggaccctgaacaccatgtgtggaaagtgggttcttaggaaactggcttggtctcagacataccaggaagggttggcaaaggtgctacaaatcagtgatgttgagaagggaccagtttaattaattcgtgaattaaatatttttaagtcccagtgctttgaaaagatttcatgatctttacaaaccatgcccattggtacagatgacctaaagtgtgaagagcctattctgagtgttttggagcagtacagctgcgcttttaaagaaattcctattcgtgtttcac

SEQ ID NO: 10744 - DNA, 6000 bp, Homo sapiens
gtctcatctcctacagtaggggagcctattaagcacagattcctgggcccaccccagacctactgaattggaatctctggcgttagtgtccaagtgactgtcatgccctccagagtctgagaaccacagctgtatgtagtgtctgaataaagcatcatcttattattggaaaggagaaaatgctgatgtttcaacttttgagcatttgtcggtagtgactaaaatattcaagtcaaataggttcattttgctgtagccatttccatggagcctggggagctctgggctttgcactaggtatgcacagggctcactttcactaatcttgagggaggcgaggctgataaaaaaggcagagaagataggagtcaagccacacaatgtccaagcttggcattattattgcccttcacttggaagttatcaaacaggacacgcgctgcccttctagctttcctggggaggttagatgctatgagacttttcacactccctttccagtgtctgtggctcagaccatgtacacacccaggttcaaatctgagctgttgtctctatgtagtctggggccaatcactttaaccccctttaaacttttgtttctttagtcataaaatggacatcatgatttaccctacggagggttgctggaaggattagagatgctataaactcaggcgttgggcacatgctcagtacagaaaagccctaaggtttggttgatgtctataaactgccataacatccgggctgcaggactctgtagaggttcatctaggctagctccttcttctttttttttttttttgagacggagtcttgctctgtcgcccaggctggagtgcgatggcacaatctcagctcactgcagcctccgcctcctgggttcaagcaattctcctgactcagcctccctagtagctgggactacaggcgggggccaccacgccctgctaattttttgtatttttagtgagatgaggtttcaccctgttagccaggatggtctagatctcctgacctcataatcagcctgcctcagcctcccaaagtgctgggattataggcgtgagccactgcgcccggactgctccttctttttttttttgagaggaagtctcgctcttgtccccaggctggagtgcgcccaactgaccactccttcgtttttttgttttttgtttttgagacgaagtcttgctcttacccccaggctcactgcaacctccgcctcccaggttcaagcgattctcctgcctcagcctcccgaggagctgagattacaggcacccgccaccacacccggctaatttttgtatttttagtagagatggggtttcaccatgttggccaggctggtctcgaactcctgacctcaggtgatctgcctgcctcgacctcccaaactgctgggattacaggcgtgagccaccaggccaggccgctccttcattttatagataagaaaacagcctcagagaggagaagcaaatggcacaagatcatctagcacctcaggttttttgagggctttttttttttgagatggggtctcaggcttttttgagggcagtgatgatcacaggtcactacagcctcaacctcctgggctcaagtgatgctcccatcttagcctccagtgtaggtgggaccgcgagtgtacaccataaaccctggctaattttttttttttttttgtattttttgtaaagatgggatctccctatgttgcccaggctgttctcaaactcctagactcaagtgatcctctggcctcagccttccattgttgggattacaggcatgagccaccacacccaggccaggacttttaatctcaattaagaacttcacatttttccatgggccagaggaacttcaaattcctccatgaggctgagactctgtgagcaacctgtgatgaaggaatttctgggacaatatgcttttcaaaaggacgctagatatctcaggtgaggccctttctcacctaaatttcttgccagccagaagactgttgtgaggatgtagtgactggtgagaaagtccctgacgttgggcaatgtgtggcttttctatcaacacgggagttttaaaaacaaaaaagcctctgggaaagtgctgtcaggccttccctggcaaggcagtgaatggcactgcagctctgcaaggaccaaggctagagatggctggctttggggacactcccaagtttggcctctgggctatgaaggacacaccaccagtcaggggccaggctgggcctggaagggacatctccagaaaccatcccacaggactctgactctggtgcccaggggagtagcaaaaaaaatggggtcttgggagaattcaagtccttagtgctaatggtgatgacattggtgatgttggtgatgattatagtgatgatgggcatttcctacctgcaagattcagggccaggcaactgactttacatgaattgcattatttcattcaatccatcctcacaagatccctatgtggagcagtaccattgctatccccactttacagatgaggaaactgaggctcagagaggttaagtaaatgaccaagggcacatagctagtttgcaccaggattcaaatctgaatatactggagtccaaagtacgccagcagcctgtaagtgctggaaaaaaggcaagtaacattggctagtgcctttaagggatatatatttcttattcccattttaacagaagggaaacagaacagagcgcttagcgtattctccatgaggtcaggcactgtgccaagcactgtacatatattatctcctcaatcatcaaaacatccctatgaagttggtggttttttggtccccatttgtgtagatgaggaaaccgaggcccgagactaaatgacttgctgtggttccaaatcaggcagtgtgactccagggcccacgctcttcaccccctgaattgctggatactggaacaagatgttccagtatccagatgcagggtctgaaacagaacccaggactcctaactcctagtctagggctctgaggctagatgcaggctctctgttggaatgcattgttccttaaaagcacactggccttaagcccaaagagtgaaatcacggcctgcggttctgggaacctcagactggagaaggaagcttttgccctggtgttcaagtctcagcaggtgtgctggggactctccctctatttccttctcccgctggaagggagcccttgttaggtgggcagggtggggcagcccttatgagtgtagggtgggaggagggcaggaggcaggcgtgcccaataaaacagacctaaagcttcccgccttcttgccttcatccaggcagtgccctcatctcctgtttggtaaacaacagggcatgatgatgagagttcaaggttggagtcaggaggtctgagttctggttctggctcaggcagtcactccatgtacacattgacagtcagtttccttatctgtataatgtgtggtggtggtggtggcagagaatcaaaattctccagctttttcagttaacacatcatctattaagtgcctactatgtgccagaaacggcagatacagcaagtgcaaaagcagatttaggccctgctttcatggtgttagagtcttgtaaggagagatacaaagattaagtcttcattgcaacaaatgtaaaacggcaactgtgaccagcttttagagaaaaaaggcctgctggtggagctaagggagcccatgatggtggaggtggaaggagaggaaatggcttgacagtccaaggggtaatagggaaagatgccccgaagagattactaggtgagtggcaagcccgttgtgagcgggcctgcggaggctggcaggagcccagccccttcatgcattgtgggcattggtaagagaactcattggagttttttgggggaagggtgctggggacgatggcagagagagatatatgatcaggtttagcacagaatataggcaaacgcacccttcaagtaaaagataaaaatgcctcctcctccaaggagacttccttgatttctttgcttttgatctatggtatttctccctccttctctggccttgtagcctgggtagagaaacagtcctccaggggagtaagacctaagctttcccttcctgcaactgatgtgcgctgtagctttgaacgaggtcctaggtatatacatacatacatacatacatacatacatacatacatatatatatacatacatatatatacacatacatatatatacatacatatatatacacatacatacatacatatatacacatacatacatacatacatatatatacacatacatacatatatatatatatatatatatatttttttttttttttttttttcaggagggatatgaagagtgacttacaggcgcccgccaccatgcctggctaattttttttgtattttcagtagagacggggtttcaccatgttggccaggctggtctcaaactcctgacctcaggtgatccacccgcctcggcctcccaaagtgctgggattacaggcgtgagccactgcgcccggccttcgaacgaggtcctattccttctcgagcctcagtttccccagctgtgcagaagaagcaggttgtctcgcaggacccgcccagcgctaacgcaacgtgattcgctctggcaggagccgggggctgcccgcattgctgcgcaggcatcgggctgctggctggggcaccgccacctggctgcctgcgctttaccccttgctgagggctgcgtgagctggtcgcggcgccagacacggcgcaggaaagtgggtgagcgacccccggctcccgcgggcgccgcgcggccccgcccccgcagctagcggccctgcggcagccgggggctcgagctccgccctccgcctcccgccggcctcactccctcctccctcctcccttgctcgctcgctggctccctccccccgggccggctcggcgttgactccgccgcacgctgcagccgcggctggaagatggcggggaacgactgcggcgcgctgctggacgaagagctctcctccttcttcctcaactatctcgctgacacgcaggtacggccggctggggctgcgggcccggggccaggggtgctgagctgcgggggccgcagctgcagccgcggaggccgggaggcagcggtgggagccctggggtaactgggggttccaggctgcagagccccccttccaggcgccctgcgatgcgctccgttaccggggcagggagccggaggtctcccggcgcgtgccggagcgctgggggcgctacggccgctggggagggtctagccttggccgcttggagtctgccaccccgcgggcaaaactggggggtaccgcgcttcctttgggaggtggaggcgcgccacggtgtggggtaccctcaggctggcgctgggtgctggaggcgcgccgtcagcgcccggcacttgctgccgtactttcacgtggacttgtggccccggcacgggtgcatgcccgggtctccggagtcccctagtcctccaggctgtagtccccagagtgctgttgctggccccccgcggctttctacccgcgcccgcagcgcggagtttcctgccagttgccggctaaaggcataagggtctgcggggcacgtggacatgcgggcggagacagcgtcttcctggtttcgctatcgggcggagccccctggggggaaaagccaggctggatgggggcggaaggactgtctgggggcgcctgggtccccctgcggtgcgcggccccggtgcgcgctccacgatgcagggggaagggaaggcgaggcggagtcccaggcactggctgagcccgggagccccactggcgacacgcgcgtgacaggagagggtgctctggtgtgccggggcgcgggggagcgaggaagctggtggcttggagactgggagaggggtgctgctgggacaagcagccaccaa

SEQ ID NO: 10745 - DNA, 6000 bp, Homo sapiens
ggagactggcgggaatccgggaggcggagcttgcagtcagcagagatcgcaccactccatctcagaaaaaaaaaaaaaaaaagaactgctctaactgctattttgagaagactatggcaagagtaaaagtgagaagaccaattagaacgttattagagtaatcaggcaagacattagaggtggtccagatcagaatggtggtagagttggtggtgaaaagtggccaaattctaaatatatttcgaaggtagcatcagtaagatttcctaatacattggatagggtatgagaaagatgtaagaatcaaagatgagtcccaattttttttgacctgaactactagttttcatcaactgagatgaaaaggctacaggtaaaaacaaatatggaaggatgttagggtgttcaacttggacatgttgagcttaatatacattagatagccaggtggagatgttgaataggcaaccgggtatgcaggtcctaaattcagaaaaaaagtctaggctagagatatacatctggaaatcattatcataaagacgtacattatcaagtgctgcaatctagcaattcctctcctagatatttatcttaaagatatcttagaacacttgagtagtttcacagagatgaaagcacagctttctttaaaatagagaaaaatgaagaaatctaaatcatatcaaaggcaaacagccaaataatgatgacacatccaaactacagaatcctctgaagcagttaaaaagaatgagttttatacctatgtattagtagggaaagagacccacagcatattattaaataaaaaagcaacaagaagaacaatacacacagtgtgatcctccatttatgctaaaaaacaaaacaaaacaagcaatagccaacatatgagatgaaaatgagatagatgcatggaatggggagaatggtggtgaaggggcctttcactttttacactaggtaagtctatattgattcaactatagtaagagtttattcatgcattactgatgtacataaaagtaagcttaaactcacaaatcacagcaatacaaataaattcctctcaagaaaatcttccgaaaaatcaaatccatacaagaaaggccatttttctaacaattcactttaaaaattcttctagaaaatgtttgtaacttttcataatgacatttgagttttaatttcaaatatttatttgatgatttttatatatttaattacacatactcatacacttcatctgacttacttctttttggaatctctctaatgtaagctttctctgcatttggtcttgcacccaaggatccgctgcatattcagattctagtagagaagtccaacaatttgctgcatctctctttgtctttgtaagaacaatacgaaccatttttctgtcctctaaaaaaaaaacacacacacacacacgcacaaataaattagagttcttcatcaagttgttttttttttttttgagacagtatcactctcacccaggctggagtgcagcggcttgatctcggctcactgaaacctccgccccccgggttcaagtgattctcctgcctcagcctcccgactagctgggaatacaggcatgcgccaccatgcccggctaacttttgtatttttagtataaacggggttttgccatgttggccagggtggtctcaagaagttcttcattaaattttatatttccaaaaacaactaactaattttttctccccccactaggtaactttgacatacaacggttttcaacacatttctattgctttatctttcaaagctgcaaagacaaaaaagacctaatacaaaagaggaaaagatatcaagacaaaattattttaatttgatgaattatagtaattacccttacccaaagtccatgttccctcatcagctattgtagaatcaaagagtttgccctgaaaaataaacatataaggtgctaaaaatacagaatttaatttttataaagttttcatgattaagatttacctactttcctacctaatccacatcttataccaccacttcaccatgacatttataggtgcacaaccctaaattttctcccagcaggtaaaatggaaactagtttacactgcaagggatatttactatggcaaagaacacagagctctctaaagaaagatcagggctccttaatttttagaagatacagtaatactgaccactggccaaatgtgaaattaatatctgaaatgctttaattctaccaatttaaattaaccacaagaagggatctcctgctaaaactaaaaaatgttgtctttttttttttttttttttttttttttgagacagagtttcgctctgtcgcccaggctgcagtggcacgatctggctcactgcaacctccacctccagggttcaagcgattctcctgcctcaacctcccaagtagctaggactacaggcgcccgccaccacgcccggctaatttttgtatttttagtagagatggggtttccccgtgttagccaggctggtctcgaactcctgaccttgtgatccgcccgcctaggccttccaaagtgccaggattacaggcatgagctaccgcacccggcaaaatgttgtttttaaagtaaacttttaaaaacgttttaatctttttgttgggcaatcggcattaaaaaaactttacgtattccagatttgatagattagttgtgactaactgttcacaaactcatgttttttaaaaaaataaacaaaatataaatttaaaagagactgcaccaggcccagtagctcaggcctgtaatcccaggactttggaggccaacgtggattgcttgaccccatgggtttgaggctgctgtgagctacaatctcacccctgcaccccagcatgggagacagggaccctgtctcaataaatatatatttttttttaaagagagaatgcctaaactcaaatccattttaatttgttgccaaatttaagttatagaaagtgaaattaaatgtcactaggaaaagcccacattttaaaatatgtcaaaattagtgagaaaaaaatcccactggtctatacgtacatcagaaatcccaaattcagcagctactgctaaattccgaaagttactggatttactaatttataatcgtaatctaaaaccattgttgaggaaactatgaattgtacaattcagaaaagtaactgagatccaagctgacataatgtctttcacacgaatcttgaggcactcaaagcacctccatatactgtaatatatataatagctaatagctaacatatagtatgaacttattacataccagtgaatactccaagctcttcatacacgtgaataccatgttaagctcaaaacaatcccatgagaagggtactataactaccttatcttgtggataaggaagatatagagacactgaacaatctctcgcccaagtttacaaaactaggaaacaagtagtctcccttcaccatattacactgccatcaaacatcttgggcatctaacctgagaactaaatctaatttcaacctgttagtttaattatacacttaacaaagaaaaagcgggtccagatccaaagagcattggtgaaaagaaataaaaggagtactacttattttatgcacacacctcttcaccacctgcttgaccactccacaaacatgcaggattttcaagcttttagatgagaaaactaatcacctgacatcatctctaaattctctgcccgttattctatccctattttctttgttgtcctttcctatatttatctatttatgaattacgcttccgtacaggagcttaacctctccactgcaggtacgttatctgttgtcttcctgcctgtcttcagtgcacggaagaaatatttgttcctttagcaacctagttaatctgttcccagctgaagcccgtcagagaagcagaagcagcagtcttagtttgaaaactaaacacgaaaataggctcctcaaatttccacaactcagcacctgccctgaagaggcgggggctctgaccagacccaaacctggtcagtgttatcctctttctctttctgccagccacaggagccgtcgggacacccaacagtcgttcagggaaacggggctgggggcgtctgggaagaggaaactgaacacaagccccgagctgccgctaccttgaggatctcgcggccgcccaccgacagcgccacatgccggctctggaggccgcactggatatcctgggcgcgcgtgcctggcggcacctgaacttcaatgaacacctcctccaaggtctggtaccactggccccacggggtcccgcacggtaccaccccactccgctcctcaaacggggccgacataatccagtccctcccggccgcggccgcaccaggcggagccgagcgcacgcgcggaatcccacgcttaggctacgcctcggcctctccgctcgggtcactgcgcatgcgcaggaacgcaagctagcgctttggtgtgcgtgttcgtttttccctttgaatggccgtttacggcaccggcaggccccggatgaaagaactgaaatccagaaaagttcacatgcaacgaacaatgggacagaattggaaccagtgaagccggaactcactacaccgtcccctaagtgacgccaaaatgcactttctaacgtctccggagggaagtgcgcttgcgcaaatgctaggttacacttgagtaactccgggaatgactgggtgggtggggcggggaacagtaacggtctcctattggatggcagcctaaactcgcaggccagctaattggacgcaatcagaacccagcattctttcttcgtgttcctgtgcgggattggtgtgcccaggggtttggctttccaattggctaacgccggggtgggtggggaatgtggggagatttgaatttgaaaccggtagggagtgataatccgcattcagttgtcgaggagtgccagtcaccttcagtttctggagctggccgtcaacatgtcctttcctaaggcgcccttgaaacgattcaatgacccttctggtgcgtaagggggaaagagctgggggacgggagacgccctaacgccctttgcctctttcagctcccttcttgggaggcaagcaggaggcgattttagggtcgggctggggctcattcagttgattgatttttctcaaatatgctctaagcatctgttacatgccaagcactaatcaggatgctaaggataccgcagtgaaacagtctccgccccgtggggcttacattcaggcggggaatactgtcaataaacagcggtaatggagaaactacagcagggcgaagggaatggacccgagacgttggtagctacttgattttcaagtccgagagggcctcactgataagaacactggagtattacttgtagtctgaacttgtgcatttcttttgtgtattccatttgggcataaaagaaggaagattagtaaaggcagtttatgggtgtaaaattagagcagcagcacttattgaaaacataaacaatgaagttatggctgatattgaccacttatacctcaagcaccgtactaaggctttacatcgattattagttatgttaatttcccaccaactctaaggggtaatcctattattattttattgataaaaagactgagacttaaatttgctcagtgctacattaccaaagtgaccggactggaatatgaacccagcccccatcgtgtgctcttaacaccgcaatgcacagcacagtaaccaggaagccttagctgtgtttggtaggcactcatcatttaagatgctgtatgcggccgggcgcggcggctcacgcctgtaatcccagcactttgggaggccgaggcaggtggatcacgaggtcaggagatcgagaccaccgtgaaaccccgtctgtactaaaaatacaaaaaaaattagccaggcgcggtggcgggcgcctgtagtcccag

SEQ ID NO: 10746 - DNA, 6000 bp, Homo sapiens; identical to SEQ ID NO: 2362

SEQ ID NO: 10747 - DNA, 6000 bp, Homo sapiens
cgaggtaatcatctggggtggggttcacgataacgctgcgcttttactcattccccccaccaccaccgtgcacccccaaagtgctcgggcctctcctcatcgcacgcactcgccagggagtccagggagctagttttcctggcttacgaacctcgtccgctgtctccctaaaagggtcaagaacccgatagaaaggttgggggaactagtttcccaccttgttaaacacgtcccataaatgtcccttagtcgagctttttttttttttaaccgtcttttaaggtggaaacggcaaaatcctctttcagtgattcccatgtttttttttttttaattcttaattctactgggcctcttgttccaattagaacagtttccgatcgcctagttccttaaaaacctctcactacgttcagaggttgcctcttttttctggatgaatcattttcctgcactttagaggacgtacggatttcgtcactaccccctgaagaggcctttgaggctggttgcctcgttttataattaccgagagctttctctttccagcttttcacttcttcttgtagtcgcgacttggagttttgctaatgtctccctcctttcctaagtgacattgaatccgtagggatgttgatgccatcatcccctctttcccctgcaggaagtggcagtgaagctagaatctcagaaggccaggcatccccagttgctgtacgagagcaagctctataagattcttcaaggtggggttggcatcccccacatacggtaagaacccggtgcatataggcgatccgctgagggaagcacggaatggggaagtgggtagaggcaggtaatgagaccagctgaatccgggtcttggtgttttagttacctgggttccctatagctggtggtttcctgtaagtcagtcatctcaattactgagtaaatttcagtttgccaacttatttcattgtattacactgctccatttcgcttccgtcattctcactcttcccgaggctttcatttgcagttatgcgtgcaggtcatctttgatccctacgcggaagggttggctgctgccttttttacggcggcacttctgatgtacttaggtttgtccagtgaagtggatttgaaggtgccgaagcgacccggcagtgtcagttcgagttgctattggagctggcttgggaaatggctgctcttttgttgtgtttttgttccaacatgtcttcctcctccgcttagaaaatggcggaacgacgtgactcaaccccatattcctgcccttttctcagcttgagttcacaaattatgcttccttgattcctcctttagcagccccgagtggattaaacctttgaaaagccaagaataaagctgcaggaggcggtgtggaggttcgaggaaggagatggcatagtgacagtgtttgtgatctctgcagcagatgtgacacgaaattgttgaattacactatgtaaaatccttcgtagttcttttaaaagtgttaattactctttcttttcgtgaatggtcatatttggcacgtttcagtcgggactaaatttgtataggtagtggcaaaggcagtttgagcagcaccaactatgttaaaatttactcatatcagttgtatttaaaaaaatcttaatcacttagccacactttgataagtaattttaacctgttgagtttgtcagtaaatcttcacatcagagaaattggggcctttgttggtgtggaatattggtgagtgcaaatagcagtaacgaggataaaagatgacgagatagacattgttctgtcaaatggttaactttactttggagggttttaatgttttaacttttgggattaaagatcctcttcatggaatggagactaaaatatagtttaaagcccagctattttccagcaataatctaaaataacatttgcaaaattattcagaataggtaagaatggtacttactgtttactggagcctcttctttaagacggagttttcgctcttgtggtccaggctggagtgcaatgaatggcacgatcttggctcactgcaacctctgcctcccgggttcaagtgattctcgtgcctcagcctcctgagtagctgggattacaggcgcccgccaccacgcctagctaatttttgtattttagtttcaccacgttggccaggctgggctcgaactcctgacctcaggtgatctgcctgcctcggcctcccaaagtgctgggattacaggcatgagccactgtgcccggcttttttttcttttgaaacggagccttactctgttgcccaggctagagtgcagtggcgcaaccttggctaactgcagcctccgcctcccaggttcaagtgatcctcctgcctcagcctcccaagtagctggaattgcagagctgcactactacgcctggctaatttttgtatttttagtagagctgaggttttgccgtgttggccaggctggtctccacctcctgacctcaggtgatccacctgcctcagcctcccaaagtgctgggattataggcgtgagccaccgggcccagcctgttagcccctttttctattccagtttgtatttttcatgtcttgaattaaggactgggttgcatagtctttacatggaaacaactcaaataaaactgtccttaaaaagagttccagccaggcgtggtggctcacgcctgtaatccaagcactttgggaggccaaggcaggcaggttactttaagtcaggagttcaacaccagcctggccaacgtggtgaaacctcgtctctactaaaaatacaaaaattagctgagcatggtggcacgtgcctgtaatcccagctactcgggaggctgaagcaggagaatagcttgaacccgggagtcggaggttgcagtaagctgagatggcgccactgcactccagcctggtgacagagcgagacgccatctcaaaaaaacacaaaaaaacacaacaaaaaaaaaaacaaagttccaatgctgatttacagttttaatggagaattgagtgataaaatgtgctattggttgtaaatgagcaagtaaatcatttggaagaaagttgcaaatttatcttatgaggtgaagattaaatctgagatgatatagatttgaagtttttaaatcattcttgcctttaaaaaaaaaacctactatgtgggaaaataaggcccctcacccctgatttgctttccattactatagtttttcctagaatttcatataaatggaatcatacgatatgaggtcatttgtgtctggcacttttcacttaacataatgtttttgagattcatctatgttgggagattttataaatttcacaaatcaggttaaatttaatgtatttgaaatcagtttcaaaaagcattaagcattgtcatttttcagtgctaaacccaagtacagtacatgtccttttatctggtagcttttatttaagacctgatacagacccataagggcaatgagtaatgtactgaataagcacatgaataaattaacttctgagcagaattatagtaataggtgcctattataaggtggtgagtgcagagagagttatggtagttataagctgtctgtgggtgaggctaaacagattaacctgactttcaagttaaggcttcctgagagatgggatttcaggatctggctctaaggaagaaagcttggtgaactggtttggtaaggcatccaagaatagagtgtggcttctgggtgtagtctctaaaggagaacacagtaattggatgagagtgtggaaagggtaaatttgctttaggagtggtagggtcaggtacatggaaacaaaagtggttcattggttttaaagtgaaatgtaaaaaaaaaactgtttccactgaagcaaaaaggataaagatttatgtaaacattctttatttgggtagcagcatcttcccatccccctcagtttgttccccactatttctgtatcacctatacatggtacatacttaataaatatttactcggaaagtattgaattaagttgactatttagtgttagctagataaaagttatgtgttatctattgttttagaagtattgtcactaatttaaaaaatttagattttgctgcctttatccttcatatacaaatttgttcaatcccttccctatgttttctgttacaaaattccctataggatttgctttttttttttttgacatggagtctcactctgttaccaggctggagtgcagtggtacagtcttggctcactgcagcctccacctcctgggttcaagcaattctcctgccttagcctcctgagtagctgggactacaggcacgtgctgccacgcccagctaatttttgtatttttaatagagatggggctttaccattttggccaggatggtctccatctcttgacctcgtgatctgctcgcctcggcctctcaaagtgcttggattacaggcatgagccaccgcacccagccaggattttctttaagatactttggtatatcttacaacagagactgaaaattacctggcctgcgtagatgacctgctgaatcaggtccttcctgtgtaatttgagagacctattgttaagaagcatagcatcctgagtaaagagcaaggataagccgggcgccatggctcacgcctgtaatcccagcactttgggaggccgaggtgggcagattgcctgagcccaggagttggagaccagcctgggtagtagagacaggtgaaaccctgtctctactaaaatacaaaaaaaaaaaaaattagcctggtgtggtggcgtgcgcctgtagtgccagctactcaggaggctgaggcaggagaattgcttgaacatgggaggcggaggttgcagtgagccaagatcgtgccactgcactccagcctgggcgacagaatgaggctccgtatcaaaaaaaaaaaagcaaggataagagaatggcatccattttcttgatattttaagaaatgaagcttccggttctaggcacttggagagccgcggcttaaggtacagacatggccaagtccacgaaccacaccacacacaaccagtcctgaaaatggcacagaaatggtgggctccaggttcctgaggaacatgcactttgccaagaagcacaagaagggcctaaagaagatgcaggccaacaatgccaaggcaatgagtgcacttgctgaggctagcagggccctcgtaaagcccaaggaggttaagcccaagatcccaaagggtgtcagctgcgaactcgattgacttgcctacattgtccaccccaagcttgggaagtgtgcttgtgtccgcattgccaaggggctcagactgtgtgggccaaaggccaaggatcaaccaaggcccaggctgcagctccagcttcagttccagctcaggctcctcccaaaggctctcaggcccctacaaaggcttcggagtaggtatctctgtctgccaacgtgaggacagaaggactgatgcaacccccctgggctgccgtctttatggggctggggtcctcctgtgctattagtacaaataaacctgaggcaggggaaaaaaaaagaaagaaaattcttggaccttgtcaattaatatgtgagagctcacttaaaattacagttgacccttgaacagtgctggggttaggggcactgaaccccagcccactcccactgtgccccacagtcaggaatccaagtgtaactttttttttttttttgagatggagtcttgctctgtcacccaggctggagtgcaatggtgtgatcttggctcactgcaacctctgcctcccaggttcatgggattacaggcgcgccgccacacccagctaatttttgtatttttagtagagacggggtttcacagtgatggccaggctagtctcaaactcctgacctcagatgatccacccacctcggcccgccaaagtgctgggattacaggcatggaccactgcacctggccccaagtat

SEQ ID NO: 10748 - DNA, 6000 bp, Homo sapiens
ggttatgatgaaatgttctgaaattgattgtggtgatggttacacaactctgaggatatactaaaaaccactgagttgtacactttaaaacaggtggattatatgtcaattaagctgtatatatatatatatatatatatatatatatatgaaaaaaagagtgaaccgccctttaccgaataatgttgcctaacaaaactatagttttccttatagagttggctctcaaaatcaaaccatgagggtagccaggttgaatggattctatatattatctagactcttctaattagggagttgattattgaattggatatctttgaatatctggttgtttgaattggataaagaaaacctcaaagtgcccagaaaacattaggaacaagaaagtgtgtgaagaaatgaagacatgaaaattctccctcatattcccaatgctggctatccaaggttctttggattttggccccaacatgtgaaatccgttatatcattttctctagatttagaaggcagtgcataataaagtggccatcagttcctgcggatttgcaacacaagactatttctatgtgactattagcaatagttggctctatcaggaattcaggaacgagtcttttggaatggctagaactggaacatatatgcactctttcaaactttgtgctgacttcctcctcaatgttggatgcatttagacaggaaggaagataacctttcgaatcctgaatggtctgccattgggcagtcataaacataccacttctttccttctagcaccctgggtaagttccttttatgaccaagctgtggcatttagacatttccttatgtttcttccaggtacttaaggacaaatttagctcctggcttttcctgatttgggtgggtttgggtgcctctagaaagtacttcctctacacttgattgagctcttttatttgagctgctctcgattcacccgccccacccccacttcttttttcttttgcgttgctttttagttctgtttaattacctgcttctggcaatgtggagctttcccataactggattagcagcactataatagcagtaaccctttcattaccagagtaattttctttacttgttttgaacttcagcatttacaggcagctgctattaagttaaaaggtaaaaagacatgtgactttttcctgcttttacaagtccagaatacttccagtgagggttacagggctttgaagccattttctccactttaaaaaaaggaaaggtaagagctgaagtaggcctctcctccatttaaaacacaaatccagttagagaccagcctgaccaacatgaagaaaccccatctctactaaaaatacaaaattagccaggtgtggtggtgcatgcctgtaatcccagctacttgggaggctgaggcaggagaattgctcgaacccaggaggcggaggttgcgatgagccaagatcacgccactgcactccagcctgggcaacaagagtggactccgtctcaaaaaacaaacaaacaaacaaacaaaaaccacgcaaatccagcaaccatacttccttttagaatcacattttcaggattctgccatttatccaagaataataaataaataaagttagaatttagtgttacgttcattttgacttctttgtaatctgtttctggccttaggttttcttgactcagtcagatgtaaagttgttaaaacagggaggggatcaagataaggccttgctatcttggtccatttcctattccagtcattattcatgtgacctctgtaatttttttacttaccaggctagattaagagactcatgaactgcatcactgggatgtgacaggatttatgactatggtgaagtagtctgaggcacctggatgaaaggtggttatagtgagttatgtacacaattcccacacattttaaacacttgattcctacagagctatcaaactaatggaaggcaagttactcagagtttggttgactgatacctccagggattgcattttctaaatacagagcttgctttcacaatttcagcaggatacaagagtgttcagaattgggggtttaccattcaaagggcagaggccagagacttgaatttacaaggagggtcctcaacacagacatcgagattacagtacattaatttctcttgcacatgaagaagttgaggcttcacaatttcagcatgacccagtatagttgcaacatcttacccatcactgggtgtgtatcttctgtgtacactggccctttcaacatctaaggccaggctaggtgctcatagcaactggctccccaggaactaacgaaagagaaagcaagaaacagtggaggggttttggtgatggtggaaggcaggggagatagaagtgggggttgcagaaggtcgtggtgaggcagagtggcagacaaatggggaatgagaagtcttgccaagcccagaagactatcgttgtgtaaacacacaatatgcttcaggctatgtattctgggcaacagttcctgccctaaaaggtgtggacatttaaattagggtaggattgcgcattctgtgatagagactggcacagagacaaagtggaactcctctacgttggggaggggaaaacatacattagcctgttttgaaccttagaccaagacaagacaaacacacaaacaccatttaatttcatactgcaataaaattctttgtaccaaaccatgggatcaaaattgttacagatactcagtgaacagttccaatgcattcattcatccagtcacttactccacaggggtttgagtgcctgcacttggtgctgggcacggctgagccatcccagacgccaaggagtttacagtctagtccagtcagtgacgaggttaaaacgaattctcgcatcattgctactgcgaatgcaccgggacaggatcagcccttcaaattctcccacgtggtccctgcaggtgagtgtgggtgtgagcgcttgcggcccgtggtgtttgggagtgagagagcacgtgtgtcagaatggcgcctgtcacagtgcgcgtccaggtgtctctgcagtacgcctctccatagccacccgagccgggctgtatgggcttggctaggcttatgtctcccgcccacgcaccggaggcggtgcggaaagcactccgcgggcgcgattgtgagtgagcgcgggcgcgcgcgggaggggcgcgccgcgctggctgggccgcgcgcaggcgcagagtgcggaagtcgggccgcggccgccgcagagcgccgggggcgggaggagcaaacgcaggaggccatggccgccgacgccggcgccggctgctaaggggctcggcccgcgagcgcctgctgccgcggacgatggtgaccgtacgggccgggccgctgccgctgccgctgcctccgcctccccagaagcaacatccgaggctcggcgcagaagagccgccgctgtgagccgtgccgtaccggcccccgccgccgcccgaggagaacgggagggcgggcgagagagccggggagttgcggagcccgcccgccggcagcgccgctccccagggagggagtccgcagcctgaggtgaccacgccgcccgcccggccccttcccatccccgcgccccccggccgcttcccacggcctccctcccctcccccatcgcgtcgcaggctccttcctcttctccctgttcgcccctttccttttatctcgcttcacctccctcttctccctagcattggaggagtccacatcccctcttcagccgcagcacccctccctcccatcctctagctcttcccgcggtggtcgcctccctccgaccctgctctcccctcctgggccccgcgcaaagccccctctgttccagctcccgggcctcggctgcctccccgccctcccatcccttcctcttcccagggcctggagcgctcccttacattcctgagatgcccttcctcggggctgtccccctttgcctccccagcatcccatttctaggcctttttcaagacccttccagagcggcccctttccagctccctttctcgtttccatttccaactttgcctcttttgcctctttgttcactttgcttccaagctcccctccctctttcccttcgtcttaccctgctttgatctacgcagccccaaactcaagctccccgctttcaggtggtgcgaggttgtttgggggtgcggaagggcctgccagtccatttttcgaggggggcccattgctctgcatcccgtccgtcagtcccttttatagtaagagggctcctcatcccttcctttttgtccccgtggtttcctctgtcttgccatcccttctgtcttctccctccaatactgctttccccacccaaggaccctcagacccgtgaaccccctttctggaatgagttccctttctgttcggggatgctgaacttcgcccgcgtttttcttcgcgagccttttggtacgtggcgtggcgcgacagagtcagcacccttggcgagataggaggggagctctcgagcctctttcctggaagagtttttgctgaacgtaatctcttagccccgcggcggcggcggcccggttgctgctgctactgctgctgcgctgcctgcttgccgcgagctgggttggggttactgtagttcaaacgcatctgagatctgcaggcgttgtgggaggaggtgcggggagagaggaaggggcctgtgcagtgagcaggcatcaaagattagtggatggccttgcgtcgcagtctgcagtaaagaggaaactagtctgaaagggaaggagaggactgtgtgtctttttattttttaaaatacggagtgtgcagttttactgaatcttgaatcatgcccaaaagaatgagctgtcggtgctgcagtcgtgacccaggctgagcggccgatggcagaggtagcagttttatttcctctctctgttccttaagttgaaagatggcctttgtattcagagtagactccctgtctttgcggtttgggagatgatgagaaaccacagaattgctagtagtttatgtggagatcaggtacatacaaagttagctagcaaggagtgggagtggggaggaccagctatatttaaaacatgtgccattgcttatgtaagaaatgcgttctctttcctggtatctcagttctgggcttttacttagaattttaggctctagctttgtgctcttaacattttcagtgaggcctaccatcctaaccgatggacagcccgaaaatttacttttcttaagatcagttttagttgatggtagaatttttttttttaactggttgggagaaagaaaggagataatggtgaatgatgatttttgtttttcttttttagggggaaggtgtagaagtattgtactgaatagttttaagttgggtcacgtgtcattcttgttttttctttgtctttttaaaaaaaagtttaggaggtgtatttttgaagaactcaaataagagaaataaaaaatcacatttttcatttctcttatttgacatagttcttcagagattagctgtgactgtaaaaacctacatttttcttattcaggacgatttgtttggtttcttcatattcaaaactaaaatcccgtattttcaggaaagtgtagaatgaagccccctgtgttttctaacccacaaatttgaatggtaaactgtacagcattatacttctacaagacattactgttttcataattacggattgctgcttctaagcctgagaaggtcatttaatgaactcattgaggtctcctttttggttagcatttgttgcacctcttgtggtttttggaaagaaatgccttttttttttttggtttgtttttagctgttttactgtgtaaaacatctttgagtcacatttagtttatgttacctgcagacacatcatgttggatattactttcccagttcttttcaaagttcaaggaggacattttaaaatcttgc

SEQ ID NO: 10749 - DNA, 6000 bp, Homo sapiens
gtctctcttagacgtgtcaacttttgcagagttcaagtgtaaggctggatctttatagtcacatccatacaaggcttgagttggaatcctgcctattgtgtgggttttcatcttggcagatgatgaacatggttcctgtttttaaaaactgttcctaaatgatttcttaggtcataatcaatttaacaccagtaaaatgtcttgaattttattttggggtacaagaatcttctttttctctttctttcctgtccttcagttcttttattaaaaaaaaaaaaaaaatcaccatctgacaaaacattcaaaatccctctcttccccactaccacaatccacccaccaccatcctttcctcaaggatgaatcagagaagagtatctgttgagagacccctaaaacctattctgcttccatgaaacacaacagatacactgagaagcaaagtcctttcctctggttacaggaacactgaaagtcattataaccattgatgacagaatgttttgattattactaagcgtgttcagtctggaagatgagaagtcttacttggctgtgtcctaggaactgatgacttaggaacagtattgacaactctgtgttctgctgagggccagtgaattctatacacattaaactttgtagattgaataaatgtttacatataaacatactactatggatatatgtatataaagactgttgtgattaataaaatttgtatttatttaaaatcgttacttaattcttagtggtcttttatcattacatattttcctgttcattgaatttcaaaagtataagaaagtccatgtgcagaattaggaatttttttgatggagagattgagaactcttggtacctattcactaagttaccatcttttcagatactctttcatcaagattccaagatccaataaatagaactccaccaggaagtttgtcttacctagaggtcaagaaactatataaccaggggccaaaattaactcactacccgttttttttttttttaattagtctctgcttatccattaagtttttttttttcctgtctccacaggctaagaatagtttttacatttttaaatgcttaaaaaaattaaaagaatttttttcatgacatgcagtaattaaatgaaatttaaattgcagtgttcataaataaacatttgtgctacacagccatgctcattcctttatgtattgtctgtggctgtttttgtgcttcagtggcagagcttagtagttgcaacagagaccttatggcctacaacatctgaaatatttaccatatggccctttcagaaaaagttggctgacttctggtcttgcccctgctccatctattagcggtaaaccaagggtctacatcaggaatggcaaataagtgttttcttcatgccaactcagtttggtcagtagtgactggtgggtgtgttgcctttggaaggattctgggaccccacgtggaccccaaaggactggttgtggttggttatgtctgccttgcaggagtgacctgtaagccacttacctatttgctattatgggtctcgagtgtgttcagactgttcctgatcataatcttctgccctgctgctttctttctggatagatgcttcataagtcagttgaaaaatccacgtggcagaattactgtaattattgaatggagctttaaaataggaattacagaggaaggagacaaggatctcttgagtgattgctcctccccctgacctcccctcccaataagcctaagaaaatatagggaaggaggaatggacccaagtaaaaactgcttaaagaggcatatggcaaaattcaagacatccatattatggttttctttttctggtgtattacaatagatgaactgacaacatctatatattacctaaaagtgccctgaacaagattcctttggttgagagatgaagcagtgatcaccaatgctgtttcttattggctgtggtagaaaggaaacttgtgttacttcctccaggccctccctcctacctaccttttttggaaacctcagaacaactgcctagttgtgatcaattataagtcaatggaaaaatcttatctgcttaagctggaggttccctgtatcccagcacaagcagtgagaccacaaatgtgtttgtctcttcaattttattacttttaacaaccttggcagtcaactttatagattttactgctcttttctaatttttttttttttttccctttgagacaatgtcttgctctgtcacccaggctggagtgcagtggtgcaattttggctcactgcaacctccgcctcccaggctcgggtgatcctcttgcctcagccttgcaagtagctggggctacaggcatgtgccatcacacccagctgatttttgtatttttaatggagatggggtttcaccatgttggccaggctggtctcgaactcctgacctcaattgatctgcccgcctcagactcctgaagtgctgggaataaaggagtgagccaccgcgtgcggccccaaatgcttttcatttattgtaacatgaaaaaaattatagccatgtgataccataagatttatgcataataagaaacactaccctaatgatgatttaaccttgcagtaaaatactcacccgtaaaatatcaggtgagagtctctccatgtcagcaaatgcagcagtagatctatctgcggagtcgtttttaaaaaaattagtaacatctaagagctgtatgttgtattatatattcagtagctcaaaatttattgttttttcttactacaagacaatataagatcgttattaggaaatttgaaaaagtagataagccaaaagaagaaagtaaactcctgctcgtggtttaccactaactcctttttatagatcctttcaggctttttaaaatgacgctttataactgtacattttcaaatgtgtttttcttctttattgtgaaatgcttgcatgttagtaatgtatttgtccaaattattcctaattgccaaattatattagattgtttggatatgctctgttgttacatatttatcctccccaacccccagtttttagtgattataaaaaacaatgctatgatcattcttttaacctaatatttgtccaaccctttatcatctttggagggattctggaaatgtctggagggtctgggttaaaaggtatcacgtttgaagactttttttttttttttaattatactttaagttctagggtacatgtgcgtatgtaggtcattttgccctccagaagagttcagtcagtttatgctcccctcagcagcatttgagagtgtccacttctggtcctggggcattaatgtttttgaaataattcaggttcccttaaatatccttaatgggaaaacagtagcaaatgaaattgaatcttaaattcattgagaagacttaagattcttgatctttgtgtaaattgacaactttctgggaaaatcaccttttaaaaaaagcattcaagctttaaaaagtctctcttgcttttttttttttttttgccacctaaggtgactttagactttctggccagtggtttagtgcatcacttattgtgacagtatctgagtgggttttgactttattttgatttagaatagaaaatgtcagcctgcattgtatgtaaaaatgataaatattgtgaatatcagtattctcatgaatattgtttttttgtgtgtgtgtgtacatatttacatacatgatgaatgtagaaattgtgattaaaatgtgtttcagactcaaagccatagtcaaaaaattatggaacattcagtggcctttcccccatactgttgttgttttaccaatgatttacttattaaaaaggaagtaatttctgattactagcattctattttagaaaggctaatttttgcatatttttgtttccttgtgatcgatgagggctctcgtgaggatgtgagactggcctcttgtaggttctgaatgtcataaaagattatgctaaatataaaatcgaatgtgaagcatcttttgttatatgtgtactttttcagagcagtactgagagagtgataggttatagggtcagccctctccttgaatcccctctctgtcacttgttgactctttgaaccaaacacttagcctttctgagccttagttctcttatttgtgaagcaggtgtcataatagtttcttcctcacaggattgttgtgaggttgaaataaatgtgatacctggtatgtagtacactcagaacaacttacagcttctgctgttaatgctaataagttttgcatgtagctgtgtgcagggggtggagtggagtgtgtgtattctcatctaaacggaatgttcacccacactccctttgcttctgtttttctttcctcagggttttctagtcttgaactactggctacgtggctaccaaatgcctaagggagttcgttcacagctgagttatgaagctggaattggttctagacgctgggtagatgcaaagcagcctaactcttcaagtaccgacatttctcacctctgattccggctctcctttgagaaggagaccttagcttccccggcttcaagtagaacagaagcccgtttccttccctcatcagtgaaaaaatctaatgtttcaaatgtaaattgttcatagaaaaggaacatagaatctgttttacagaagtaaatcgaccgtcaagagaagacttggcctctaatttatattgctttgcactttggtttgatattaagaaacagcattcttcttcagtgaaattttgggtgccaaacacctacccagaatgtccagggctttcattttcaaaagttagcattctccttttgaccgtccaagtcattatgaattctgacttgttgtattaggaacatgttggacagtggaaaattttctctggattgttttagtaatatttttgggattatacttcctttctgtaccaatttcttttaatttaaagaactataagtcagttatattatctaccaacaggtaatatagctctttcttttattaactgttctctgtcccccaaccatctcctgatatttggtagagtaacacctttatacgtgtgcttgcctcctaatttaaaatactgtattcgcatgtagatataatgtacataacagtttaacctcaaagttgctggagtcagggccccctgtgcttgagacactaatacagagtgtgttcgcacttagccatgggctgggctcaagaacctgatacctgggttgatgtggattacctagaacccttcctgcagtattcatacagtgtttttattttgttgttgtcattgcgtgtgtgtggtttgtgtgtgtttttaatgagaatcttgttttaaaatgtaatttctaaggtttaacaccaaaatgttttatttgttgtggagtatatattatacaatagagaggtaccttaaacattttttgttcttattctttttctcataagtactcctgagtacaagtggtcacctcccatagtattcatttggcttcgctgtcaaaaatcattattctgtgcagtcgtggccctgggaaggggaaataagaaggccctgttgacgggctgtcttggctctggaattcatgcatcctggccttgccaaggttctggcagggcctgctggtgtgttggagcctgcagggcaggtcaggctggttcagaggcccatgctgaggggtgggtgctctgaagtggagtgaagcctcaagcccatgaatgccaccccagtcatctctggtgtcagctgctgctgtggccccagcaggttctcaaagctcccaagtcctccctacgacacagcccaaatgtgtaaatggcactgttgccctgacagtgcatggaaaggacgttggcatccaattggcactccttctcccttattcaatattaggtttgatttgcccttcgccattgtttccaaagatcaaggaatgtcaataacatt

SEQ ID NO: 10750 - DNA, 6000 bp, Homo sapiens
aaaaggcaggtaggggcctccagcaagcttcccacctccgtgaggctggagaagaggccccctggatgagaaggaagaggccggcaggtccggcgggcgcaggcacaggtagacttctggtgggaaaagcgtgactcagcctcctccagcggctgcaggacgtccccccgctagaaagggccgggctccctttgctgacccagagtcaacccagcgattcctcccggggaggcggggggccccggccccggcccagagcgcatgcctatgccgggagctgggcgaggacagggcacagccacagctgggtgcccaacgggaaaggcggccgttccccctcaagctgcacctgaaggggtccccagggtcgaggccacttctccttcggctcagggttgaccttcagtgaccactgtggcctgcgggcatcccctgggagggacggagggggatggaggaaaactccaaagggaaaggccgaatcctgcagggtctggtcgtcggaaagccaaccatacagtcagccctccctctcctcgggctgccgtcgccatccgggtccacacgggctctaagacaaaaccccaattgcccccaaggccccataggaggggcgctgccagaatcgcctatttttagtgaaagagaaccgggccgggagacggcggcagggggccggagcattcccgaggtctcggtctgggtgtcgcgaggcagggaaagagggcggccccggagcggagcgggaaagggggcggggcagggtggggccggacgtggcaacctcccgcttccgggacagtgacccgcggcgcggcaaggcctttcccttgggcgtgggtggggacctggactccctgtggaacgtttaagaaaaagagaaccgaatgaggtttcgcgaaaggaaaaaaaatgtaactgtgatctagtgctgttgacggccgcgaatggagaaaccccgtgttctcgaggacaaattggaactcctcggcgttttaggtcctcaacccgggaacccctcgcaccgcgaatctcagtccacagcgggaggcgggtgtggtcgttcacctatttgtgcccgagggctcagggaggcgctggcatgacccgagtggggggcagcaagctggttagcgggagggtgaaggcagcggtcttccacgaccaccacaatcacctgggtagggattgagtcccgtattggaaaagcgaaagaacagtcagctgggggtgccaaggaggcaggtgatgtatacaaacctggagccttaggatggtccacaggctgcggaggaccacagccaggacaacgtcccggaaagcccaagggagactgcggcggaaggcaggggaacctgcagaggaccaggagagcaagctgtttcagggagggatcctggccttccctgcacacctgggcgtctacagcctccggcagctctgccaccctccctcgcctgtcttctgcctttacgcaggctttctagcagacattgccaaggttcttctccaggccttcaaggccctaggttaactgcaccctccatttccctgctctgtcctcagcccctccacactccagctcagtacgttggcactaactcttccctccgattgaaatatttttcccccatttgacttccctccacaggaacattattctcccatatacccgcagggctctctccgtgtctctgttccaatgttctcccctcttcgcataccgtaggaagtaaactgcaaataaaacaaaccagggtcccccctctgtcttgttcacagctgtgtccccaagacctaaaataaggcctggcacccaagaggtgctaagtttcacaacatttactctgccttgttcagggcgctttacatttgcttcttcactttccacaccaccatgtaatgtagatactaatattatttccaatctcatttcacagatgagaaacgaaagttgatagatgtcacaaatagaaaagtatatacttaggtataatgccccctttattttgcatagatgttggtggctgctatcatcctgatctgtgcccctgtttaaaactacttgaatagacatggtgccaacactgtctcttatagtcagagatgggtgagaatgggagccattacttatttaaattcctgcggtcgagcggaaggcagaaggacagttaggtatccgtgttccaccgcttccctgtctgggcacgtccttcagggcacagttggacccccagacccctgggcttttgtgtacgctggctgggcccagagagagctttccactagatgtccccagaagtcagaaccttaaggtcctcctttgggcatttccgtttctgcgagagcttcccgtgttctggcctaggcaggaacggattggcagtctagcaacacacagggcaatttttactttattattttattgtatgtatgtatttatttatttgagtcggagtctcgctctgctgcccaggctggagtgcagtggcgcgatctcggttcactgcaacctccgcctctcaggttcaagggattctcctgcctcagcctcccgagtaactgggattacaggcaccccccaccacgcctggctaattttaattttttttatttatttatttggaaagaggttgcatcatgttggccaggctagtcttgaactcctgaccttaagtgatccacccgcctcggcctctcaaagtggtaggattacaggcatgagccaccgcgcccgggaaaaagagaccaattcttagttcatccagagtaaccctctcctgccttagtccagcctggactaagtccttccggagttggtgtgcatcagaacaaaaacctcgtgaggggagaacaccctccggaagcacagttttaaagtttatttttaacattttaatactctactttttaaattgcccatcgttacccacgatagtgaaatgaaaattaagctcccctggggttgccccgtcaaccctccccgcaccaagtggaacaggcggagctcgagctatgccacataggggcggggaagcagcccggcggtcctcatgggaatgtgccgtacacttcacctctttcgcttctcgctctacatcatccctgagaagcctttttaaacacttgaatgtgcttgtttcagagtgtatttgtaaagtgcagtcagattttgttgtacggaagacgggactgtgatgccttgcaatttccctctgccttttgcattacatggcgccgccatcttgagcagaaatgtatcatggggctcgccattttgcatggtcgagcgggtatttccggttccggcggggggcttttctctctctctttcactgcaaggcggcggcaggagaggttgtggtgctagtttctctaagccatccagtgccatcctcgtcgctgcagcgacacacgctctcgccgccgccatgactgagcagatgacccttcgtggcaccctcaagggccacaacggctgggtaacccagatcgctactaccccgcagttcccggacatgatcctctccgcctctcgaggtacggactaaggtagatttcaggacccgagattgcagggctgggggattccgcgtgtcgtgtagggaattccgcgtgtggtgtggcaggccggtggcgcgcgagttggcggggactgacagacttctctgccccattgtgaattggggcgtgcggacccgagcctaggcctcaacccgggcgaaccacattgcagatgagaacctacgtgtacatcagctcgcagctgctaggagggttggagagttggaaacttttaaaatatcttttgccttctccttcgtagtgtggccgggggcctacgggccgggcggggcggtgatgaccccaacatgccatctgagtgtcggtgctgaaatccagaggctgtttctgagctgccgcccggcccaaggctcgtggggaggcaggtggactccagaggacctcgtggctcaagtgtcggcctactttttctgcccctggttctccccgtccctatccctgtgttcctgactgcgtttagacgcttcttgtgcttccgctttgctgctacactgttaagaattgtctgacttttgaatcatgtctggctgttaatcgtaaaatttgttgagtgggacaggtttcagtaaaagcatccaatcctgtagcgcctgaagtggcttttccagcattcattactacatttctgtcggccctcagaggtaggcataggaggccccagctactctacagccacaaactgctgtgcatttggttgcagagaagacacaaagtggctgttgagttcgtctgagtttcaggaaagggtgtctgtatttctggcacctaaattaagttctcaggatacaggctgggcgcggtggctcacgcctataatcccagcactttggaaggcagaggcgagtggatcacttgagatcaggagttagagactagcctggccaatggtgaaaccgcatctctagttaaaaaattagccagacgtgctggcaggtgccagctggccaagtaatcccagctacttgggaggctgaggcgggagaattgcttgaacacgggaggtggagtttggagtgagccgagatcatgccactgcactccagcctgggcgacagagcgagactccatctcaagaaaaaaaaaagttatcagggtacagtttacctctacgtgcgtttttagtctggaatagagccactcagtcctggtctgtaactgctcttgtctgttgtttccatccctccttaagcgtccttagttgttgttaacccactcatgaccttgacacttagtgaattatccagtgtgttaaacgggctgcgggttcctcactgatttttcttctgttttacctcctttagataagaccatcatcatgtggaaactgaccagggatgagaccaactatggaattccacagcgtgctctgcggggtcactcccactttgttagtgatgtggttatctcctcagatggccagtttgccctctcaggctcctgggatggaaccctgcgcctctgggatctcacaacgcaagtagctgctcacttagctctggggccttgggaagaatctgggcagaagtgaggtggatgcaattggctggtttcccaggggagatccagtccatttgggaactggaaagcagagcacacctacagaagatgtttggcctccctcactttaaataagttactcagcattgctgaggagtgtggctgaacatttttgccaggtgcaaaagttctgagtgggcagcagtttgaacatgttttaccttgaaagctcaggtaattggcaggtggaattagagggtcctggtgatgacagatggcattgtcagccaatccccaagtgggagtgaggacatgtcctgcaattctgaagggattctctgtcacttggctcttctctttcatatactcagtcacttgactctgtgatcagagccaaatccagggttgtatgagtgatgcaatgagacagagacaaagcccaggaaatgagtctgaccgttgaatgagagtgtttgctaagtctgagaatgacaaactcctccctctcaggggcaccaccacgaggcgatttgtgggccataccaaggatgtgctgagtgtggccttctcctctgacaaccggcagattgtctctggatctcgagataaaaccatcaagctatggaataccctgggtgtgtgcaaatacactgtccaggtaaagtgagccatctccaaggatctcttccaccctcttaaactttgctttttttttttttttttggcgacagtctcactcttgcccaagctggagtgcagtggcgcagtctcggctcactgcaacctctgcctcccgggctcaagggattctggtgcctcagtctcccgagtagctggtactacaggtgcgcagccaccacgcctagctaattttttgtgttttagtagagacagggtttcaccatgttgcccagggtg

SEQ ID NO: 10751 - DNA, 6000 bp, Homo sapiens; identical to SEQ ID NO: 1133

SEQ ID NO: 10752 - DNA, 6000 bp, Homo sapiens; identical to SEQ ID NO: 1134

SEQ ID NO: 10753 - DNA, 6000 bp, Homo sapiens
aagtcctgaaatcaaccttttctccaaaaagctctgggttttaaaacaaattacaatttatctgttttggtttttataagcattgccatgatgaccatccttgatgttatatctctggaaaactccatgattatttcttttagataaatatctaaaagtggaattcccggattaaaggcatctaaaatgcttttactatgttttccactaacaaggtgtgagatgggggggctgcctcaggggctgcaactcaaagcccacttcaaatgggaaacactatccatccgtcaatccatttatctatcttagaactctctttctatgactttcttattttcaaaacaaacaaggaataaagaaagaaaaaaatgaaacaagtaaacaaaagacctctcatctagactctctaaccacccaacaaatcacattgctcctcctaggaggaaatggttgaggtgtcagactgagaatgacatctatttcccttcatggggagagcacttgttaattcacctattaattcacttttaaaatataattttacattttatcaaagtaatacatatacatagtttaaacattcaagtggcactctaagacttaccacgaataacagcaatacagtgctatatcccttcccattgccaaactttcttcacagaaaaaatcactttcatttcttttagctttttttttttctggggtttatttccatatctataaagaacatgtttatactgcaatttaatttttttttcaattttagacattatctattgacttcttactaactatggaagataaagactgaagtctcttaccaattctatacacaaacacacacatatgtgcatcctttcctaaccccattctttcaatatagttataacttttgttaaatccattaatgttttcattgttgtgactctatagttattcatagctgagccacatattggactttaaatatattttcttatataacattttctttttcctggaattaataattatgccattttttggtttccttaacttactgagccgattactcatccttctccaaactttctaagagtgctgcaaaacttttcaagtttcaacatctgtcagatccattgggtcccctccatgtattttttcattggaaatatccctccttgagcctggcgtctgccactcacttgggctagttgctctccaagcctgttgtactcttatcatcttgggatctcccttggccaccattcttggaattctctctcttctatttgaaatttgctgtttttgggagcccatttttcctttttgttttggcttatgctcttgtttttgtagtcacttttttcaataacatctcgaaaatggtcacatgggagataaagttcttgaaacttggcatgttggaaaatgcagtttcaagaacgttgttttacctttctttctgatggatcatttggatgggtagagcatcctaggtgagaaataattttccaatagagttataaaggaattgatccattgctttctaacttctggttttgttattaagtctaaagccattctcatccttgatcctttgtatgtgacttatttttttcctatctggaaacattttttttctgtttattcttgatattctgaaacttcactgttttgtacttcagtgtagatttattttcatttattatgctgtttacagtgggccctttcaatctggaaacaaatgttcctcaattcttgggaattttattgtatcacttctctcattatttctttccctccattcctctgttctgtgcttctgtactgctggtagtcagatgttggctattcttcatctctttgtcttttcttctatcttctggaagatttcctcaactttattttctagtctttagacttcagctctcatattttgaatctccaagagttcttgttctctaattatgcctttatcatagcatcctattcatattttgtgggtacaacattttttcttattttctatgaaggtttaactaatatttcttttaaaaaatattctgctttctgcattgcctttctttcaagttttttccccccatctgctgttgggatgggagaaatttaatgaatttggctttgtggggttaggattaggtagtctatttctttttcagattttcaaccaatcttatgatttttgtttcagaggtatagtcaattctcattattccttcattattcctggcaattatgttcaataaaatcgccacaaacactgaattagaaaatactgctgagcgtggtggctcatgcctgtaatcccagcactttgggaggccgaggcaggtggatcacctgaggtcaggagtttgagaccagcctgaacaacatggagaaaccccgtctctactaaaaatacaaaatcagctgggcttggtggcgcatgcctgtaatcccagctacatgggaggctggcctgaggcaggagaatcacttcaacccgggaggtggaggttgcggtgagctgagatggcgcaattgcactccagcctaagcaacaagagcgaaactctgtctcagaagaaaaaaaaaaagaaaaaaagaaaatactgaattattctctgtgggggaaatatagagttaggtgcctgtgagcctctggtcacaacatttttgtcagctaatcaatacataaccttgttttgtgtgtgtttctgtttaaagacaccttatttaatatacattgttgattcatcaacattgaactcatggctaataacagtactatgactcatgcctgaatagagcttatttaacacacatattttctccatgaggcacagcctccttctgcttaggaacaccagacagcactccagcactctgcttggggggcattcgaaacagcaaaatcactcataaaaggcaaaaaattgcaaaaaaaaatagtaataaccagcatggcactaaatagaccatgaaaagacatgtgtgtgcagtatgaaaattgagacaggaaggcagagtgtcagcttgttccacctcagctgggaatgtgcatcaggcaactcaagtttttcaccacggcatgtgtctgtgaatgtccgcaaaacattgtgagtattgatttggggggttacaaataattcctagcaagtaggtgaattcacaaataaggaagctgtgagtaatgagggttgattttacctacctagtgtctcaaatcctgagccgtatgagattccgtggcataattatgtttgcttattgttggcaaccttattaggcatttctaggtttctgctttctcatctttaccagttcagttatggcttgattcatttctctttttccaaagatttgttgacatctcttatttgctgttgcctcttcccatttgttttgtcttgtggttctatatctttgccataatttttgtggagtttcctgagagagtagagataaatgtatatgctcaattggtcttgtcttaaccagaattctatttaatacacaacacctttagtgagctgttatgcatgtaataggtgtttactaagtattggttgaataaattcaagaaatgcttgctatttttgtgctagcatttagcttttctctatagtatattataatggaattttattttattttattttatttattttttgagacagagtttcactcttgtcgccaggttggagtacaatggcacgatcttggctcactgcaacctctgcctcccgggttcaagcgattctcctgcctcagcctcccgagtagctgggattacaggtgcctgccaccatgcctgactaatttttttgtatttttagtagagatggggttttgccatgttggtcaggctggtctcaaactcctgacatcaggtgatccacctgcctcagcctcccaaagtgctgggattacaggcgtgagccaccacgcctggctggaattttaaatatctcataattataatcttctaggtaaaagactagctctctttctcacccttattcctcctacttagtggaacattgcctaaggaagatggggaatgggttaaaaattaaaatgtggggctggaaagcatagcttgttttaaaacttagttttctttccttttgcatcataatctcttccccggtctatttatttctcgtggttttgtcagtccattacaaacggttgcaaaattgtggtactagaagggatcctagaaataatctaatttgaacctttgattgctaggaaactgagagtcaggctgccttggttcaagtcttggctccaccacccatgtaggacatgttgcttactgttttgacctcagtttccttgcctataaagtgggaataaaaatactcctgatgttataggattgttgtgaagattaaaagagataattaatgtgaagttcttagtactatgcctgacacacagtaagagctccacaaattattaatgatgattattactagtggctaaactgaagctctggtttctcagttcagtatgttttcctttagacgtaaataagaatttgtaagcctctttttggagtcagctaccattattttctttccttcatctccttcattgtctaaagacagttaacatgattgcgtatttctcatttcaagctaaagatactctcactgtttcagctattaccacatttgtaaggacttcctgaagagaaaatttaaaagttagtcacttcttttagttgtttctggtctttcagatgatcctttttttttgtagagttgagtgtttttgtttttgcttttgtttttagttaacaataatgcaatccatttcccagcataagtgggtaagtgccactttgacttgggctgggcttaaaagcacaagaaaagctcgcagacaatcagagtggaaacactcccacatcttagtgtggataaattaaagtccagattgttcttcctgtcctgacttgtgctgtgggaggtggagttgcctttgatgcaaatcctttgagccagcagaacatctgtggaacatcccctgatacatgaaggtgagtgctaattcatttagaagagtgatagtttgatcatctttttctactttataaaagtctttttctgttttcttcagtgaaattatgggtcagacccaccacgtgaatttctccttgaactggttgttgatagttaagggaatctaatcttttggcaggcaatattttaaaatgctgagatcagaatggagaatcatgagtgttagaggtgaaggattggggaaaatatctgaaataatggatttatctttcaggaaactctaggctagagaaaattagacctagaggattcagaggaaaatccttgtgtgtactggtatttcatggcaggagagctgagagagagtaaatcactaatagctaccacatgattttagtggaaagagtccaggtttggaataagacagtcgtgagtttgaatctcatttatgctgcttacaaactattatttttggacaatttacatgatatctcttggcctcagattccatatccgtaaactagagatgagtaatacaaaccctacacggatttttagaagtacaggatgtaatttgtatagtgtagttagcactttgcaggctgtcactgttccaacatgatagtgcttttgccagtctcactactggctgtctcagaatgttctttaaatgaaggcagcccacaacccaaatggatttatagactttgaaactggaggtagtcatctgacagctcgcaatctcatcttgggcaatgtatatataatcaatatcctcatccaaaaagtaaggatgtcattattttattaggctgaaattgccaagatttaactgtttttgacttaataaaaatagcaatttcatttgatttaacctaaaacataatatagaaataaaatttaaaatatgcaggccgggcaaagtggctcacacctgtaatcccaccactttgggaggtcgaggcaggtggatcacctg

SEQ ID NO: 10754 - DNA, 6000 bp, Homo sapiens
cagtaggaactctgtgtgaggactccaaccccacatttcccttctgtactgccttagcagaggtccttcatgagggccccacccctgcagcaaacttctgccttgacatccaggcctttccatacatcctctgaaatccgggcagaggtttccaaacctcaattcttgacttctctgcacccacaggcccaaccatgtggaagttgccatggcttagggcttgcaccctctgaagccacagcccaagctgtaccttggccccatttagccacggttggagcagctgtggaaaaggtctctggcaagccctagagacattttccccattatcttggtgattaacatttagtgccttgttacttatgcaaatttctgcagccagcttgaatgtctcctctgaaaatgggtttttcctttctatcacatcaggttgcaaaatttctgaacttttatgatgtgtttcccttttaaaactgaatgcttttaacagcacccaagtcacctcttgaatggtttgctgcttaaacatttcttctgccaggtaccctaaatcttccccctcaaatttgaagttccacaaatctctagggtgggccaaaatgccaccaatctctttgctaaaacatagcaagagtcatctttactctagttctcaagttccttatctatatctgagaccacctcaacctggacctcattgttaatatcactatcagtatttttgtcaaagccattcaacaagtctctagaaagttccaaactttcccacattttcctgttttcctctgagccctccaagctgttccaacctctgcctgttacccagtttcaaagtcacttccacattttcaggtatctttacagcagcaccccactgctgctgtaataatttactgtatgagtctgttttcatgctgctgataaagacatacctgagactgggtaatttataaaggaaaagatgtgtaatggacttagagttccatgtggctggggaggcctcacaatcatggcagaaggagaaaggcacgtcttacacggtggcaggcaaagagagaatgagcgccaagtgaaaggggaaaccctttataaaaccatcagatcttgtgacacttactcactaccatgagaacagtatgggggaaactgccctcatgattcactgatctcccaccaggcttctctcacaacatgaaggcattataggagctacaactcaagatgagatttgggtggggacacagccaaaccatatcaggtagtaagtattccagtcaataattttttcatgtttctcttaatatgtaattaacctgcataactcacaataggtgcagattttaatctaagtaatgcaaagattcattctactttcccacccccaacacatcagttagcaggcaggagaaagagaaaataaaaatattgcatagaagaccatagtgttttgccccagggttgcaagcattgatatctcacccattaccaattcccagtcattgaatgcctacagtgtttggttctgttagagaacagaacatttaaaacacttgactctttagatcatgaggcttacattccaagaagccagtactcttcttgggtgatttttttttcccactttattttatgatgtgcagcatcataacatcacactaacctaacccacatttcaaaaaaatcacacgaatgtggcctaacctatatttctaaaaaaggttgaattcattgccagcattcaataattggaaaatagtccataaaaatctgtattttcagcttctctaggaaaattggaaaatttgggctcacattcctgtgcggcaacaattagctaaactctagttcagctgcccgctttaagaccagccatttgtactctactgtacccagagggctttcctaatagcgcctttcttaagtggctcctccaaagcagtggttcctaaaatctggcttcccactggaataatgtgaggagcttgaaaagttactaatgcctgcatttcaccccagagattttgatgtaatccatctggggtgcagaccaggtattgagatttttataagctcctcaggtatttgcaatgtgtagagaaaactgagaacccctgtctaagatagggcttctcaaagtttaacttgcataggaatcacctgataatcttgttaaaatgcagattttgattaagtatgcctgggatagggcctgggattctgcctttctaacaagctcttacatagtgccaaagctgctggtctatgggcctcacttgagaagtaaaggtctaagccatttgtatttcacattggctttgaaccctaagatacattcttaggtttcaagtctaatgaaagctaattctagcactcacaatattgatgtagctggaatgatgatgccaaatgagagtatcctaccatactttggggagaattctttctcagcctatagctactcagcctttcttgacattggggggtccttgacttcttatgccttgtatgtgacacccctgtatcacccctttcgttgcaaattgtacatcttctgctatttcgagctccttgctggtgtcactacctgctggccaacagtttggccattactgattgaaccatggtgtttgggtacttaatgtgagtattttattgcagaggttttcaatcagtgtttccagaagccttagagtaatagttctgaaaccatagggcatgcatcagatcacttggagagcttattaaaatacagattgctaggctccaccctcagcattcctgattcagtgaggacaatttgaatttccaacaaattctcaggagatccagatgtttctagtccaaggatccagaggttctagacagaaggaagggaggtggtgcaatgggcctcttggtcttgttacatgacttcttatcttatagttgtatttggggattctagactagattttattaaataaaaagattatttttaaaaaagcttgaatactgctgttttgttgcctttgcttttgtttcatagaaatcaattgaaggtgaaaataaataaaaatgctaatactagtgatatggggagatatcatcagtttaaaacaaatgaaatactgaatttatttagtatatgaaaagagagccttattttcttcccttgggacactctttatgatgaaaaaacgtaaaggaaatacaatgtatgctggaaataaattactaaagactgtgtctaaatgaggaggtgcatttgggaattttattgtttttaggtttgcgggtgaacagaatcccactgcaatagtgcataagactctttccagctatctccagaagaaggagataactagcaaggttttcactgttagagtttgttcagagcggaacctaaaggaaatactgggaaggtcacagcagtttcatctcagcttattggattggatcaaagtaattctactgcaaggcaaggtatatcattccatttacagacagagaatgcatgaagtccttcatttcacacagtaggtgtgaagaaggtaccttggtaaatttcctatttgctttcagataaagtgtattcttaaacatgatgtgggtagctgcctgtttttgtgtcgcctctgcaagagacatcttggaataatagaaacaccagtgtctgaatagcctaaagtggagcttacttttctgttaggtgagtcacctttaaaaatgatattttttaaggataagcgatgaattttaggacgttcttccctctacttccaacgtccacaagaataaaccaccaaattcaacgttttacagaggccaagtgcttaggttttgtgtgtttgtttttaagagttttcttgcaaggaaactgggagggaactataaaagggctttaggcaaacagggtgggcgggtgcagggctttaagctgcagaaaggagaatctggaaagagcttttaggaagcagattctcacatgttttaatatgaaagagtggcacacgtggtgctggcattccatcttaccatcagtggaaggtttgaaccaacatcaaatttttctggagcaacttaggtaattattacttgaagaatatgcatttcaaaactaacacctttaagagacaatgtaattcacctgcgcttccccgccccccccgcccgcgccaaccccaccccccgccaaccccgcccccgactccgcgaacgccgaggggcccgtggtctgcctgagtgacctccatttgctctgtcatctcaggactagaagccatcagccagcgtacgccctcagaaaactctcttcccttctcgcgggtccgcctggctcccggaggcggcggtgccaggctgccggagttagccagcggcaggctgcgggcgcccgtccctccggttcaccctttcacccctccttcacccccggagcgccaggcgggtgccgcgggttttccgcccactcggaaggcagtgctggcgagaccaggaattgcagggcctctccgctttggcgagctctggaatccgagtcctccccaccccagccactctgctggggcgctaggggctcgaaaaagcctggggttggctgaaagacactcggattagagacgcagccagcctccagggaggtctgaacttgtcttcgacctccccgaacccctccgcctctgcgctgggagacgcccagcagccgggcgggcccgggacgtgtagagccagagcactccgcagcggaggcagcgcgcggcacggccgcccggggcatccccgcggctggggggcggaaggcgagggcggtggcaggaagggtccgccaggcctgagctcgctcccccactgccagccgccggctcggaggcccgagccgtgcggacggaaaggggcggagccgcgggctctggttggtgtgggctcgggggcggggcgcgcggggccgggccggaggcggggctagcgccgggcgctggagctgcgggcgcacggagaggagtcgccagcagctggagcggagttggaggaagcagcggcagcggcgagggcggcaggctagctgtcggagacggcaagcacggatcgggcacggccggcgggtcgcagccgggctggaggccggtcggaaccgagcgggcaggaggccaccgctgcagcgcgggccccgcagaggaaggaagccggcgggcggggtaggtaggcagcagcagccccgggtgtgtgtgctcgggcgggggaggcggtgcatgtgtgcacggctgccgcgactctcttcctgtcactggcagcggcttctccttctgcagagccccgccggggggaagcgggctggccaccggccctccccgcctccggcatctcctggccgccgggcagcactacccccgcgcgcggccggcgtcctgtgagatccccgccatcctgactcccgtttcccccgtcctcctgcgagctggtcctgcacgccgccggtcgcatttgcccccggagttgccgacgagctcgggcttcctcccaccctccgtcaccgcacacttcggagggtccccgctgtcgccttgctgcagttttccggggcccctcaccggaggagagcgccctggccgctgccttcgtgttgcgggaaggagcgctcccttcccccgtggccctccagctgcagccagggtcgctgcccgggcccttcccggggcgggcgaggcggcggtggtccccggagctcgtcccctaacccccgccttccgaagtttgccgccctcctcttccggggtgggggaagtgcgcctcggggcggttggtcgctggggccctaactcagcgtttattgccagccaagcttgggcaggttgttggaggcatatttagtggggtcttggaaccgcccggaaatccagcttttggaacgtggggcgaggcgggagggacctgcccagcaatatggagccggctggggagagccagggagcctgcaacccggagctaaaatatcgtgggcaattctctggaaaccacagctct

SEQ ID NO: 10755 - DNA, 6000 bp, Homo sapiens
taggacacaggctggcactcccgaccccttggacaactggtacacccggcagcctaggacctggcacacagtggccactccacgtttgccttcgctgtcgccaccttggtgtctctgactctagactccttcctggggaaattcaagcctaatgtttccttctggtgagggaaccccaaacccattcatcaggaacaatggctggcacaatgtgggaaaaataacccatgggaatagtcctaacaagccctgtgaagctctggggcagctcttctcataatttgcccatcacctctcaagccaatttggccaagtttccttaggatttcatcaggaaatatgaactgccaattttgttattaagtctttattttaataacaattcttggttattgtatgaagtccgagggatggagcaggaggggagaacccacagaagagtccttccttccttatgaagaaagaactgaccccaaagcccccttgcttcattttaagggcagctgcctggtacctgatgcagagtagcagcatcccagcaattgtgtgtgcttgcctttctgtaggtcacaaccacctacatgcacacacatggacacacacgccccaacaaacagtgaaactacacagagtttccagaaagcaaaccgtgtttctagtaacaaaccacagtctacctctaggacctgtaaccgggttttgccctgagaggatgctccatgggaagtgctcctgccgagagccagcagcccagcctcccggcggctttgggcaagccccaacaggatgccaggcgggctggtgagcaggaagagacgccgctcacaacctctccttgctgtaatttactaaatccatctggggctcctttgagacgttttctggaaatgccacatttcaagggtctccctgtcagaaaaggtcagagttcacgtgggcctttcatgttaaaggagcttgaaagaaaaggaaaggaaatgtatattttcagctctagccatgattaagtgggctcaggccatgagaacattcagatgatttacatgacgttacatgaagagccaattagcctaacaacttccgaaaaatatctcgttcaagagcacccattagacacttggaatgcaccaggctgctgttctaagctcttcactagggtacagtggttcatctcgactgcactccaacagagcagggcaggcctgcgtatgacatccatttaacctatggggagactgaggctcagagagggtcagcaatctgcctggggtcccacagctagtaagtggcacggcagagatggaaacttaagactgcccaaatctaaagctggagctcatctgctccaacaaccctcaagccttgggagtcctgacttagtcctgtttccagcatctgactagtgcaagctcatttgcgtgaagatgaagccttattaaatcaccagccctggcctggtctggatgaatccagaagactctggggcctccttgcagctggtcctggtcctgaaactccccggtcacctccaggggggcaaccacagcagattgcactcactaccctgtggaagaaccccagtgtctatcatctgtgtatgtgatctgagccaattcccagaacaggtggcctcgggtgggctcagcagagagatggtacacactgagatctgtctggttcaagggagagattctaggccctctctgccagcaaaggtcttgggccccctatacagaccaccaagatgattccctaatcctgttgatggcccccttcatgcaacatgagccacccagaaagtcagggctccatattagtgacagcttatttgtcagcatttgtctgccaagaccacaaggcaaataaggactccctctggaattttataatggaacactagagtgtgatagttaggatgtgggctcaggagtcagactgcctgggtttcaaattctgacaccttcattttcaagctgtgagaacttaggtgacttcatctctctgagcttcagtttcctcattagtcaaatggggatacgagtccctatgtcacagggttggtgtgatgattaaatgagataatgtgtgtgaagctcttgacaggatgcctggcacatagtaatcactcagtatatgaggttggtcgttgtgtagacgatggtgaaggaatcagtgctgactagaccagggactcctgtggggccgcaccaacttctggggaacaaatcagagctcttgttcctttccagctttccaaaccctcctaagccatccaggcccacatgaaatctacctccttcaggaagccaccctgactactctagtccacattgatctcaccatatctgagctctttctgtccattacctgtatagactactctagcacctaaatcggctctaataactcttcagcttctcaaagcagccaatggctcctggaaggcagacacctctagcccttccctctccacagcccaagccagggctaggtacacagtagatgatcccttagcaagccttcagactgatttcagtgtggctgtggatgcctgtgactcagcccttctctccctcacgcctcctcacagtcccactctccctactcacccaccctctcctctggttccagccagcagggtggggagttggagctatgaccccataggacagttgttcccagactataaaatgtccaaagaaacttgagggtgggggagttaacagatggggaaaaaaatgttccttatgttctttcaccaaataaagacatgaaaaaaaacacttgtcccaccaccattttagtaaagaaaggatgttttcacaccaataaagcagtaagggcataatccttgattaaaggctaatacgaagctggaaagttttaaccttattgagaaaacaaaacaaaacaaaaagaacctcactgttgttgtgacttttctcctttctccaaggactggagaacacttcagcctccactgatctgtgtcggtggaactcatgggtctggggacagctattctggaggacgttcctgctgaaccagggttccctacaaacacatgaggacccctaaagccattgggttgggcagatccggattccctttcagctgtcccagaggaggctcaccctatgccagaccctacctataacctcaggagttgaggtggcggaggctctgaactcccgtccctgtacctctcccctccgggcagggccgagcccccccttccccgccaatccggagcagatgaggcgagactaagcggcaagcccaccctgggaagaggctggggagacctaatgggcagggtccccctcatctccatcaccaagctgagcactcgtgcccatgccaccccccagccccagcctggggaaaggaggaaaagtgggcaccctagcccggaggtggcgggggaggggggtgtgggggctggtgtccgagacacccggctgggcgggcacagataggatctgaacacagggaagcatggcctagctctttgatccacagccagccacgctgggcctggacccggagggaggcacggctgtcttccggcccggctttgcaccgctgccaggggtcctgtggggccctcagagggagaggcgtccaatacccggccctcccccaaataccctctatcccaactgctctcagaagaggcgtgagcgtctacagtgaacccagcacagaaacctgctaggggagctgctgttgactgcatcgcgatccaaaggaccggcgtcttttgtagatgcaggggctgagccaggccaagcgcgccgtggaggcccgcgtggacgcagacccgggtgccatacagatgcgctggaatccaggcactttcccgcgctccgcaaatctagatgtttcagcctggatcgagcgagggttagagggttagtcaggccagggtcaacttcagagtcatgggctccctaaatgcgacttctagggttgagttgctgtggacgagcgacccatgtcggaatcccgcgcccacgtggctgcccaaagttccgagtctccgggctgcaggttctagtcacggaaccgagttgggagagtcataggggctgggacttggaggatcggctgaggtccggtgctcttggctgtgttcgcggctcggagccgtcgcctgactgaggggcccgtcacagatgtgtgatgtataagctctgcacgcaacaggagctcaataaatgtgcgaaggggggtatacttatgttcgcactgtatgcaggcggcctagaaggaagtccctgattggcacagggatggaggatggggcaagagccgcaacagcgccgcggagttccaacgctgccggttccctggggtacgagcacagcctcaagcagcctcaagccctaggaagcccccagttcaaagcacagggcgcattggagcctgggcacgatacagttcacaccacggctgcgatggtaagccacgcccaagtcccaagggcctaggggacccccgccctccacagccggaggagaaacctgggcgcagaaagcagggggaatatctggttgtaggtgagtaagcggggtcaggagttcccgttagagtctctgcgtttcgggagaagggtgatcattcccaggcttgtccgacgtctctctcagggtgcgctccggaagagcgagccctttaaggctatgccgagtgggcgcgtcccggcctctcccgggagaggagaggcggggcggacctgtgtcccgcccccggcccggcccgcccccagtgcccgccccgcccccggcactcggccggcggcgcctttgatgttccgacccgccagctcgcggagccgctctgccccgcgccctagcccgcgcctgcagcccgcccaggcggagtcagcccgcgctccgcccgccgcgatccgagctcggaggttcggactccgggctcgccgccccccgggccggctccgcgccccgcactcccggcgcccagcgccccgcgccccggcgggcggagcgcaccatgccgcagctggactccggcgggggcggcgcgggcggcggcgacgacctcggcgcgccggacgagctgctggccttccaggatgaaggcgaggagcaggacgacaagagccgcgacagcgccgccggtcccgagcgcgacctggccgagctcaagtcgtcgctcgtgaacgagtccgagggcgcggccggcggcgcagggatcccgggggtcccgggggccggcgccggggcccgcggcgaggccgaggtgagcccccgccggcgccggctcctcccccgcggtcgccgcgccgcgccgccccagttgcgcgcggccctcggggtctccagcgcgcagagcgtccctgccccggcgtcggccccgacccccgcggtcccaccgcccctcactcccctccggttctccctccaggctctcgggcgggaacacgctgcgcagagactcttcccggacaaacttccagagcccctggaggacggtgagtttctgcccggcccggcttcccttcgtcgcgctcaggccctggcctcggtgggacggggacgccaaggaccgcggggagccgggtgcctcccccaccgcagctcaggaggcggcagaacccaggggtggagagtggggggcgggcttcccgggcgccgccgggtcgagtcacttccggtgccctgacctttataggagtaaacagacccccgccatccccgcctcccctcctgcccaggtgactgactaatccgccgccttcaggagacagaattggccaaggtttcttggttggagggcggggggtgggaggtcaagtaggggccacctcggggaggcctgccctccaggtccttcccctaaaacttggcactgccgatactcccagcccgttccttcccaagtcaggaacttgcaggggaccccttggcaattctttttctctcaagagcagacagccttcagtcccagccgctgccagggctggtgtgtctgacc

SEQ ID NO: 10756 - DNA, 6000 bp, Homo sapiens
tgaggaggaaacagaaccagcatgttcctttccaagttggttcagctgacgaggctgtcggagatgaggaccaggtccctgcattgagtggctagagagctgtcctggaaactctttggtccatggtaaggatatccctcatgccaggggaggaagtcttccttgcactagaaaacaacagtcctctttctgtaaagttgggcatctcggcccatttcccttgctggctttgctgggagaggaaggtgtgggttggggtgttcggttcacagtggtaagctttgggacctatgtgggtgttcatgcagggaagtcccagagcccacacatgcatgcttgtgcctccagcctttttccccgctctatgagatatggtctgggagaggcagactagaaagattccttgataatgaatgattgtttagaaatgatggcttattcaggactcccaggggaagagccttcttcctgatttttttctttgcattcatggagacatcaggaagctttgaaaggctgtgtggagagatggcattaggatgtgctcacagacatggggtctcagagtaagcagagtcagatcttagaagatgaggctggagcatcattcccattgtaggtaacaaccctagaaatctagaaccctctcagttccttcccaagtaagaaagcctgtcttaacatccctggaaaatacagtatctattcagctgtgtagctccagggactgaacattctcactggggtatcccattccctttggacatctggcaggatcactgagctggactccactcctctggaactctcttttgtctacaccagcggtctccaacttttttggcaccagggactggtttcatggaagacagtttttccacagatggggttgggggtggggggtggcggatgcagggaagatggtttctgcatgattcaagtgcattacatgtattgtgtactttatttctattattattacattgtaatatgtaatgaaataattatcaactcaccataatgtagaatcagtgggagccctgagcttgttttcctgcaactagatggtcccatctgggggtgatgggagatagtgacacccaaagtgggttgcttatgtccagtctcctccgtaatcttgttttggttgctgtcgctgcagaaaaccctgcttcacagggataggatgttggaaatagaagcaggcttttcagtgctttgtggcagtctccggatattccgccttgattttaatccagaacgtatggagatttgaagttgtcacaaatatatttttaaggccaccagatgcagcttaattggcacttgccactcagcgatagggtttttctttagacaaggtctggctctgtcagccaggctggagtatagtggtgtgatcttggctcactacaacctccacctcccaggctcaagcaatcatcccattttagcctcctgagtagctgggactataggcacgtgccaccatgcctggctaattttttttttttttttttttgagacagagtcttgctctgtcgcccacactggagtgcagtggtgccatctcggctcactgcaacctccgcctctcaggttcaagcgattctgccacctcagcctcctgagtagctgagactataagtgcccaccaccacgtctggctaatttttgtattttctgccacctcagcctcctgagtagctgagactacaggcgcccaccaccatgcctggctaatttttgtattttcagtagagatggggtttcaccatgttggccaggctggtatcaaactcctgacctcaggtgatccacccacctcggcctcccaaagtgctaggattacaggcgtgagccaccatgcctggcataatttttgtatttttttttgtagagatgagatttcactttgttgcccagactgctcttgaactcctgagctcaagcagtctgcccacttcagcctcccaaagtgctgggattacaggcgtgagccaccactcctggccactgatagagttttgatatgagtctgcaagcaattgatgtattatgatctctgtgcagtcagacctctctgctaatgttaatctctatttgcagccactccccagcactagcatcactgcctcagctccacctcagatcagcaggcattagattctaataaggagtgaacaatctagatctcttgcatgtgcagttcacaataggggttgtgctcctatgagaatctaatgccgctgctgatcttacaggaggtggagctcaggcagtaatgcgtgccatggggagcagctgtaaatacagatgaagctttgcttacttgcccaccacttatctcctgttgtgtggcccggttcctaacaggccacggacttgtaccggttcgtggcctgaaggctggggatcctggtctgcactgcataacgtcttatacttttctcacttacaaatgacaatggcaatgtgatatgctgccggagccaggcgtcaggaggcacgttcccactgattcggggagctcatccaggaggggaagtgcttctcctttggtctttccccatggctgagagacaccccctactccccggccatgccctcgtcctctctgggcttcaggtttctcacttatacgttgaatgggggctgtagtgacttcctgttgctgctgtaacaaactaccacacatgtagtgccttaacacagatcttgccgtttcagaggtcagcagccaaacatgggtctcactgggctgaagtgagggtgtggcagggctgcattccttcccaggggctccaggagagaagccattttctggccttttccagcttccagagactgcccacattccttggcttgtggccccttcacttatctccttctctggccctgaccctgaccctgacccttctgcctccctcttaaaaagaccctctgatcacactaggcccacccaggtcatccggggttatctcccatctccgtattctgaaccacatcggcagagtcccttttgccctgtaaggtagtatcttctcaggtttgggagatcaggacgtggacatctgtgggggaccttatgctgcctgctgtggtggtgcactcatcatctccagagccccctcacctctgcagcagccagtcagcctctgtcctccctcagggttgtgggagcccctgccttccttttatatatccttttttaatatttatttttatttttaagacatcatgcctaagcccctgccttcctgccagatctggcctcttcagggggagaagtgcaggagatgaccacttcagtctggaagccttcctctctggctgtcaaattctattcaacttcttaggattcaagtttaaaaaaaggcgagaacactctaattgtttccttcctagaatcatgtgtcttttgccccatagcccctcaaagtataaagacgtacaggacatcatcgcttcctccaaaaagttgaagatccagataggggaagatgtgggtgcccacacaaagtcaagactgtttacttccaggcagttatcagctgtgtcatcctgggcaagtaacttaacctcttaggctcaatttctttacctgttaagtgcaaatagtaggaccttccttttctcccaagggttgtgataagaataaaatcaggaagccgaggcaggaggattgcttgaggctagcctgggcagcatagtgagaccctgtctctaccaaaaaaaaaaaaatctgctgagtgtggtggcacatgcctgtagtcctagctacttgggaggctgaggtgggagaactcttgagcccaggagttcgaggcttcagtgagctatgatcactgcactccagcccggacaacagagcaagaccctgtctcttaaaaaaaaaaaaaggaataaaaattggagaatatattgaaacacaagggttgattggaatagtatgagacaccttgagtgataccgaagccatcataggacttgattaaatgtgacacaaaattattacagggtcagggcttgctgtcgtttatgtgggtggggctactctgcagacgaggacctcaggctttgaaggcccctcatcattatcatctccaaacttcatgttctagaaccttgaaggaattgggtggctggtttgttgagagcagggtgagcgtacaaatggaggctccccgcctgcgtgtggggggccgtgtgcgcatgcaggcggatgctgcacctgcatttctaagtgccggccaccattttccctgcaggcagccactgcctggtcacaccttgggtctaggaatgtgtaacccccactgcacagtcatcctgaggatgatgggcccaggaagagacctgcataggcccctggaagcaggctcagggccatttaggtggggaaattggggtcccaaaggcatctgcagcccaggtaggcaggtttccttacacaagtggactcccagatctgtggggagggaactgctggaggagggccagagtgatgcccctgaagggccaagctgagggcagggccctgattgcccaggtctgaagggctatggagatattctagtcaggtgtgacagcagaggtgggcaggggatggggaactaactgggtatcgtcttggacctgtgaggccagatttaaggcatagagtaacaggagccacctgttaccgtgtcctacataaattatagcaagaggagtattttcttttcctctgccagttttcatgaaagacagagcaagccgtattcctttttccttgttctttctgtttgcctagcaggcagcactccacttgctccgccttacattcagtggtgtgctgggaaatgcataacaactggttctggaggtggggtgaggtgggaggctctgagttgtagcattttcaggtgtccaggaagtaaatatccccaccatggccaatttcatcctgtttaagtgatgtcactgaacgttgtccccaagctttagcattctgctttacattctcattttaatcctcaagcaactctgaattagttgctgttatcccagacttacaggcaggaagcaggctcagagaagtgaaggtttccaacttagacgtgccaggctgtgcacaggtggggacctctgaggggcctgctctgatctgggttggggctgccccaggacccttggaggagccgccaccagagcaatggtaggtgttgggccagaggttgtttaggtggcgttggtggtgaaggctttttctgtgagcttgttgggttgacgattgtgacatgctgccgggagggtgttgggtagacacatggttgtgatgtggcgatggtgggttagggtacggtagtgtgcgtgatgtgctggctgtctcgggatgcggtgtttgtgctggtgatgcagccagtctcctgtcatggtgtgtggcacaatggatttatttggctgaggaggctgcatggtgttgctgtggtgtttgctgttgtattgctttgctagggctactgtaataaagtaccatagactgggtgacttacaccagagaaatggattttctcacaattctgaaggccagaagtctaaaagcaaggggtgggcagtcagcttactttgaggcctctctccttggcttgtagatgggcatctttcccctgtgagttcacgtggtctttggtctgtgtgtgcctgtgtcctgatctcctcttataagggcaccagtcatattaaattagggcctattgtcgtgacctaattttaacttagttacctctttaaagagcctggctccaaatacagtcacattttgaggtagtgggtttagggcttcatcatatgaattttagggcaatgcaactcagcctctaacaattgtgttttctgtaactgctgactgggtggcggtggtggtgattcctcggtggggtttggtgtgacagtgtttgtgaccttgtgaagatatttgtgtgtgtgtttagtatgatggtatcctatgccagtggt

SEQ ID NO: 10757 - DNA, 6000 bp, Homo sapiens; identical to SEQ ID NO: 2363

SEQ ID NO: 10758 - DNA, 6000 bp, Homo sapiens
ggaaatgcggatgaaagtgcaagagttggtttgtggtcatctggagtccatgtctccaagactgctggaccttcaaattctgcaacttgttagatcatctggatgatagcacaactgttagaagacctagaagaatacagcgttgctatgactcagtggtgttgaatgcagaccatctaccagctggggaaagaatcaattataaacaggtattttaaaactccagaacgtcagaaatgtgtagcagaatgaattctgttataaggaagacaaaacaattcagtctgttttttaatgcagtttaggaatagtgtatacctcctatacttaaaattgtcatttatctttcccaactttaaatactcttttagtttctatagggaaggaagagttattacaggttttttttttttaattattctttaactttagatactgccaatctgatttaaaattctccaagcttaattctgtgcaacaaacagaaccacacaagcagccaggcactgtggctcactcctataatcccagcatttttgaggctagatgggaagatcacttgatctcaggattttgagaaccatccggacaacatagggagacctcatcgctattttaaataattttaaaaagaaaagaaaaaaaaaggccgggtgcggtggctcgcttctgtaatcccagcactttgggaggctgaggcgggcagatcgtgaggtcaggagattgagaccatcctggctgacacagtgaaaccctgtctttactaaaaatacaaaaaagtagctggggccgggcgcggtggctcatgcctgtaatcccagcagtttgggaggccgaggcgggcggatcacaaggtcaggatatccagaccatcttggctaacatggtgaaaccccgtctgtactaaaaatacaaaaaattagccgggcgtggtggcgggcgcctatagtcccagctacttgggaggctgaggcaggagaatggcgtgaacccaggaggcggagcttgcagtgagccaagatcgcgccactgcactccagcctgggcgacagagcaagactccatctcaaaaaaaaaaaaaaaaaaaattagctgggcgtagtggcgggtgcctgtagtcccagctacttgagaggctgaggcaggagaatggcgtgaacccaggagacggagcttgtagtgggcggagatcgcgccattgtactccagcctgggtgacagagcgagactccgtctcaaaaaaaaaaaaaaaaaaagaaaaaaagaaaaaaaaccccacaaccatgttataggaaaagttagtataaatgacatagcataattaatatattcaaaataacttttaaaaagttgtcttgtagcttgaagggatcctaaatatcaaaagcccatcacaaacttacaagccttactgctacgtaaatatccctttgaactagtttctggttctatttaaaaagtcgaaaactgttgaaattaatttacgaataagaacagatacacactttgtggggaggctgaggtggtaggatctcctgagcccaggagttttaagtccagcctgggcaacataacagcaagaccccatctcaaaaaaaaaaaagcatatcttttgtttatttttttaatagacaaagtctcactatgttgcccaggtttatttggaactcctggctttaagtgatcttcctgcctcagcctcccaaagtgttagcattatagatgtgagccacctcgtctgggccagagcatacattttagatttcagattgggtggcgggcagggatagaatatccttgttagttatataaaaataaacttttttttgctttttgcagatttgaaatttaattaagctattaacttcttaatcatcacatcctccaactctgttttaactcccccctccccctcccctttttttttaaggaataaagggattcattcctcattttaactgatgttacagtgaagatgggttcttgaactcttggaagcctggatgagccacctaatctgcaagataaaaaccaaagaccaatgcgtattggggaaaagaatgcttagtactgcaagactgttgaatacctgttgaatattcctattgaggttttttcctaaacatacttcagtaacatcttaggacaattcactggagaaatgttgatccctggctggaatgtcataccattgacccatttgaagagttaaagctggatttgactgctctattctaccaggaatattgttagggtagccttttaccagtttctaaacaattgtaatcatttattgactcagcaattcctcagataacaggtcaaaagatgtacagatacattctgaagttttcttgctattaaaggcacaagagtttccttgtattttgactgacaatgtagcatgtttccattttagtttgttagtgatggtggttttccctttgaaagccatttggtatattcaccataacaattagtttaatatgattacataagaaaactatgataaaacccagcaattttagtagttgtgaaaatacgttttttaaatcatgtttaagaagaattgcaagacttgaaaccaaatcctgatgggggaattctgtttaatcctgtttaatctgtttaatttctgtttaatccttagtttcttaacctgcatagcttatcctgtattgtactttttttcttttttaaactcccaaacaagaagcttgaaacttttcctgtattttaaaattgaaatttggtcacagggtatagtcagatttttattaaggtttggtttgacaacctttaaaagaaaggtttacctcgctaatacttcttaataacatgcatcaaatgatattccctatggtgaagtatattctcaaagttatgttatctttcatttttggcatttggtgcttatggacttagtacccaggcaacaaagatctattatgcacctactctcttgtatgttcgctattatttcccaaaaaaaaaaaggggcatatatgcataagaaataaatattagaattattttgtttctcccacaaagcccatgggagatggcccaacaaatgtttaaaaagtaaaagaagctgggcacggtggctcccacctgtaacccccacactttgggaggccatggcgggtggatcacgaggtcaggagtttgagaccagcctggccaacacagtgaaactgtgtctctactataaatacaaaaattagccaggcatggtggcaggcacctatagtcccagctactcaggaggctgaggcaggagaatcgcttgaacccaggaggcagaggttgcggtgagccaagatcatgccactgccctccagcctgggtgacagagcgagactgtctccaaaaaaaaagaaaaaagaactaaaagaaaaggagcagtttatgattgaagaaaacatgacctgggctgaagaagtgaggattgattggagtgggctagaatgagctatagtttctagctcatttgtaaggaggtagacaaaggagcattggtgcctcagagtgggtgtctggtgagaggaaaaacggtgcttaagagattttcaggctattgctgtgggacaggcatattttctccctttgcctttagctgtagataaagtgtggttatgacctgaggcttcttgtattcaaacttggcctagggcctatgtagaggccctagggtctacttgtggtggaggagggaagtatttgtagaatgtgtaggcttgagaagtaaataaagccaaaaaagcatcacttgcttacatttttaaatgagtcacaaaacaatctttctaatgcggccggtaaagaagttttaaaggtctaaggtttctctacagaaattacatgcttctcaggtctttgtttagtaaaataatacagataattatgctttgaatgcatttattattaaagctaaccgttttaatttgtgtcagaaataatttgtgcctatggtaggattaaaattgtattctttagttaaagcaaagcaatctgtttttcattgatttgataaatatgtgaatgcctaatatgttctgcatatgtaaaaatgcagaaacatgctcatttgaattactaataattattttagtatgctgagaggctttgaattcactgtaccactccttcctagagtcattcaaaacagaaaaaattagttttaagtatagattcatgtttttctgttttaaaaagttgagctaatacttttcacaagagacgaaataacatgagccactataattattggctcagttccacccaatttccatattttgggtgtaatttaaaatttttgacttggaattttaactttttttttgttttgattttttaccaggtttctaagcatgaattgaggaacagaagaagcagagcagatgatcggagcagcatttgtttctccccaaatctagaaattttagttcatatgtacactagccagtggttgtggacaaccatttacttggtgtaaagaacttaatttcagtataaactgactctgggcagcattggtgatgctgtatcctgagttgtagcctctgtaattgtgaatattaactgagatagtgaaacatggtgtccggttttctattgcattttttcaagtggaaaagttaactaaatggttgacacacaaaaattggtggagaaattgtgcatatgccaattttttgttaaaaccttttgttttgaactatactgctttgagatctcatttcagaagaacggcatgaacagtcttcagccacagttgtgatggttgttaaatgctcacaattgtgcattcttagggtttttccatccctggggtttgcaagttgttcacttaaaacattcttaaaatggttggcttcttgtctgcaagccagctgatatggtagcaaccaaagattccagtgtttgagcatatgaaagactctgcctgcttaattgtgctagaaataacagcatctaaagtgaagacttaagaaaaacttagtgactactagattatccttaggactctgcattaactctataatgttcttggtattaaaaaaaaagcatatttgtcacagaaatttagttaacatcttacaactgaacatgtatgtatgttgcttagataaatgtaatcactgtaaacatctatatgatctgggattttgtttttattttgaaatgggagcttttttgtttacaagttcattaaaaactaaaaactgtttctgtaaggaaatgagattttttttaaacaacaaaaaatgccttgctgactcactattaaataaaaatctccccaattttttgatagactacttcaagccatttgttacatggtattcctttgcaagtcaatttaggtttcgtgttataacttttcctctttttttaagaaaaatgaaaaaagtaattcttttgtctgaaggggaaaggcattctttcatttttttctttttttttttttttttttatgacttgcaggcacaatatctagtactgcaactgccagaacttggtattgtagctgctgcccgctgactagcagctggactgattttgaataaaaatgaaagcattaaagggtttccctacaaaacatttttctttaaaatacttttgaaatggctataagcagttgactttcacccttggagagcatcacactgtgtgaggttcagtgattgttgaccctccccagcccctcctgcttctttaagttatctgtgtgcgtgcgcttcctctcaatcttctttgcacgctcatttctttttctctgacccatgagaaaggaaaacttactgatgataatttttaaatagtgtaatttattcatttatagcatgtcaggataaattaaaagaacatttgtctggaaatgctgccgggagcctattgtgtaaatgtaggtattttgtaaaataaccttgaaattgtaaattgacacgtgtttggtcagattgtgtcaagtttaatttgttttgttttcttttt

SEQ ID NO: 10759 - DNA, 6000 bp, Homo sapiens
gccagatcatttggtggcctcttgttttctatataattaggagtttttcttttctttatgcctttatgattatttttcacattactttagtatcagttttttaaaggccaaaattaatgctttgtgagataaaataccgtatgtgtttatgacatagtagattgttgtaagtgtttggtcttatgtaaaaatggttgacatttttgtatttttctaacacaaattgaattttccttattcaaaatgcttggcaccagaagtgttttggatttctgatttttttacattttggaatatctgcattatattactgtttggaaatccttaatcccaaaatctgaaatccaaaatactccaataagcattttcttggagcataatgttagattttagggcattttggattttagatttttggattaggaatattcaacatgtatatggatagaatacaaacaagtcccaaattttcattttggttttcattgacaagaagtgagagaatatgattaattattctaaattaatctggaaaataacattcagtaatctccaagaaattctgaaaggagcaatgagagaggacttgtccaatcagtatgatggagcagggtggtaccatcattagaatagatcactgaaaacaaaaagtaacaagttcttatatagacctaaatatgtaaaagattttggagtttactacagtggcatttcaaattaatgagaaaggaatggatgattccagtagccagttttgagataaccagctaaacatgtacaaaaaacaaacttcgatctttattttcttattccacaataaatcaaatgtattaatttttaagttaaaattaaaaattagctaaaaattactaaaagaaaatacagctatttgtataatcttgagtggggtagccatgtaataagccatggcactaaaggtgggtactattaagaaaaaaaatggtttgactattttcaatacatacttttataagagaataaagttatttaaaatattaagacaagggacatattagaaaaatgcaatcatgtgactaaggattactatttcgatcaggcagtaggatacgtattctagcagaaaaatgggcaaagaatgtgaacatttcaccaaataattgcaaatgttttcatatacttattgataatgttcagtgctgttagtaaccaacaaaatgccaatttaaaaaatttgggaaatattccctgttcttcccatctctaaattatactcactatggcaagttaatagaaaaatagccacattatacactggtaaattgttgctggagggcagtcttgacagtgtgtcaaagtctttaaaaatgtttttttctgattcagtaattcctagcctaagagaatattaggaaatgtgttccaagtagtttatacaaggatgtcataatgtaaaagcttattcatacaaagcattttataattatggaatatttggaaagggctaaatgcaaatatcatgtcacatacattcagtgtaccccagggtgttcttaggactacctttgggttgtgggattataagagactgagagtttcccattttgttctttgtatttctgtgtttaatgtaatgatcatgcgtaatccccagtgagaagaatttatttagtttttagttttaacttatgatttagttatttggggcagtttacttggccctccaaaaataaagattaaaaaattatcagaacaaatattgttgcagtatgatcttgaacaagtaattatatctcttggattttatgctttcacctatagaccagaacagttaaatattgcgtacctttggaaaagaagttatgtataaacattagcaactgaattgtcacaatactgaattagacattgtttaaagttttcttcatattacacatggcatcacagacgaccagtggagatttatgctgctctttccagatcagccctacagaattagtattcaaaattcacagaacatgtgaatatgtaattatagtcagatgaagtttaagtttgatttaaaatattatctacgagattttagttagacttcttcaaaagttgtgttattatccttatcaacagtgttttttgtttgtttttattttgtggatgccaaatactcaaaattaaatgtattctattccctattttaggtcagttggtggtgtgtactttatgctcctgtgtcatgaaaacaaagcagatttggctgttttcagctcacatgcttcctctgctagcacgactctgccttgttcctttggagacaattgttatcatcaataaatttgctatgatttttactggattggaagttctctattttcttgggtctaatcttttggtaccttataaccttgctaaatctgcatacagagaattggttcaggtaagactgctgacaaccacaaacaggtagataaaattctacataaatgttaagtacattaaagttatagttcatttttatttcacagttatggtaccattcatttttgcagtttcaaaacagctgctattttcagcccaattaggagcatctgaaagattcttgattatgttctattgagaaggcagtaaagtgaagtggttctcttaaagcagatttatctgagatcgaaccctgatgctgctgttcactagctgtgtaaccttgtgataattgcgttactttctgtaaaacggagctaataatgaaagctgtgctttcctcatagagttctgtgagatttaaatgagtttagtaccaggcagacaatgttccatatgtgttagctattgtaatgaagacaaaaataataaagaattgaatacctataagtcaaatcctgctttttccttctgattatagtcctactgtgactatagtttcttccctttgtgtgcctaatttaaacagaaaagttaaatagttctgggttataatatgatagatttcatttagatatagtacttgaattgactttgccaacataacatgctttttgtaaaagtttcttccctacttttttcagcctttgctctaagataaattactcccagatacaaacaatacacatttgggaaataaatgtttctgtttggtttaattgatagtttgtaatatataaaatagattttaacctgacattggtataaaaagagagtgttaaaatgtcactgtcttccacctcttgactgtgtccttaaggtacaggaagctctcagatagaacaaactgataacagctaagtgaagtattctcttgtggccccaggggcagatctttgagaatactttctctaagcttttggccttagcctgattctatcttcgtcttacacagtgattaacttgggcagttttcccaggagtagatcttccagaaaagggattatttctacagtcagtgaagagtggcttcatggggaagcagggcaggaagggttatagttgtattcagggtaataatgacaaatttaagatacatattttttctttgaattcagtcttatgagggttatctttgtttgtaataaataatgaatattcagtaaatacttattgaatattaaatatttattgaataacctcagccttcattttttaatgtcatgtttagttggttgccataagattcatacatcaactagatgtagttgttggaaatataggttataaaatgcgtgaccaggaaagaatcagataagcaagaaatggaaacagacaggtttttttagtggtctgtttcttgaatggaaaggaagaaaaatattctctgcctcgtaatgatgagtttacctgataataattttgcagctagttgggcagtttcctttttcttttaatcttttgtcactggggaaaatagaagttaatagactgggttgtagaaaaagcctttgctttactgatgaaagaattttaaatttagaataatctgcaagtcaatttattttaacttaatacttaaagatgtttataccttattgaaacattctggtatcacattgagagattccagcaagaccagctgactgctagatactggttttgtaagctgtccagcagaattcctgctgtgtcaccagggtctggtccctgacatagtaactctagaaacttggttacacctatgctcttagattgaatcagattctgtgattgatttttcctaatcagtttcataagaagagtgttttataaactggaaaactaatttagtgagttgcagattattaagccttttttttttttaagatatatccttttcctagtgttacttacacttggcaaaccaaatggaaaaacatagcttgataaaaacacagtaggaggaaggggaattgatgtgtatgggagaaaaagacttgctaactatctttgctctgcaaaatttttttccagtgattaagtactcttcttccattgaactgtttctcatttgtgacatttctgaataaaccctgaaagtttttacttttgcattttttttcctagtgcctcaagcagtgttgtatcaattcatgctagtcctgattattttgattagacatgagtgtttaccaagtctcctcaaactaccttttaaggttattttgtactgaatatgaccttattttgaccttatccctgaactattagggcagtttactgtgctattagataagtgtgtgtcaagtgttaataataatgcaaaattagtaagttttaaaaaacatgctatttattaactatataggctaactttaaaggaatttagctgaaacagtcttgcaatcaaagaaaagctatttaatattttacttctgatttgactcaagtgtttaaagtgtttattgatggtgatgcaagaagttttcctatcttacgtttttatttaggtagtggaggtatatggccttctcgccttgggaatgtccctgtggaatcaactggtagtccctgttcttttcatggttttctggctcgtcttatttgctcttcagatttactcctatttcagtactcgagatcagcctgcatcacgtgagaggcttcttttcctttttctgacaaggtaattaataagagcctatgatactatatataaccttagaaagagaaaactttgatctaggaatagtaagttttgcagattacttttatcgttcatgttacacaacttcgtattttgttaagataggattttcattcactggatacctaggtttggcaatgcagggaggtgctaacataataatgtggtttatttggctgcactatggaccagagtgtagcaaatgatttgtggaaaggtacatagcaaatcgtaaaagtattttttcaatttcaagttaaaattattgggtcaatcagaaaaaagtatattataaaaataacatttattgagtatttaaaatgtaccataccattaaacactttgcctcacattaatctttacaacgaccctaagagataggtgcctttattataattaccattttatagctgaagaaactgtaccaggaataacttgccccaggtaacactgccaaaagaagcagaactggcactcagacccacctgagttcgaagcctgtgacttactctctatactttgcctttgtccctgttgacttcagtatcgagaaagagtccggtaattggtgaaatgggtagataatagtactttactgtctaacccaggggtgttcaatctttcggctttcctgggccacattggaagaagaattgtcttgggctatacataaaatacactagcactaacgatagctgatgagctttaaaaaaaaacttgcaaaaaaaaaatctcatagtgttgtaagaaagtttacaaatttttgttgggctgcattcaaagctgtcctgggctgcaggttagtcaagcttggactaacccaaaataattctaagactcggtttttaatatttaggggtttttgttttgttttgtctttttaaatctcatgtcatttaagtcattttcccatttta

SEQ ID NO: 10760 - DNA, 6000 bp, Homo sapiens
ttgaatactgcagtggcttcttaactcttcttgtctctagttttactcctccaacctagcctgcaccgtgacaataagtgcgtttttagcaggtagcaataaaaacttgtcctaaaaaaagaagcagtctaggcaggacagtgctgagatcagactttttttgttgttgttgagatggagtctcactcttatcacccaggctgcagtgcagtggcatgatctctgctcactacaacctccacctccccggttcaagcaattctcctgcctcagcctcccgagtagctgggactacaggcacgtgccaccaggcccagctaattttttgtatttttagtagagacgggtttcaccgtgttagccaggatggtctggaactcctgacctcgtgatctgcctgccttggccttccgaagtactgggattacaggcgtgagccactgcgcctggccgagatcagactcttaaagaaactactctaggcctggccgagatcagactcttaaagaaactactctaggcctggccgagatcagactcttaaagaaactactctaggcttcaggacaaaatccagatcccttagtagcaaggccttccaaactagggctccttgaccctcaggggtttcactccctcctaaggagccctcaaagctatccctaccttacctctgcacctacgctgatccctctgcctggaacgcccttcctttaactacttgacctttacttttcaacccatgaggctggccaccaaaattagaatcttccacaggccaaagcctccactgggtggtgagaatgcaacacttagcagaaacagagcagtccttgtgaggagacacctgagggataagaagaaccagtatacactacaccaccgctgtgaaagcatgaaacaaatgtgacctagacctgagggtcccagaggcttccctgaacaggcaacctaagctgagaccccaagaaagcttagattgaaccgagagggttggggagggatgtgatgggccttccaggcagaacaatgtgtgttctgtgtgggagagaactaatgagtttggaggaagagcggaggcccagtctggccacaaacacaagagtatgggacacgccagaggaagccacacggattttgcagggagacagtaaggattttgctcatcatcttaaagtacgtaaagtacgtgggaaagcctcctgcacagagttttagctggcagtcagcaggccctctggtcctggccacgcacctttccctcagcctcgcctcagcattcaagggaaaacctgccaccgcgcaagccctccagggtctggaatgctggcaggaggggatggatgcctctgctcctggagaaaagggctctggcagggaagcctgaggggctggttccaactgtacaggtcctgtggactcctcagaaaaggaatggtgagatggattttcataggagagcctctccaatttctccttgggacttttttttttttttttttgagacggagtctctctctgtcgcccaggctggagtgcagtggcgccatctcggctcactgcaagctccgcctcccgggttcacgccattctcctgcctcagcctcccgagtagctgggactacaggcgcccgccaccacgccctaattttttgtatttttagtagagacggggtttcaccgtgttagccaggatggtctcgatctcctgacctcgtgatccgcccgcctcggcctcccaaagtgctgggattacaggcgtgagccaccgtgcccggcctctccttgggactcttaccttgtatggaatggaagtggtgcctctggggtcccagacacgggagagaggaagcagcccaggggctgggagaagtggtgagacccagaagaacggtggacccagtcaggaagggtcctgccagcagggcgtgggccagcctcggggtcttccccaaaaggcaggtaggggcctccagcaagcttcccacctccgtgaggctggagaagaggccccctggatgagaaggaagaggccggcaggtccggcgggcgcaggcacaggtagacttctggtgggaaaagcgtgactcagcctcctccagcggctgcaggacgtccccccgctagaaagggccgggctccctttgctgacccagagtcaacccagcgattcctcccggggaggcggggggccccggccccggcccagagcgcatgcctatgccgggagctgggcgaggacagggcacagccacagctgggtgcccaacgggaaaggcggccgttccccctcaagctgcacctgaaggggtccccagggtcgaggccacttctccttcggctcagggttgaccttcagtgaccactgtggcctgcgggcatcccctgggagggacggagggggatggaggaaaactccaaagggaaaggccgaatcctgcagggtctggtcgtcggaaagccaaccatacagtcagccctccctctcctcgggctgccgtcgccatccgggtccacacgggctctaagacaaaaccccaattgcccccaaggccccataggaggggcgctgccagaatcgcctatttttagtgaaagagaaccgggccgggagacggcggcagggggccggagcattcccgaggtctcggtctgggtgtcgcgaggcagggaaagagggcggccccggagcggagcgggaaagggggcggggcagggtggggccggacgtggcaacctcccgcttccgggacagtgacccgcggcgcggcaaggcctttcccttgggcgtgggtggggacctggactccctgtggaacgtttaagaaaaagagaaccgaatgaggtttcgcgaaaggaaaaaaaatgtaactgtgatctagtgctgttgacggccgcgaatggagaaaccccgtgttctcgaggacaaattggaactcctcggcgttttaggtcctcaacccgggaacccctcgcaccgcgaatctcagtccacagcgggaggcgggtgtggtcgttcacctatttgtgcccgagggctcagggaggcgctggcatgacccgagtggggggcagcaagctggttagcgggagggtgaaggcagcggtcttccacgaccaccacaatcacctgggtagggattgagtcccgtattggaaaagcgaaagaacagtcagctgggggtgccaaggaggcaggtgatgtatacaaacctggagccttaggatggtccacaggctgcggaggaccacagccaggacaacgtcccggaaagcccaagggagactgcggcggaaggcaggggaacctgcagaggaccaggagagcaagctgtttcagggagggatcctggccttccctgcacacctgggcgtctacagcctccggcagctctgccaccctccctcgcctgtcttctgcctttacgcaggctttctagcagacattgccaaggttcttctccaggccttcaaggccctaggttaactgcaccctccatttccctgctctgtcctcagcccctccacactccagctcagtacgttggcactaactcttccctccgattgaaatatttttcccccatttgacttccctccacaggaacattattctcccatatacccgcagggctctctccgtgtctctgttccaatgttctcccctcttcgcataccgtaggaagtaaactgcaaataaaacaaaccagggtcccccctctgtcttgttcacagctgtgtccccaagacctaaaataaggcctggcacccaagaggtgctaagtttcacaacatttactctgccttgttcagggcgctttacatttgcttcttcactttccacaccaccatgtaatgtagatactaatattatttccaatctcatttcacagatgagaaacgaaagttgatagatgtcacaaatagaaaagtatatacttaggtataatgccccctttattttgcatagatgttggtggctgctatcatcctgatctgtgcccctgtttaaaactacttgaatagacatggtgccaacactgtctcttatagtcagagatgggtgagaatgggagccattacttatttaaattcctgcggtcgagcggaaggcagaaggacagttaggtatccgtgttccaccgcttccctgtctgggcacgtccttcagggcacagttggacccccagacccctgggcttttgtgtacgctggctgggcccagagagagctttccactagatgtccccagaagtcagaaccttaaggtcctcctttgggcatttccgtttctgcgagagcttcccgtgttctggcctaggcaggaacggattggcagtctagcaacacacagggcaatttttactttattattttattgtatgtatgtatttatttatttgagtcggagtctcgctctgctgcccaggctggagtgcagtggcgcgatctcggttcactgcaacctccgcctctcaggttcaagggattctcctgcctcagcctcccgagtaactgggattacaggcaccccccaccacgcctggctaattttaattttttttatttatttatttggaaagaggttgcatcatgttggccaggctagtcttgaactcctgaccttaagtgatccacccgcctcggcctctcaaagtggtaggattacaggcatgagccaccgcgcccgggaaaaagagaccaattcttagttcatccagagtaaccctctcctgccttagtccagcctggactaagtccttccggagttggtgtgcatcagaacaaaaacctcgtgaggggagaacaccctccggaagcacagttttaaagtttatttttaacattttaatactctactttttaaattgcccatcgttacccacgatagtgaaatgaaaattaagctcccctggggttgccccgtcaaccctccccgcaccaagtggaacaggcggagctcgagctatgccacataggggcggggaagcagcccggcggtcctcatgggaatgtgccgtacacttcacctctttcgcttctcgctctacatcatccctgagaagcctttttaaacacttgaatgtgcttgtttcagagtgtatttgtaaagtgcagtcagattttgttgtacggaagacgggactgtgatgccttgcaatttccctctgccttttgcattacatggcgccgccatcttgagcagaaatgtatcatggggctcgccattttgcatggtcgagcgggtatttccggttccggcggggggcttttctctctctctttcactgcaaggcggcggcaggagaggttgtggtgctagtttctctaagccatccagtgccatcctcgtcgctgcagcgacacacgctctcgccgccgccatgactgagcagatgacccttcgtggcaccctcaagggccacaacggctgggtaacccagatcgctactaccccgcagttcccggacatgatcctctccgcctctcgaggtacggactaaggtagatttcaggacccgagattgcagggctgggggattccgcgtgtcgtgtagggaattccgcgtgtggtgtggcaggccggtggcgcgcgagttggcggggactgacagacttctctgccccattgtgaattggggcgtgcggacccgagcctaggcctcaacccgggcgaaccacattgcagatgagaacctacgtgtacatcagctcgcagctgctaggagggttggagagttggaaacttttaaaatatcttttgccttctccttcgtagtgtggccgggggcctacgggccgggcggggcggtgatgaccccaacatgccatctgagtgtcggtgctgaaatccagaggctgtttctgagctgccgcccggcccaaggctcgtggggaggcaggtggactccagaggacctcgtggctcaagtgtcggcctactttttctgcccctggttctccccgtccctatccctgtgttcctgactgcgtttagac

SEQ ID NO: 10761 - DNA, 6000 bp, Homo sapiens; identical to SEQ ID NO: 1132

SEQ ID NO: 10762 - DNA, 6000 bp, Homo sapiens
atctataaaagtgaagggtgcagactcatttctaagtctccttctagctttaaaattctgaggtgggcggatcacgaggtcaggagttcgagaccagcctggccaacatggtgaaactccgtctctactaaaaatacaaaaattagccaagcttggtgtcgtgcgcctgtaatctcagctacttgggaggctgaaacaggagactcgcttgaacccgggcaaagttcagtgagccaagatcatgccactgcactccagcctgggtgacagagcaagactccatcttggaaaaaagaatctatattttatgatgttacaaaatattctctgattttgaacactaataccagtactctgggtaaacctgtgtgctcaagcaggtgccctattatactttctggaatttaaaaataaactttttattttggaataaatttagatttatagaaaagttgttagccagacatggtggctcacacctgtaatcccagcactttgggaggctgaggcaggtggatcatgaggtcaggagtttgagaccagcctggccaacatagtgaaatcccatctctactaaaaatacaaaaattagctgggcatggtggtgtgcacctgtagtcccagctacttgagaggctgaggcaggagaatcacttgaacccgggaggtggaggttgtggtgagccgagatcatgccactgcactccagcctgggcaacagaaaaaaaaaaaaaaataaaaataaataaataaataaataaataaataaataaataaataaaaagaaaagaaaagttgcaaagatagggctgggcgcagtggctcacacctgtaatcccagcactttgggaagccaaggccgatggattacttgaagaccagcctggccaccatggtgaaaccctgtctctactaaaaatacaaaaattaggtgggcgtggtggtgcactcctgtaatcccagctattctggaggctgagacaggagaatcacttgaacccaggaggcggaagttgcagtgagccaagatcgcaccactacactccagcctgggtgacacagcaagactctgtcccccgccaaaaaaagttgcaaagataatgcagagttcctgaataccccttactgttttccccattggcaacattttatattattatggtacatttgtcaaaactaaaaaccagatcatgaatggtacattactattagccaaactctaggcttctatttggatttcaccagtttttccattaatgtcctttttctgttccaggatccaatgcaagctaccatattacattgagtcatcatatctttccaatctcctctggtctgtgacagtttctcagtctttccttggttttcatgaccctgatggttttgaagagtgttgactagatattctgtaaaatgtcctcaaacttgggtttttctgatgttttcctcattactagactgggcttgtgggtttttggaaagaaaccacaaagatgaaatacctttcttgtcacattatatcagggattggttatatctatataacatcactggtgatgctaactttcattaattggttaaggtagtgtttgccaggtttctccactgtaaaatacgctttttgtctttcccaactctgttctttggaagtgagtcatcaagtctagcataccctgaaggtgggagaagagagggaattaaacttcattcacttcttaaagatagcagtatctacagatcacttagaatttttctataaggaaaattagtctcttcttccacatttatttatgcaatcatttattaatattaatatgaagtaatgtatatttattttatactttgaattataatccagtatacattattcacttttttgctcaaattgttctggctttggctggaagttctttcagattggttcctgtgtccctttgacatgctctatccttttgctttttcaacatttccttactatctggtactacaagatactccaggcacattttgtattttcgttgcccaagtcctgaaatcaaccttttctccaaaaagctctgggttttaaaacaaattacaatttatctgttttggtttttataagcattgccatgatgaccatccttgatgttatatctctggaaaactccatgattatttcttttagataaatatctaaaagtggaattcccggattaaaggcatctaaaatgcttttactatgttttccactaacaaggtgtgagatgggggggctgcctcaggggctgcaactcaaagcccacttcaaatgggaaacactatccatccgtcaatccatttatctatcttagaactctctttctatgactttcttattttcaaaacaaacaaggaataaagaaagaaaaaaatgaaacaagtaaacaaaagacctctcatctagactctctaaccacccaacaaatcacattgctcctcctaggaggaaatggttgaggtgtcagactgagaatgacatctatttcccttcatggggagagcacttgttaattcacctattaattcacttttaaaatataattttacattttatcaaagtaatacatatacatagtttaaacattcaagtggcactctaagacttaccacgaataacagcaatacagtgctatatcccttcccattgccaaactttcttcacagaaaaaatcactttcatttcttttagctttttttttttctggggtttatttccatatctataaagaacatgtttatactgcaatttaatttttttttcaattttagacattatctattgacttcttactaactatggaagataaagactgaagtctcttaccaattctatacacaaacacacacatatgtgcatcctttcctaaccccattctttcaatatagttataacttttgttaaatccattaatgttttcattgttgtgactctatagttattcatagctgagccacatattggactttaaatatattttcttatataacattttctttttcctggaattaataattatgccattttttggtttccttaacttactgagccgattactcatccttctccaaactttctaagagtgctgcaaaacttttcaagtttcaacatctgtcagatccattgggtcccctccatgtattttttcattggaaatatccctccttgagcctggcgtctgccactcacttgggctagttgctctccaagcctgttgtactcttatcatcttgggatctcccttggccaccattcttggaattctctctcttctatttgaaatttgctgtttttgggagcccatttttcctttttgttttggcttatgctcttgtttttgtagtcacttttttcaataacatctcgaaaatggtcacatgggagataaagttcttgaaacttggcatgttggaaaatgcagtttcaagaacgttgttttacctttctttctgatggatcatttggatgggtagagcatcctaggtgagaaataattttccaatagagttataaaggaattgatccattgctttctaacttctggttttgttattaagtctaaagccattctcatccttgatcctttgtatgtgacttatttttttcctatctggaaacattttttttctgtttattcttgatattctgaaacttcactgttttgtacttcagtgtagatttattttcatttattatgctgtttacagtgggccctttcaatctggaaacaaatgttcctcaattcttgggaattttattgtatcacttctctcattatttctttccctccattcctctgttctgtgcttctgtactgctggtagtcagatgttggctattcttcatctctttgtcttttcttctatcttctggaagatttcctcaactttattttctagtctttagacttcagctctcatattttgaatctccaagagttcttgttctctaattatgcctttatcatagcatcctattcatattttgtgggtacaacattttttcttattttctatgaaggtttaactaatatttcttttaaaaaatattctgctttctgcattgcctttctttcaagttttttccccccatctgctgttgggatgggagaaatttaatgaatttggctttgtggggttaggattaggtagtctatttctttttcagattttcaaccaatcttatgatttttgtttcagaggtatagtcaattctcattattccttcattattcctggcaattatgttcaataaaatcgccacaaacactgaattagaaaatactgctgagcgtggtggctcatgcctgtaatcccagcactttgggaggccgaggcaggtggatcacctgaggtcaggagtttgagaccagcctgaacaacatggagaaaccccgtctctactaaaaatacaaaatcagctgggcttggtggcgcatgcctgtaatcccagctacatgggaggctggcctgaggcaggagaatcacttcaacccgggaggtggaggttgcggtgagctgagatggcgcaattgcactccagcctaagcaacaagagcgaaactctgtctcagaagaaaaaaaaaaagaaaaaaagaaaatactgaattattctctgtgggggaaatatagagttaggtgcctgtgagcctctggtcacaacatttttgtcagctaatcaatacataaccttgttttgtgtgtgtttctgtttaaagacaccttatttaatatacattgttgattcatcaacattgaactcatggctaataacagtactatgactcatgcctgaatagagcttatttaacacacatattttctccatgaggcacagcctccttctgcttaggaacaccagacagcactccagcactctgcttggggggcattcgaaacagcaaaatcactcataaaaggcaaaaaattgcaaaaaaaaatagtaataaccagcatggcactaaatagaccatgaaaagacatgtgtgtgcagtatgaaaattgagacaggaaggcagagtgtcagcttgttccacctcagctgggaatgtgcatcaggcaactcaagtttttcaccacggcatgtgtctgtgaatgtccgcaaaacattgtgagtattgatttggggggttacaaataattcctagcaagtaggtgaattcacaaataaggaagctgtgagtaatgagggttgattttacctacctagtgtctcaaatcctgagccgtatgagattccgtggcataattatgtttgcttattgttggcaaccttattaggcatttctaggtttctgctttctcatctttaccagttcagttatggcttgattcatttctctttttccaaagatttgttgacatctcttatttgctgttgcctcttcccatttgttttgtcttgtggttctatatctttgccataatttttgtggagtttcctgagagagtagagataaatgtatatgctcaattggtcttgtcttaaccagaattctatttaatacacaacacctttagtgagctgttatgcatgtaataggtgtttactaagtattggttgaataaattcaagaaatgcttgctatttttgtgctagcatttagcttttctctatagtatattataatggaattttattttattttattttatttattttttgagacagagtttcactcttgtcgccaggttggagtacaatggcacgatcttggctcactgcaacctctgcctcccgggttcaagcgattctcctgcctcagcctcccgagtagctgggattacaggtgcctgccaccatgcctgactaatttttttgtatttttagtagagatggggttttgccatgttggtcaggctggtctcaaactcctgacatcaggtgatccacctgcctcagcctcccaaagtgctgggattacaggcgtgagccaccacgcctggctggaattttaaatatctcataattataatcttcta

SEQ ID NO: 10763 - DNA, 6000 bp, Homo sapiens
ttaagtgatagtatcacaaaaaacatcattttagagttgaaagcattgtccagctttaccaatttggacatgaggaaaccgaggcccacagatagaggttcgctctgtgctacccggccagtatgggcccaaaccgggtctgcccaggagccgcctcctacactccagcccattctatctgccatgccctgctgcctggatttttggaaacttcgtgagcaatgaggctgcttttagtgtccaatcaaaaactcctctgaagtttccagcatgtaataaactaaaaatatgtgaaattagcccccatgggtcacatatagtaaacaaagtcagggcaatgtttatacttttcaggataaggctccaaatcactccatgagctgtgcagtggaaaaaaaagtgggcttctgactcaaatagatctggattggaatctcaactctctcgagtaactcagcttttccaaattgttttccagactgtggaattgggttaatgcctctctcctggggttggtatgagatttaatgaactgataatttctctgctatctatcgcatcaactctagcttttgaggccttatgggagctgtcctcattcagcaggtctgattccttcagtccacccattcctcattagttgtgtgaatcctgtcaggcctttttccttactgacgccatgttcccagccagcagagctacggcctctaggagcctgtaggggctaaaagggacacttgggaagttgccaccctgatgtgggtacattgcttggagggagaaaggtgcctttgtatgaatatgtggcttggtgaatggagcagcctagatttcatcaccactcctccatcttgcctaggtgcctttgcacagtgcacaaaatatgcaaccatacgtcgctgccccaagcagtgccatccactttatctgcactcaagtaggtccttcccgttttatatgcaagttaagtcgacccattcagtatgtttatgcctttaagcttcctgtcaccttatgtttaactgtctatagtttttcctattcatctgcttaattacatttctaaagggtaggggtaaaggctttttctccttttgagctcttcctagcagagaactaggtacagcataataattatctaaatttttctttgataaacttccaactttcaaagaatagtaatacatcaacacatctaatacatccagcaatcctgggaaataaggattctcctcatttacagagggaagctaagatttggaaaaggtagggcacagagtaagctctctagactttgttgatagtttgctgttctattttgttactaaaaagtcttaacttgtcgtttggctttcaatatttttttcttgaatcattgtgttatctttacccaattaatgcttaggcaggtaaagtagatttctgtaggcaaaccaaggtaaaaataagtctatttaacacagggtgcctttgaatgaaacccattataagtgtatttacatatttcagatttcatggatatattcagaaatattaatgtaatataattgaagtctaatattgcaccctcaagcccagagtggaaaataaatgactctttctaccccttgcccttctacacctgtcaaagttaatttttaaccactggcacattgcaaaacattcatcctgaagagcctgattcataaatcttgttttaaatgctctgggcttggttctcaacccagactaaaggcaagcactaaggtagagggaaatgacattcaaagagttttacttgtctctgatttaatttttattggtttaaaatgtggtctgacattagagggttgcttcaaaggtgaaaaatgaaactttgaaaaattacatgtttgtagatgcgtagaactaaacgggcaagccacactaggttttgtcaaacaatagttttatttgtgtcctgagagacacaggtattttggtatgtatgtgtttaggaggggtatatagtcagttttacttttgttttcacagtgcagatgtctctttgtctcaagggacaaagatctgagggagaattgcaggggggactactttattctgctaagcagtggggatgcctttatcagaaacctggtagaatgtgtcagagtttatacatacgtaaacctgggcttatttatatacttaaatggatgttttccttagcataatgtcagttaagaccagtggatatggagcaaataatttgaattaccctaaaaggccctctgttctaagttgtcttaagttaaaattatgaagagaggtattcattttacccttagatgaagattttggttaatttttgttgtctattctttttttcatggtctttgttcataaatgatgtccagaaaaagaagaagttttctaggttgaaagctgcttgtgcaacatttgccacttgatggtgacttgtacatatgaaatatagtattcagtttgtaacttttgaacagtttaaggatcaagagacattttcctaactatatctgctgagaagtgaaacaatgggctgtatttgcctctgaaatgagttttacgaaactttgaggaaagggagaatgatacatattgttttaaagaatccagaaggtaaagttagttttccagtgtgtctaggcctttgaggtcccagagaaatgctgacattaaaataaaagttttcctacaacactagcagcttcgtgaaaactgtacttttgatttactaattagtgagtcatatagatcaagtgacagtaatacaattatgtacattagttggtgtcaaatttggacatacgaaatatacagaaagttgatggttttctcccaaagcaggaattactgattcagttctaccagcagagggctcccttttttaagctaataaagaacatgtgtcttgcagatcactttttaaacactaaaattcaacgggaaaaagattcagctcacactttcctaatataataggacctctttggtagatgattgtacatattgtgagaaatttgtttaaggcaaagtttttccaatctatttcaagactttctatacgttgagagagtactgctttccagtggcttattttcttctgaaacagaaaatatactggtggacttaacagagcattttaatcttagaaggttttgacatgaaacatcatgtgaatccagacaggtatgcttaggagactgatgtttccaatgtttctagctttagaaaggctatttttaaaagtagggcaagattatgcagctcaggatgcaagggtattctctgaactaaccatatgtccctatgatcagatggcagattcacttatagactgttatttccattgggaaagtttttcaatattatatcagttgcactaaaggaaagtttgtaaaatcactttcattgtgggtttaacagcactttccagatatttcaagtaaccctgaagctagttgctgctgttggcctgtgtggactttatgtgaccactggatcactttcccatgcagagtatgagggtattattgaaagaacctatgtcttcaaagggaatgaaatgttttgttttaatttaagcaagctaaaaatagaaaacagaaaaaaccagagttttgttaggggtgtgaaattttttgcatgtggcttaaaagattaacttcagttttgtccatttttttttacgttctctagcaaagggaagtgaggagcagggacaatgggtagagaagggcatttgaaaccatcagaagattgggttctagtcttagggctataatcttctgtaaaccacttcacctccctgggtcagatttcgttttcccctctatggcatgcaggaattgattgaagtgaactctaaattactttctggtgtaaagtttggtgatttccctggataaccttaaagctatctatgctcatgcaactgaaaattttcttagatcaaattttaattaaatagtagtcagtaatcccaagtctggtccattgccactttctcaaataaagggcaaacatccgcttagaaaggtatgcccttctctgcccttctatcctttaccccattagctggcacataaacctaatgcagagacaccttttaattagcaggtcatatggccatttaaatgcgagttgcaatcgacctcataaaaatagccgcagtgttgttttattctgaatcgtcacatgatcatggagtatagtatgcatatggtgtggggtttaatattcgtccgaggatgccctcctactacttactattgaacatttttgtaatctcctccctgcccgagttgctcacaagggctttcctgttacacctgcagggctgtctgtgctggtgtgtgggaggaggtgcaagaggtggacacgagcgaggcgctgtgttctgggttgttccaagaggttcaggcctttacaagtgaggctttgattctattttttgctgaactagctcagccacttcctgtgtttggctgtgcatagtgcctcgcttcactgtcggctacttgagccccgcgagccagccagcgcgctcagcagccagtgagactattttaggtcccctcacaatggccttctcatttcccaggcgaaaatgagcaagttggtcttgcattggccacttgtcagccgatgacaactttgacttgggctcccctccccctcccgaaatccctagctcagcaaatatttgaacctgcccaagttaatcatgaagctgcgatctttatctaagggagacgtgcgagcgcctgggctcctttcctccccgatacagtagcgaaatccagttggcttctcaatgaggagccggcagtgagcggcggtggcccggacgcactgccgggcggggcgtggggcggagggacgagccgagccgagccaagcggagctgggccactgtgcacgcccggagggtcctggcggcgcccccgctcctgcgcgcactctcggcgccggacacgagcactgcctgccgggaacaggctggggggaggtgcgggggcttggcccacttggtggaagaacagctttggggattttttttttttcattgtcggatacaggcatttcaaagggaaaccgttgaaatgcataacctgcaaagtaagttgccttgaatttgtgcacttctctgttccttatctgagcggtgcctttctgtagtttgtcttggagtacgtgtgtgtgcgtgcgcccctgtaagcgctgcctggggaggacagatgggagattaggggagacactccccctgtcctcgagggggacagtggctgggaaagatagggtttaggttggaatttcagtaagaaggtactaattacaacgtgcttggttggaagttggtgccaggccagggcttggagagaccatgggaaaatcacctgtctccctgccttctccctgagttagtttgccacagaagatccaacagccagactggtttgcaccgacggttcccaaatgcatggactggcactctgggctgttacacccgccacagctgctcggagaacttgtctccttgcttcgggggagggtcgacattttaattaaactaaaaaagaatgtttttctgaatcttagggcatacagccacttttaccatttttatttgaatttgagttcaggtaaacttaggcaaatagaaaagtgggagagggtgggaagagacaaggtgagcctgcttttcccaatactgggaaaatgaattaaactagacgggggacgtcagagaacagaatgccttgcctttggtctgctttttaatatattttatgatcccaaattttacagaaagtctcaagggtttctgtgttttttaaatggtcaaatatgtgacatacatgtgtacatagatcacagagccccactgtagttttttaaatgagccacatttaccttggggaagagcccctccccccccgccatcataatattgtgaatgtaaagagagattggttcacaatgagaatgtacagtaggctc

SEQ ID NO: 10764 - DNA, 6000 bp, Homo sapiens
ccaattgcagtggtgaatcttggctgtcttgcaaggatctgagattgtgccactgcactccagcctaggtaacagagtaagactctgtctcaaatgagtgaatgaatgaatgatccaggaagaaaaaggaacattttatttgccagctctggaacttgtaacattgaattaggtagctattcaccattttaaatttacatttttattattctaaatatctttaacaaggacttttaacataggggtctttttaaataagtgttttgctaggcacagtggctcacagttgaggagccacttggtaggctgaaggagggtggatcgcttgagcccgggagttccagaccagtctaggcaacatggtgaaaccccatcgctacaaaaaatgcaaaaattagcctggcatggtgacgcatgcctgtaatctcagcttcttggggatgctggggcaggatgcttgagcccaggaggtcgaggctgcagtgagccaagattgcaccactgcagtccagcttgggtgacagagtgagaccctgtctcaacaacaacaaaaataagtaaaataataaaaaataagttaaataaacgttttaagtaagtaaaataagtgttttatgtttctggtttgttagggctctctaatctgttgaaaactaggggtaaataaacagggcaggtaaacattttcaatagaacctcattaatctataagaaaaagtaagaaatattctccttaccctaaactagtgctggaaaagaaaggttatcaacaattagtacattaaggaacagggaaacatgcagacagattggagcaatccaaaatagcagctgtccaacaatacaggaatacagaagacagtttgaatcacactcattttttctgaaattttcaacttcatagaaaggcaattgagtttagaatagagaggtatttgtgtcatgatgaataaccatgatctcatccataaaaagaaggccatatggtctttcagacaagaaagaattgtatacctgaaattaagtacaaagcagtatacaaataaatagttgagggaagaaatcagtgagagttaaaatagtaattataaagtggtgagattgttttcagtctcattgtcatactgtttaccattaacacgggccataaatgtatataaatgttgagttttagaaagatgtataatatgtattattttacatcttttaacatatgtatatgtttcaagtggtcacccaatttatatcggtgcaatcaataaaaaatgttgcaagcatttccattctatccttcctaactccaggacatgagaaatttctcataaggttgtagaaagagattgtaactttaactctacaatcataaggttgtagaaagagactgcctcctttaactttaccactctccacattggcatttactctaggagaggagatatagaggtttgtgctcttttaatattttgtatttccacattgctgattggggaaatccttttggtgactgatacctagagccttgaaaatgtttatacattgttgagaatctttcctaaggagctaaatggaaaaattctatgcccacagatgtacttagcagtattattaataatagagaaaaattagaatacatccaaatgttcaattataaagaacaagttaatgatgtatatactaggtagaatatcatgcaaccatttagaaacttctgaaggctgggcatggtggctcacacctgtaatcccagcactgtgggagaccaaggaggccaaggggggcagatctcttgagctcgggaatttgagaccatccttggcaatctgacaaaaccctgtctctactaaaaaatacaaaaaattagctgggcgtggtagctcgtgtctgtagtcccagctactcaggaagctgaggttggaggatcgcttgaagcctgggaggtggaggttgcagtaagctgagattacactactgcactccagcctgggagacagattgagaccctgtctttaaaaaaaaaaaaagttcacgaagaggcgcgactttgataaaatgacaggttttaacaagtgggctatgtaagttatttaagaacatagtactgtataggaaaagcactatatgggaagaacatatgtatttcttctactaatattgtacataatagggtaggtagggtcatgaaattttatttaaatttatgaggagaccaagccatcattttagctctcatatcttcctatgaaatggtaaaatatcccgcccaaaaatatctttttgcttatacttaaatgcatttatttttctatcttgaaatgtttgtttttaactttgttttaacccttgaacctataggggtttcctgcagaatttgcgatgtacttaaactattgtcgtgggctacgctttgaggaagccccagattacatgtatctgaggcagctattccgcattcttttcaggtcagtttttaaggtattttaagattataaactctgtgagggaaattggttaaatttacctaacaaattcattctgataaatactaaagtaaagcagatctagctaacatgaataaaaggtttcagaaactgatttatttgggactaatttggcatttttctatttgtagtgtaaataggtgattttagtttggagtggatagagagttgaatcatactcaaagtagaatgtaacttttccagaatagttataattcatattagatataagtggctgtcagtgccttctggaactctccaactttgtacagtaccaaataaaaagcaattaaaatatcacatagtcatggagtctgatcaagtggtagcagtcctaaactagggtagggttccttaggcacaacccagaactggtcttgaaaaaggggggggaatagattacatgtggctcaaactcttagttggaagagagtaagaattgaggtaatccgcccaggtacggtggctcacgcctgtaatcccagcactttgggaggccgaggcgggcagatcgcttgaggtcaggagttagagaccagcctgcccgacatggtgaagccccatctttactaaaaatacaaaaattagccgggtgaggtggtgctcacctttaatcccagcgactcgggaggctgaggcaggagaatctcttgaacctgggaagcggaggttgcagtcagctgagatccccccagtgcactccaacctgggtgacaatgaggctctgtctcaaaagagaaaaacaaagaattcaagtaatctgccaggtgcaatggctcacacctataatcctagcactttgggaggccgatgggggtggatcacctgaggccaggagctcgagaccagcctggccaacatggtgaaaccccgtctctgctacaaatacaaaaattagctgggtatggtggcaggcgcctgtaatcccagctactcaggaggccgaggcaggagaattgcttgaacctgcgagacggaggttgcagtgagccgagattgcaccactgcactccagcctgggcaacaagagcaaaacatggtctcaaaaaaaaaaagagagaattcaggtaatcttttaaccccagaaaagtgtcttccccaggtaccagtcagacatcttattcccaaacttccagttgaatatttactcttacttgtttttaggaagtacctcctcttatgagtattcccctagataactgacagcttgatttcatgtttcagttttcatgctgcctttttcatctataataagaaatattttagaagctgccacacttgaggaaatattcgttgtgtaaagaaatgctgtcactgtcttaaaaagttagtaggttatataactggactctgttattaaaggattaacataaaatattttatgtgttccaggaccctgaaccatcaatatgactacacatttgattggacaatgttaaagcagaaagcagcacagcaggcagcctcttccagtgggcagggtcagcaggcccaaacccccacaggcaagcaaactgacaaaaccaagagtaacatgaaaggttagtagccaagaaccaagtgacgttacagggaaaaaattgaatacaaaattgggtaattcatttctaacagtgttagatcaaggaggtggttttaaaatacataaaaatttggctctgcgttaaaaaaaaaaagacgtccttggaaaatttgactactaactttaaacccaaatgtccttgttcatatatatgtatatgtatttgtatatacatatatgtgtgtatatttatatcatttctcttgggattttgggtcatttttttaacaactgcatcttttttactcattcattaaccccctttccaaaaatttggtgttgggaatataatataatcaatcaatccaaaatcctagacctaacacttgttgatttctaataatgaatttggttagccatattttgactttatttcagactaacaatgttaagattttttattttgcatgttaatgctttagcatttaaaatggaaaattgtgaacatgttgtaatttcaagaggtgagtttggcattacccccaaagtgtctatcttctcagttgcagagcatctcattttctctcttaaatgctcaaataaatgcaaagctcagcacatcttttctagtcacaaaaataattcttttatttgcagtttacgtatgatcttaatttcaaaacgatttctttgtttttggcttgatttttcacaatgttgcaaatatcaggctcccagggtttaatgtggaattgaagtctgcagccaggccttgcaaattgaaggtaactggggcaaatgccattgaaaccgctagtcttatttcctttctacttttctttggcactcttactgcctgtaaggagtagaactgttagggcacactgttgctatacagtttaactcccattttcatgttttgtctttcttttcccatttctggggcttacctcctgatacctgcttactttctggaagtagtgggcaagtaagatttggctcttggtttctaatttttaaatttctgaatactgccctagtctgaacttggcctttatagattaatctttgcttcacatttttagtgttgtatttaaactattttataatttaaaaatagattctaatctgaagatacttttcaagaaatattattaactgatgtcatcctcatcccagcagctcatctgttaggaatgaagttgagatgcttctattccatgtttttgtatttgggaaggattcaaagttgaaggtttattgtcgttgggtttttcagatggtgacatgtaaactcaggatagcaaaccctaatgttcacacagtgctctgcctctgcatctcagttgggatagttgctccttttgagtgttttaatcatcgtataactaatcatagtgccaagaagttcataatgtgttatgtagctaatgtcactgaaaaacagtcctaccattttaggtaagaccaaacagagtctctaacccaaggacttgttacacctgacaacctatagtatatttgctttttctcacaaaatgaaaccaattttgccgaaagctagctgggataataggatcatcacaagttgcagtttctataactaaaattagattgaaatctcttctgacctagaacattttacttcaggcattcagcagatttcagaaagaattaccttattttaagttagtttctttgttagtttactgtgtgtctcttattcaataaacaagcagaatttgtgtcctgccctatccatgtcttaaagatgagaagttggatccactgagttagtttcattggggcgggggaaagaactgtaattaaacttgtttaatccttattttgtattgtagctattttttgtaaaagcaacttaaaatcttttaaaaattttatagtgacattagagacaatggtcatacaaattatcacataaacatggacttgaaaaattaggcttttcataaaacacat

SEQ ID NO: 10765 - DNA, 6000 bp, Homo sapiens
tgggtgtcgcgaggcagggaaagagggcggccccggagcggagcgggaaagggggcggggcagggtggggccggacgtggcaacctcccgcttccgggacagtgacccgcggcgcggcaaggcctttcccttgggcgtgggtggggacctggactccctgtggaacgtttaagaaaaagagaaccgaatgaggtttcgcgaaaggaaaaaaaatgtaactgtgatctagtgctgttgacggccgcgaatggagaaaccccgtgttctcgaggacaaattggaactcctcggcgttttaggtcctcaacccgggaacccctcgcaccgcgaatctcagtccacagcgggaggcgggtgtggtcgttcacctatttgtgcccgagggctcagggaggcgctggcatgacccgagtggggggcagcaagctggttagcgggagggtgaaggcagcggtcttccacgaccaccacaatcacctgggtagggattgagtcccgtattggaaaagcgaaagaacagtcagctgggggtgccaaggaggcaggtgatgtatacaaacctggagccttaggatggtccacaggctgcggaggaccacagccaggacaacgtcccggaaagcccaagggagactgcggcggaaggcaggggaacctgcagaggaccaggagagcaagctgtttcagggagggatcctggccttccctgcacacctgggcgtctacagcctccggcagctctgccaccctccctcgcctgtcttctgcctttacgcaggctttctagcagacattgccaaggttcttctccaggccttcaaggccctaggttaactgcaccctccatttccctgctctgtcctcagcccctccacactccagctcagtacgttggcactaactcttccctccgattgaaatatttttcccccatttgacttccctccacaggaacattattctcccatatacccgcagggctctctccgtgtctctgttccaatgttctcccctcttcgcataccgtaggaagtaaactgcaaataaaacaaaccagggtcccccctctgtcttgttcacagctgtgtccccaagacctaaaataaggcctggcacccaagaggtgctaagtttcacaacatttactctgccttgttcagggcgctttacatttgcttcttcactttccacaccaccatgtaatgtagatactaatattatttccaatctcatttcacagatgagaaacgaaagttgatagatgtcacaaatagaaaagtatatacttaggtataatgccccctttattttgcatagatgttggtggctgctatcatcctgatctgtgcccctgtttaaaactacttgaatagacatggtgccaacactgtctcttatagtcagagatgggtgagaatgggagccattacttatttaaattcctgcggtcgagcggaaggcagaaggacagttaggtatccgtgttccaccgcttccctgtctgggcacgtccttcagggcacagttggacccccagacccctgggcttttgtgtacgctggctgggcccagagagagctttccactagatgtccccagaagtcagaaccttaaggtcctcctttgggcatttccgtttctgcgagagcttcccgtgttctggcctaggcaggaacggattggcagtctagcaacacacagggcaatttttactttattattttattgtatgtatgtatttatttatttgagtcggagtctcgctctgctgcccaggctggagtgcagtggcgcgatctcggttcactgcaacctccgcctctcaggttcaagggattctcctgcctcagcctcccgagtaactgggattacaggcaccccccaccacgcctggctaattttaattttttttatttatttatttggaaagaggttgcatcatgttggccaggctagtcttgaactcctgaccttaagtgatccacccgcctcggcctctcaaagtggtaggattacaggcatgagccaccgcgcccgggaaaaagagaccaattcttagttcatccagagtaaccctctcctgccttagtccagcctggactaagtccttccggagttggtgtgcatcagaacaaaaacctcgtgaggggagaacaccctccggaagcacagttttaaagtttatttttaacattttaatactctactttttaaattgcccatcgttacccacgatagtgaaatgaaaattaagctcccctggggttgccccgtcaaccctccccgcaccaagtggaacaggcggagctcgagctatgccacataggggcggggaagcagcccggcggtcctcatgggaatgtgccgtacacttcacctctttcgcttctcgctctacatcatccctgagaagcctttttaaacacttgaatgtgcttgtttcagagtgtatttgtaaagtgcagtcagattttgttgtacggaagacgggactgtgatgccttgcaatttccctctgccttttgcattacatggcgccgccatcttgagcagaaatgtatcatggggctcgccattttgcatggtcgagcgggtatttccggttccggcggggggcttttctctctctctttcactgcaaggcggcggcaggagaggttgtggtgctagtttctctaagccatccagtgccatcctcgtcgctgcagcgacacacgctctcgccgccgccatgactgagcagatgacccttcgtggcaccctcaagggccacaacggctgggtaacccagatcgctactaccccgcagttcccggacatgatcctctccgcctctcgaggtacggactaaggtagatttcaggacccgagattgcagggctgggggattccgcgtgtcgtgtagggaattccgcgtgtggtgtggcaggccggtggcgcgcgagttggcggggactgacagacttctctgccccattgtgaattggggcgtgcggacccgagcctaggcctcaacccgggcgaaccacattgcagatgagaacctacgtgtacatcagctcgcagctgctaggagggttggagagttggaaacttttaaaatatcttttgccttctccttcgtagtgtggccgggggcctacgggccgggcggggcggtgatgaccccaacatgccatctgagtgtcggtgctgaaatccagaggctgtttctgagctgccgcccggcccaaggctcgtggggaggcaggtggactccagaggacctcgtggctcaagtgtcggcctactttttctgcccctggttctccccgtccctatccctgtgttcctgactgcgtttagacgcttcttgtgcttccgctttgctgctacactgttaagaattgtctgacttttgaatcatgtctggctgttaatcgtaaaatttgttgagtgggacaggtttcagtaaaagcatccaatcctgtagcgcctgaagtggcttttccagcattcattactacatttctgtcggccctcagaggtaggcataggaggccccagctactctacagccacaaactgctgtgcatttggttgcagagaagacacaaagtggctgttgagttcgtctgagtttcaggaaagggtgtctgtatttctggcacctaaattaagttctcaggatacaggctgggcgcggtggctcacgcctataatcccagcactttggaaggcagaggcgagtggatcacttgagatcaggagttagagactagcctggccaatggtgaaaccgcatctctagttaaaaaattagccagacgtgctggcaggtgccagctggccaagtaatcccagctacttgggaggctgaggcgggagaattgcttgaacacgggaggtggagtttggagtgagccgagatcatgccactgcactccagcctgggcgacagagcgagactccatctcaagaaaaaaaaaagttatcagggtacagtttacctctacgtgcgtttttagtctggaatagagccactcagtcctggtctgtaactgctcttgtctgttgtttccatccctccttaagcgtccttagttgttgttaacccactcatgaccttgacacttagtgaattatccagtgtgttaaacgggctgcgggttcctcactgatttttcttctgttttacctcctttagataagaccatcatcatgtggaaactgaccagggatgagaccaactatggaattccacagcgtgctctgcggggtcactcccactttgttagtgatgtggttatctcctcagatggccagtttgccctctcaggctcctgggatggaaccctgcgcctctgggatctcacaacgcaagtagctgctcacttagctctggggccttgggaagaatctgggcagaagtgaggtggatgcaattggctggtttcccaggggagatccagtccatttgggaactggaaagcagagcacacctacagaagatgtttggcctccctcactttaaataagttactcagcattgctgaggagtgtggctgaacatttttgccaggtgcaaaagttctgagtgggcagcagtttgaacatgttttaccttgaaagctcaggtaattggcaggtggaattagagggtcctggtgatgacagatggcattgtcagccaatccccaagtgggagtgaggacatgtcctgcaattctgaagggattctctgtcacttggctcttctctttcatatactcagtcacttgactctgtgatcagagccaaatccagggttgtatgagtgatgcaatgagacagagacaaagcccaggaaatgagtctgaccgttgaatgagagtgtttgctaagtctgagaatgacaaactcctccctctcaggggcaccaccacgaggcgatttgtgggccataccaaggatgtgctgagtgtggccttctcctctgacaaccggcagattgtctctggatctcgagataaaaccatcaagctatggaataccctgggtgtgtgcaaatacactgtccaggtaaagtgagccatctccaaggatctcttccaccctcttaaactttgctttttttttttttttttggcgacagtctcactcttgcccaagctggagtgcagtggcgcagtctcggctcactgcaacctctgcctcccgggctcaagggattctggtgcctcagtctcccgagtagctggtactacaggtgcgcagccaccacgcctagctaattttttgtgttttagtagagacagggtttcaccatgttgcccagggtggtctcaaactcctgggctcaggcgatttgcctgcctcgccctcccaaagtgttgggattacaggcgtgagcccccacctgcctatctttgcctttttttttttttttctcggagacagtttcgcttgttccccaggctgaagtacaatggcgtgatctcggctgaccacaacctccgcctcctgggttcaagcagttctcctgcctcagcctcccaagtagctgggattagaggcatgcgccaccatgcccggttttgtatttttagtagagacagggtttctccatgttggtcaggctggtcttgaactcccaacctcaggtgatctgcccgcctcagcctcccaaagtgctgggattataagcgtgagccaccgtcccccgctttctttgcctttttaaagtcttgtctgggctgggctcacgcctgtaatcctagctctctggtaggccaaggtgggaggactgcttgaggacaggagagcagcctggccaacatagtgagaccccatctatttaaacaaaattttatttattttttttcttttttgagatggattctgggctagatcgcagatttgggatcgcagattgggggctggatcggggatttggggatgggtggggggcggtgaaaaggtgaaagggagttgccgcagctcagaagccgatggttgggtgtctgagaagattacaggcgt

SEQ ID NO: 10766 - DNA, 6000 bp, Homo sapiens
aaattttcttagatcaaattttaattaaatagtagtcagtaatcccaagtctggtccattgccactttctcaaataaagggcaaacatccgcttagaaaggtatgcccttctctgcccttctatcctttaccccattagctggcacataaacctaatgcagagacaccttttaattagcaggtcatatggccatttaaatgcgagttgcaatcgacctcataaaaatagccgcagtgttgttttattctgaatcgtcacatgatcatggagtatagtatgcatatggtgtggggtttaatattcgtccgaggatgccctcctactacttactattgaacatttttgtaatctcctccctgcccgagttgctcacaagggctttcctgttacacctgcagggctgtctgtgctggtgtgtgggaggaggtgcaagaggtggacacgagcgaggcgctgtgttctgggttgttccaagaggttcaggcctttacaagtgaggctttgattctattttttgctgaactagctcagccacttcctgtgtttggctgtgcatagtgcctcgcttcactgtcggctacttgagccccgcgagccagccagcgcgctcagcagccagtgagactattttaggtcccctcacaatggccttctcatttcccaggcgaaaatgagcaagttggtcttgcattggccacttgtcagccgatgacaactttgacttgggctcccctccccctcccgaaatccctagctcagcaaatatttgaacctgcccaagttaatcatgaagctgcgatctttatctaagggagacgtgcgagcgcctgggctcctttcctccccgatacagtagcgaaatccagttggcttctcaatgaggagccggcagtgagcggcggtggcccggacgcactgccgggcggggcgtggggcggagggacgagccgagccgagccaagcggagctgggccactgtgcacgcccggagggtcctggcggcgcccccgctcctgcgcgcactctcggcgccggacacgagcactgcctgccgggaacaggctggggggaggtgcgggggcttggcccacttggtggaagaacagctttggggattttttttttttcattgtcggatacaggcatttcaaagggaaaccgttgaaatgcataacctgcaaagtaagttgccttgaatttgtgcacttctctgttccttatctgagcggtgcctttctgtagtttgtcttggagtacgtgtgtgtgcgtgcgcccctgtaagcgctgcctggggaggacagatgggagattaggggagacactccccctgtcctcgagggggacagtggctgggaaagatagggtttaggttggaatttcagtaagaaggtactaattacaacgtgcttggttggaagttggtgccaggccagggcttggagagaccatgggaaaatcacctgtctccctgccttctccctgagttagtttgccacagaagatccaacagccagactggtttgcaccgacggttcccaaatgcatggactggcactctgggctgttacacccgccacagctgctcggagaacttgtctccttgcttcgggggagggtcgacattttaattaaactaaaaaagaatgtttttctgaatcttagggcatacagccacttttaccatttttatttgaatttgagttcaggtaaacttaggcaaatagaaaagtgggagagggtgggaagagacaaggtgagcctgcttttcccaatactgggaaaatgaattaaactagacgggggacgtcagagaacagaatgccttgcctttggtctgctttttaatatattttatgatcccaaattttacagaaagtctcaagggtttctgtgttttttaaatggtcaaatatgtgacatacatgtgtacatagatcacagagccccactgtagttttttaaatgagccacatttaccttggggaagagcccctccccccccgccatcataatattgtgaatgtaaagagagattggttcacaatgagaatgtacagtaggctcctataagggtgacaggattatatgcagaatgactttgaagagccaaaattgatttatttatgttaagtagtgctaagaaggaatatttgtcccggagtgaggcatttgagatagagggggaaaagcaaaaaaaaaaaaaaaaaaaaaaaaaaagtgattacatcatcttcccgttcaagcagtattagtagcgaagatgggttcatcagtgaaatattttgcaaagataaatatacctccactctgcattctgatctatagcctctttctttttggaagaagcattttctttgcccagtttttttaggcagtcacattaaaattctcattaataatgttgacagacaattacgtttattatttctgctaataggcatctgcattcctattcagaattttcattgttagtctataaagtctagttttaactttggaatgtttggtagaggaggacatctatacattttcttttaactgtcctttctaatgtggtacatttgtgacagtgtttgaattctgggttttcagtgaattatggaggactaaaataccaggagtagtccgtactgcttctcttatacatgagagatatctaaggactataaaacataacttaagtatacccttttaatgcctttgtaagatttttaaaccaaggaatgactgggctatctataaacccagatgcactaagtggggagaaaagctcggagctgcagcatatcagcttttgtcaacctgccaacagcagagcgtaccatgctgcaaggagtaataaacaaggaattagaaaactcgctgctggagaacagtcaaattaaacacctttttgaaaggatgagcatgtatatattgcagttctattaaatgtagcttcttagtgaggttggcattatgttaaggctggtatggaagagaactgatgaagcaggagtggtctggtgacatttttctgacttgattggctggggcgtgtgatgtaataggtttcagtgcagccccttataggttttaaaatgaattccaagacaccattacaaagaaagccggactcttttcttataactgagctcagccaaggaaactcttgcacaaatgtacaatactgtttggaatatggaagacctggatttagaatatgccaagacagatataaattgtggcacagacttgatgttttatatagaaatggacccaccaggtaatactgcagtattattgtagagagttagttaatttcgtggctttttaatttttcgaaagctactgtaaaagatcctttttggatttctgtttttattaatttgtttcattgataaaaattagtttgctcatggcttaaaaattaaacagattgtttgactgtctgtggaagcaagcagctcaggctgtgtgtggtaaatgcttattcttacttgaatggatatgaattgaactccagtttttcactggtgtcttttgttaatcgagatccttccctgggtgagttatgttgtgggatattgtccctgtaattaaaatgatgcatcttttgtgctgcttttctctgttgccagtggatgagaacagtgtagcactttgcagtgataacacttggtactttagaaagcatgtaaaatgtagcagtgattacaactcagttctctaaatgttgagactttgcttgctctctcatattaagatattataatgaaaaaagaagttgactttccattattgttagtctttgtaaaatattcttggtagatacctgaaatcattttttgtataagttaaaatagtaacagtgctttaaaacttatgacagaatttacctaaaaatcctagatttattttgtttcctaagtaagttgttttattccaatgttagctctccccctgcccccatttaaggtattcaggaatactgcagtcttttatttgtcaccaattggtatatatgaatactgatttgacattgaggaagggggatatcatttttaatcagacctagtatatagagcacaatttatccaacagaatattaacatattaaagagatttagggcacagatgagagtttcttaaagtggcttttggcagaacagtgcctgaaatactaagattagagaaacccaattgctcctcttaaaacatactgctgtagatgagcctttttattactgcaacagagtttgtggaggacagagaccaaatttgtctttcgtaattaaataagaggaaattaaagccaactcatgttattcctgctactcatatgttcatagtttcttactttagatggatttgaccaggcatgaaactttaatataactagaatctagaagtacagaatgtcatgactctggatttactttgaaatttattcacatggccagcccaatttatttgttagtttctaaggctctctctcttttctccttttcagtttcatttctttttgagccatgctctgaaagattttttttaagaaaattatcttccatattgcatggaattgtgaactaatgctatatatttcagttactctaactttttatttttttaaagtaaaagtattcatctaaagaaatttagttctaatgtagttgggattgcgaacaactttttctttttcatctgcagcactgcctcctaaaccaccaaaacctactactgtagccaacaacggtatgaataacaatatgtccttacaagatgctgaatggtactggggagatatctcgaggtaaggctacagaaacttcattttcagagagttttagattaaaagaaagaaaagcaccagcttgctaagttccatttttaggatatcatccaacataagcatgaagcatagttggttctcttccaaagacgaccagaaaaagtcactgagcactggagaactgtgggtgctggatgccacaggaaattaaatacccgggaagtttcattattgacagagatgtcagtgaagtgccagagtgaagtggcactgcctaagaacagagtgtgaaggcactctatctattaagcacaactctaagaattcttgccttaaacacaataagaaaacaatgccattttatgttagctttgggaagggggagtaaggttggagaaactcttttgagatcatgagtttctgtgctcatttgtcagagagattgtaatgtttggttgaaaaaataaaaacttagtaccacagatacaccaatagtgaaagtgatatgcacctgtttgtgatgagactgcaattgctaacatttctatttaaacaaattattagctcttattagtgagctctgaaaatgcaattcattaatttaaatctatgtgggcaggaggaatatgggcactcactgtactttccacttgattttgctgtgaacctaaaactgctctaaaaaatagcctattttaaaaaatataaatctgtggtcactaaaccttaagatgagcattgttttgtgttttcatttcagggaagaagtgaatgaaaaacttcgagatacagcagacgggacctttttggtacgagatgcgtctactaaaatgcatggtgattatactcttacactaaggtaagccagggaatatagctgaaattagggttttgggctgatattaaaacatatttccttattccaaaatgttaatacctttatttttatattgtttttacaggaaagggggaaataacaaattaatcaaaatatttcatcgagatgggaaatatggcttctctgacccattaaccttcagttctgtggttgaattaataaaccactaccggaatgaatctctagctcagtataatcccaaattggatgtgaaattactttatccagtatccaaataccaacaggtaataaaaactgaatgaattatccagttacgatgtttagacaagatccttttaatacttagaaaacatttgaagcagatgaatt

SEQ ID NO: 10767 - DNA, 6000 bp, Homo sapiens
ttggcatttactctaggagaggagatatagaggtttgtgctcttttaatattttgtatttccacattgctgattggggaaatccttttggtgactgatacctagagccttgaaaatgtttatacattgttgagaatctttcctaaggagctaaatggaaaaattctatgcccacagatgtacttagcagtattattaataatagagaaaaattagaatacatccaaatgttcaattataaagaacaagttaatgatgtatatactaggtagaatatcatgcaaccatttagaaacttctgaaggctgggcatggtggctcacacctgtaatcccagcactgtgggagaccaaggaggccaaggggggcagatctcttgagctcgggaatttgagaccatccttggcaatctgacaaaaccctgtctctactaaaaaatacaaaaaattagctgggcgtggtagctcgtgtctgtagtcccagctactcaggaagctgaggttggaggatcgcttgaagcctgggaggtggaggttgcagtaagctgagattacactactgcactccagcctgggagacagattgagaccctgtctttaaaaaaaaaaaaagttcacgaagaggcgcgactttgataaaatgacaggttttaacaagtgggctatgtaagttatttaagaacatagtactgtataggaaaagcactatatgggaagaacatatgtatttcttctactaatattgtacataatagggtaggtagggtcatgaaattttatttaaatttatgaggagaccaagccatcattttagctctcatatcttcctatgaaatggtaaaatatcccgcccaaaaatatctttttgcttatacttaaatgcatttatttttctatcttgaaatgtttgtttttaactttgttttaacccttgaacctataggggtttcctgcagaatttgcgatgtacttaaactattgtcgtgggctacgctttgaggaagccccagattacatgtatctgaggcagctattccgcattcttttcaggtcagtttttaaggtattttaagattataaactctgtgagggaaattggttaaatttacctaacaaattcattctgataaatactaaagtaaagcagatctagctaacatgaataaaaggtttcagaaactgatttatttgggactaatttggcatttttctatttgtagtgtaaataggtgattttagtttggagtggatagagagttgaatcatactcaaagtagaatgtaacttttccagaatagttataattcatattagatataagtggctgtcagtgccttctggaactctccaactttgtacagtaccaaataaaaagcaattaaaatatcacatagtcatggagtctgatcaagtggtagcagtcctaaactagggtagggttccttaggcacaacccagaactggtcttgaaaaaggggggggaatagattacatgtggctcaaactcttagttggaagagagtaagaattgaggtaatccgcccaggtacggtggctcacgcctgtaatcccagcactttgggaggccgaggcgggcagatcgcttgaggtcaggagttagagaccagcctgcccgacatggtgaagccccatctttactaaaaatacaaaaattagccgggtgaggtggtgctcacctttaatcccagcgactcgggaggctgaggcaggagaatctcttgaacctgggaagcggaggttgcagtcagctgagatccccccagtgcactccaacctgggtgacaatgaggctctgtctcaaaagagaaaaacaaagaattcaagtaatctgccaggtgcaatggctcacacctataatcctagcactttgggaggccgatgggggtggatcacctgaggccaggagctcgagaccagcctggccaacatggtgaaaccccgtctctgctacaaatacaaaaattagctgggtatggtggcaggcgcctgtaatcccagctactcaggaggccgaggcaggagaattgcttgaacctgcgagacggaggttgcagtgagccgagattgcaccactgcactccagcctgggcaacaagagcaaaacatggtctcaaaaaaaaaaagagagaattcaggtaatcttttaaccccagaaaagtgtcttccccaggtaccagtcagacatcttattcccaaacttccagttgaatatttactcttacttgtttttaggaagtacctcctcttatgagtattcccctagataactgacagcttgatttcatgtttcagttttcatgctgcctttttcatctataataagaaatattttagaagctgccacacttgaggaaatattcgttgtgtaaagaaatgctgtcactgtcttaaaaagttagtaggttatataactggactctgttattaaaggattaacataaaatattttatgtgttccaggaccctgaaccatcaatatgactacacatttgattggacaatgttaaagcagaaagcagcacagcaggcagcctcttccagtgggcagggtcagcaggcccaaacccccacaggcaagcaaactgacaaaaccaagagtaacatgaaaggttagtagccaagaaccaagtgacgttacagggaaaaaattgaatacaaaattgggtaattcatttctaacagtgttagatcaaggaggtggttttaaaatacataaaaatttggctctgcgttaaaaaaaaaaagacgtccttggaaaatttgactactaactttaaacccaaatgtccttgttcatatatatgtatatgtatttgtatatacatatatgtgtgtatatttatatcatttctcttgggattttgggtcatttttttaacaactgcatcttttttactcattcattaaccccctttccaaaaatttggtgttgggaatataatataatcaatcaatccaaaatcctagacctaacacttgttgatttctaataatgaatttggttagccatattttgactttatttcagactaacaatgttaagattttttattttgcatgttaatgctttagcatttaaaatggaaaattgtgaacatgttgtaatttcaagaggtgagtttggcattacccccaaagtgtctatcttctcagttgcagagcatctcattttctctcttaaatgctcaaataaatgcaaagctcagcacatcttttctagtcacaaaaataattcttttatttgcagtttacgtatgatcttaatttcaaaacgatttctttgtttttggcttgatttttcacaatgttgcaaatatcaggctcccagggtttaatgtggaattgaagtctgcagccaggccttgcaaattgaaggtaactggggcaaatgccattgaaaccgctagtcttatttcctttctacttttctttggcactcttactgcctgtaaggagtagaactgttagggcacactgttgctatacagtttaactcccattttcatgttttgtctttcttttcccatttctggggcttacctcctgatacctgcttactttctggaagtagtgggcaagtaagatttggctcttggtttctaatttttaaatttctgaatactgccctagtctgaacttggcctttatagattaatctttgcttcacatttttagtgttgtatttaaactattttataatttaaaaatagattctaatctgaagatacttttcaagaaatattattaactgatgtcatcctcatcccagcagctcatctgttaggaatgaagttgagatgcttctattccatgtttttgtatttgggaaggattcaaagttgaaggtttattgtcgttgggtttttcagatggtgacatgtaaactcaggatagcaaaccctaatgttcacacagtgctctgcctctgcatctcagttgggatagttgctccttttgagtgttttaatcatcgtataactaatcatagtgccaagaagttcataatgtgttatgtagctaatgtcactgaaaaacagtcctaccattttaggtaagaccaaacagagtctctaacccaaggacttgttacacctgacaacctatagtatatttgctttttctcacaaaatgaaaccaattttgccgaaagctagctgggataataggatcatcacaagttgcagtttctataactaaaattagattgaaatctcttctgacctagaacattttacttcaggcattcagcagatttcagaaagaattaccttattttaagttagtttctttgttagtttactgtgtgtctcttattcaataaacaagcagaatttgtgtcctgccctatccatgtcttaaagatgagaagttggatccactgagttagtttcattggggcgggggaaagaactgtaattaaacttgtttaatccttattttgtattgtagctattttttgtaaaagcaacttaaaatcttttaaaaattttatagtgacattagagacaatggtcatacaaattatcacataaacatggacttgaaaaattaggcttttcataaaacacatcacatgtcattgactgctttttagaaatacacttccaaggcagtacatctgtattgctactgaaaagtgccatttcacagaacacagacttctttttgctctttgacatcttgaaaacatctgtttttcttttttaatacaaaactttgtgctcaagacaaatcttacatgaaactctcataaaccatgaaaatgtagctggccttcgggccttaggcatgaaataagcatgaggaacatattcccctaacttctacccccagcccagcaagttatcctttaagaaatctcctaggaattctggagtttgaaaacaattgctctatgttattcctgcttccagtctctaagtaacaagggcatttaaaagcatagtctcttaaggtccactatagtggttctttatttaaggaataactcagctgggtgcagtggctcacgcctgttatcccagcactttgagaggctgaggcaagcagatcacttgaggccaggagttcgagagtctggccaacatggtggaaacccatctctacaaaaaatacaaaaattagccaggtgtggtggcgtgcacctatggtcccagctatttgggaggctgaggcaggagaattgcttgaacctgggaggtggaggttgcagtgagccaagattgtgccgctgcactccagcctgggtgacagagtgagactctgtctcaaaaaaaaaaaaaaaaggaactcatacagctcaatgattcattgatcccaataataaatcgttttaataatgatgaaaacatcctactggggttttcttgttaaaaactttaggacaggcgcagtggctcatgcctgttattccaacacatttgggaggctgaggtgggagaattgcttgaccctaggagttctagacttgcctgggccacatagtaagaccctgtcccagctccctccaacatcgtccccaacccccccccccccaaaaaaaaaaagcgccaggcgcagtagtgagtgcctgtgatcccagctgtgttgggaggctgaggtgggagtatcacctgagccctggaggttgaggctgcaatgagagctgtgatcatgccactgcactccagcctgggcaacagatgagaccctgtgtcacaacaaggaatttttagaaggtgctttttatattactcttcacagagttaaattttcagaggatttagtattattgaactaagtttcataagtgtattttaagcaagtaaatctctaatgtaggaaaatccccaaaatggtagcatttactaatgttttatatggtaatttttgaaaaatatatctgatatttcttcagtaaaaatggtgttgttttaataacttaataagaatgtttaaagattctttaagtctggcttatctagctaatgtgggcctattaa

SEQ ID NO: 10768 - DNA, 6000 bp, Homo sapiens
ccggcagtgagcggcggtggcccggacgcactgccgggcggggcgtggggcggagggacgagccgagccgagccaagcggagctgggccactgtgcacgcccggagggtcctggcggcgcccccgctcctgcgcgcactctcggcgccggacacgagcactgcctgccgggaacaggctggggggaggtgcgggggcttggcccacttggtggaagaacagctttggggattttttttttttcattgtcggatacaggcatttcaaagggaaaccgttgaaatgcataacctgcaaagtaagttgccttgaatttgtgcacttctctgttccttatctgagcggtgcctttctgtagtttgtcttggagtacgtgtgtgtgcgtgcgcccctgtaagcgctgcctggggaggacagatgggagattaggggagacactccccctgtcctcgagggggacagtggctgggaaagatagggtttaggttggaatttcagtaagaaggtactaattacaacgtgcttggttggaagttggtgccaggccagggcttggagagaccatgggaaaatcacctgtctccctgccttctccctgagttagtttgccacagaagatccaacagccagactggtttgcaccgacggttcccaaatgcatggactggcactctgggctgttacacccgccacagctgctcggagaacttgtctccttgcttcgggggagggtcgacattttaattaaactaaaaaagaatgtttttctgaatcttagggcatacagccacttttaccatttttatttgaatttgagttcaggtaaacttaggcaaatagaaaagtgggagagggtgggaagagacaaggtgagcctgcttttcccaatactgggaaaatgaattaaactagacgggggacgtcagagaacagaatgccttgcctttggtctgctttttaatatattttatgatcccaaattttacagaaagtctcaagggtttctgtgttttttaaatggtcaaatatgtgacatacatgtgtacatagatcacagagccccactgtagttttttaaatgagccacatttaccttggggaagagcccctccccccccgccatcataatattgtgaatgtaaagagagattggttcacaatgagaatgtacagtaggctcctataagggtgacaggattatatgcagaatgactttgaagagccaaaattgatttatttatgttaagtagtgctaagaaggaatatttgtcccggagtgaggcatttgagatagagggggaaaagcaaaaaaaaaaaaaaaaaaaaaaaaaaagtgattacatcatcttcccgttcaagcagtattagtagcgaagatgggttcatcagtgaaatattttgcaaagataaatatacctccactctgcattctgatctatagcctctttctttttggaagaagcattttctttgcccagtttttttaggcagtcacattaaaattctcattaataatgttgacagacaattacgtttattatttctgctaataggcatctgcattcctattcagaattttcattgttagtctataaagtctagttttaactttggaatgtttggtagaggaggacatctatacattttcttttaactgtcctttctaatgtggtacatttgtgacagtgtttgaattctgggttttcagtgaattatggaggactaaaataccaggagtagtccgtactgcttctcttatacatgagagatatctaaggactataaaacataacttaagtatacccttttaatgcctttgtaagatttttaaaccaaggaatgactgggctatctataaacccagatgcactaagtggggagaaaagctcggagctgcagcatatcagcttttgtcaacctgccaacagcagagcgtaccatgctgcaaggagtaataaacaaggaattagaaaactcgctgctggagaacagtcaaattaaacacctttttgaaaggatgagcatgtatatattgcagttctattaaatgtagcttcttagtgaggttggcattatgttaaggctggtatggaagagaactgatgaagcaggagtggtctggtgacatttttctgacttgattggctggggcgtgtgatgtaataggtttcagtgcagccccttataggttttaaaatgaattccaagacaccattacaaagaaagccggactcttttcttataactgagctcagccaaggaaactcttgcacaaatgtacaatactgtttggaatatggaagacctggatttagaatatgccaagacagatataaattgtggcacagacttgatgttttatatagaaatggacccaccaggtaatactgcagtattattgtagagagttagttaatttcgtggctttttaatttttcgaaagctactgtaaaagatcctttttggatttctgtttttattaatttgtttcattgataaaaattagtttgctcatggcttaaaaattaaacagattgtttgactgtctgtggaagcaagcagctcaggctgtgtgtggtaaatgcttattcttacttgaatggatatgaattgaactccagtttttcactggtgtcttttgttaatcgagatccttccctgggtgagttatgttgtgggatattgtccctgtaattaaaatgatgcatcttttgtgctgcttttctctgttgccagtggatgagaacagtgtagcactttgcagtgataacacttggtactttagaaagcatgtaaaatgtagcagtgattacaactcagttctctaaatgttgagactttgcttgctctctcatattaagatattataatgaaaaaagaagttgactttccattattgttagtctttgtaaaatattcttggtagatacctgaaatcattttttgtataagttaaaatagtaacagtgctttaaaacttatgacagaatttacctaaaaatcctagatttattttgtttcctaagtaagttgttttattccaatgttagctctccccctgcccccatttaaggtattcaggaatactgcagtcttttatttgtcaccaattggtatatatgaatactgatttgacattgaggaagggggatatcatttttaatcagacctagtatatagagcacaatttatccaacagaatattaacatattaaagagatttagggcacagatgagagtttcttaaagtggcttttggcagaacagtgcctgaaatactaagattagagaaacccaattgctcctcttaaaacatactgctgtagatgagcctttttattactgcaacagagtttgtggaggacagagaccaaatttgtctttcgtaattaaataagaggaaattaaagccaactcatgttattcctgctactcatatgttcatagtttcttactttagatggatttgaccaggcatgaaactttaatataactagaatctagaagtacagaatgtcatgactctggatttactttgaaatttattcacatggccagcccaatttatttgttagtttctaaggctctctctcttttctccttttcagtttcatttctttttgagccatgctctgaaagattttttttaagaaaattatcttccatattgcatggaattgtgaactaatgctatatatttcagttactctaactttttatttttttaaagtaaaagtattcatctaaagaaatttagttctaatgtagttgggattgcgaacaactttttctttttcatctgcagcactgcctcctaaaccaccaaaacctactactgtagccaacaacggtatgaataacaatatgtccttacaagatgctgaatggtactggggagatatctcgaggtaaggctacagaaacttcattttcagagagttttagattaaaagaaagaaaagcaccagcttgctaagttccatttttaggatatcatccaacataagcatgaagcatagttggttctcttccaaagacgaccagaaaaagtcactgagcactggagaactgtgggtgctggatgccacaggaaattaaatacccgggaagtttcattattgacagagatgtcagtgaagtgccagagtgaagtggcactgcctaagaacagagtgtgaaggcactctatctattaagcacaactctaagaattcttgccttaaacacaataagaaaacaatgccattttatgttagctttgggaagggggagtaaggttggagaaactcttttgagatcatgagtttctgtgctcatttgtcagagagattgtaatgtttggttgaaaaaataaaaacttagtaccacagatacaccaatagtgaaagtgatatgcacctgtttgtgatgagactgcaattgctaacatttctatttaaacaaattattagctcttattagtgagctctgaaaatgcaattcattaatttaaatctatgtgggcaggaggaatatgggcactcactgtactttccacttgattttgctgtgaacctaaaactgctctaaaaaatagcctattttaaaaaatataaatctgtggtcactaaaccttaagatgagcattgttttgtgttttcatttcagggaagaagtgaatgaaaaacttcgagatacagcagacgggacctttttggtacgagatgcgtctactaaaatgcatggtgattatactcttacactaaggtaagccagggaatatagctgaaattagggttttgggctgatattaaaacatatttccttattccaaaatgttaatacctttatttttatattgtttttacaggaaagggggaaataacaaattaatcaaaatatttcatcgagatgggaaatatggcttctctgacccattaaccttcagttctgtggttgaattaataaaccactaccggaatgaatctctagctcagtataatcccaaattggatgtgaaattactttatccagtatccaaataccaacaggtaataaaaactgaatgaattatccagttacgatgtttagacaagatccttttaatacttagaaaacatttgaagcagatgaattacatgtaatcaagtctaaaaaacttgacactcgtaattacataattgcaattttaaagatgtttccatgtcagctattttgttaaacaattgttatttgattaaataccttatccattgaatttattttaatctttctaggatcaagttgtcaaagaagataatattgaagctgtagggaaaaaattacatgaatataacactcagtttcaagaaaaaagtcgagaatatgatagattatatgaagaatatacccgcacatcccaggtgagttttctatgaaaatcagattaaaaaataagagttctaaacttttaaagactaacatggaaaaaagaatttaaaaggttgagtttttacgaatgaggtgggggtgagagcatttatttgtgaatcattgttgattattctagtgtaatatctctaaagctttaaaccaaaaattttaagtatcagaataataaattaagttcacgtgataactgaagcagtcactgagtttcaagttgatttaattcgtgatagaaggatcctgtttagattggaagttagtaataactggaagtttcacagacttgtctaatccctgaaatggagatttaggcattaatatatatcctaccatgaaaaggaagggctatatactgctgtgcttttctagacccttattcttcactggtcactcatgtatctgggaatgccagagggaacagaaaacaacagggatgctataaactacaatagcttttaagaagataaaaactataggaaattgctacgcaatcatttttcatagattgagaaaattctccagaggaaatacttgtttctgggatactgttttaatggattttatgaatttgagtcccactctgctaataatacag

SEQ ID NO: 10769 - DNA, 6000 bp, Homo sapiens
tatgcttctgattaatgggattgcaggcagtcattagaaggattgaaagactggagaaaaattccttaaaattttgaactgttgcatatgatattatataagagtaagttagtttacttgttcgtaggattcctttataccctttgttacaataacttatgcatgcactagcttggagcctatatcacaaaactgccttggttatttgaaaatattacattgtagataatgttatctacatataaaaagcctttgctatgtgaataatcatgtcagaactgggtaaaaatagtttagtgggcaggtatatgtagcaaaagagaatagaggcatgatagagtgaatctgaggaaaaatcctgttgatttggatagtttaggctccaggtcgatctcggtaggggtggtggttacacaggtattaccaaatacctcaggctgctgggtcttctgcagtactgtgaagaatttgaggatgagagaaaagagaacttcccagtcctctagatgtgacagtccttgtggcagtgccatatccccctaaggaggagctgggttattggaaattgttcagtggaggggcctgggatagtggcaggaggcagaggtgctaaggatacaggtggcagaagcgaagctcatagagcagaaataggcaggattccagaagtgggcagccttccagaagtggtgtgcccagtattcttttattcactagtttatggacttctttcgcagggacacattttaatgaagtctctttggaagaaaatttgcatggctgagatgctgggttttggagttgatggaactgccgagttaaaatagcttttttgtgtgtgcaggtagtgtgaaagagccacatacactatcagtaaagccgctgtctgagagagttaaagaggcagacagacagttaaggttaattggagtgatcagcttgtgcaggccacgaacctgcatcatccacaccaaagcaagttgagttcaggcagtagatgctggaggtgttaaaaatgggacttacagagctagactgcctggatctgaattctagttcctcttcgcaattgctaagtattatcgtgacagagatattttctgtcctatgttaagtgagactactgatagtacctgtttttatatagttatctacacacacacacacatacatatatgactatatatatgactatatatatatgactgtatataactatatatagtcagcatcatcatatcatctaatactaattgggagctatatgtgtacaaactcaatcatcatcatcatcatcatcatcatcatcatcatcatcatcatcacccaatacttaaccggagttttatgtggattaacccattcagtcctcaagaatgacagacgtcaaaatggacatggcagtcaggagaaagtgtacaatgtgcaaaagagtaggggtggctgccttctctgtctagctaagggctctctacatcttatcaccatgctgtccagtccccaccccaatgacttgactgctctccttttttttttttttccacaacattgccctcagaccacttaattgacactgactaatggctggccttgaattaacgtctgcatcaatggatggatgccctgtttgtatccatcttcctggccttactttggggtctcagaagacagaaatggtgtgttctatttaccatcctagagtcatagaagatttgtggttctttttatcagatgaggacccagagttctgcacagggttcttcttacccacaaagtaaggttcttcttacaggtggcaagggagagagaatttgtagagacctttagttctctgtcacttcagacagggattgcctctctggtgtctagcctctaaaagtcatcatgttccttaggtttctatttccctttgcacaaatttagcctcaggcagactcaagcacagcttttaggtttgtaaaaccttgacaagtcctggagccttttcttaatacagagccccctggcaaggaacagcttcagaggtaagctgtgagcaggggcttgcttgatggttcctggaggattgaagatggggaagagtttgttcattatacttcccattctattaagaatcccaccaaactggcccactgggtggctggaataaaggaagtgttaggaagcagctggcataaagatctacccagcctactggttgaggatttttttttcccccctaaaagacatacattgccaggaaaagctaacaaaaatttcaaggcagatttggaggaattaaattattcttaggcacattgcctggtttctaagcatttagggatatgtaaatgttcatgttctttagaggtctctgtctcttttgtacagagtacattagtactaaaaatgagatttgctagttctacattttcatgtgaatttatgcagtgaatattcaatttgattctggatctttcaaaaggaaaggctttctttaaacaaataatatagcttatttttctgatatgctctattggttgctttgatttttttctccgacaactgaaatgcgaagtagagtactatccccaattaatattcttgctccacaaagacttccagtgtttgtttttgcttcttttaatatgtaactctcctaagtgtgttattgtattacagctaagaggctttacccatgtaaagttgaatactttacacttctgaatgccaacataacaattaatctatgattagattttgcttcttaagatgcctccactgacgagtgcctgtaatattaaacttctaaagtgttccactctttaaaacttataaaagctctctttgatatagcccactgaaattgtgtggctattgtttttattgctttattgtgcagccagcttaactgaaacctttgggtggcttttactctttataataaagataacattgagaaatgcctggagtacaaagtgtatatgtgtacatgccgttctcagccatctactctgacttagtaactctctaattcccttgcctccactatgtttaagaacaaaaaagaaaaacacttacatttcacatttcctccatcaagctgtctttatagagtggtctgtagcaaccattgctacttcctctctaatattttttaactccttaagatgttgttgctgtcctcactgctggactggaatctgcgtgatgattccatcatgggcgaagccccaaattatttagccttgactcagtctctcctgtctggatgcctttgcaggatttagtcttagggatcacattttcctacttgaactcttcttccttgtttttgggatgttgtctctaaaccttgactttccttcctcagttacatacattgaacttcactatttggcccttggatcatttttttttttttttaacttttgatttgtccttgtgagctcttccattccattgaattcagccttgcctaattgtggccgattgccaaatccctagcatgtttcctcttctgaatcacagaccagggtttcatcagccactagcacacttgcacaggggtgcccagaatcaccgtcagcccatcaggtcacctggcttctctttgcctgatagtgctccaaactctcattaatgcaggatcaggcaccctttgctcctctcgttctcgccgcacatttaagcatttgccacatcccacatgttctttctctgcagtgtttatttcactcctcccctttccacacctgctgctgccaccctggtttgtgtcctcactacctcttggccagacctctgcaacacacctttctcgcacactgtggttagattgatattcctggagtgcagctctgatcccgttgctcacttttcaccaagccctttccgtgttccacactgtgggctgaattactcacaaactcagcatgggcatgcgtgatgtcctacagcccctacctaaatctctaaccccaatcccactgctccctctttggctccagacggattggactgcctgttctagctcttctcagaatatgacattttcttggtcacttctgtaactagcgtccgaccacacatgccattctgtcttcagattcctgcagttagtgtgctttctccctcgtttgaaccctgcagtgtttagtttctgcctctcttatgacatgtactagtgttgtggctctgtgtactctgagccacattatcagcgataatgtcacattatcgctaagacattgcctcatgccgacactcctcccctctgcccccgcccggtgttcttagaaggcagggactgccttactaatctctgttgtgtcaagcaatagcacactggcctgtgtctgtctgccaaatcgattaagtacttgttgaatggaagtagaaattccaattaacacagatggcaaagtgtgctgttcattcttaagtctcgtttttttcattcctaggtgaagctcgtgtgtggagtgccacggtacaatcagacgacagatggacagtgtgacaaaagtgtcagaaaggattgggcctcgctgtgagagtcagcctggattcaaagtgttgacaagttgctgaaaaggaagccagtgagaggactgtggcacgcagaggaagtggagccctgtcttcggtcacaccattgatggaggacagatggacagccgtatggccagtcacctctcctcttaaacctttggagagtggtcctttgtcctctgctggacacataataggaattctaacacattctctgaattcacttttcataaaaacgtaaaatcagactgctctgtacaaccaggctcaactgttgcatggtagcagatttgcaaacatgagtgctgaggggtaccagtacagagcgctgtatgattataaaaaggaaagagaagaagatattgacttgcacttgggtgacatattgactgtgaataaagggtccttagtagctcttggattcagtgatggacaggaagccaggcctgaagaaattggctggttaaatggctataatgaaaccacaggggaaaggggggactttccgggaacttacgtagaatatattggaaggaaaaaaatctcgcctcccacaccaaagccccggccacctcggcctcttcctgttgcaccaggttcttcgaaaactgaagcagatgttgaacaacaaggtcagtattgataagtggttgcttaatgactccctttctttttctttttaaggaaaagtcttaagtttgggttgagtcgttatgttctgggcagaagttaccttggcaactgcacctgaattgatgtgtggtgcataaaagcttggtcaatcattacacaactagaaatttgtgtttgtggggttggaagttgttataaaaatagggacacagtatccgagaacctgtttagtgagtgtcgttgaacactattattatagttgtcattgaattaaacatctactatatttcttatttttgtaattggcattataggcggagtattcctagtctgaaaatatgaaatctaaaatgctgaaaaacccaaaattttttgacacccaaaggaaattctcattagagcattccagaattcagattcagtggtcaaggggtataatgcaaatattccaaaatccagaacaacatgaaatctacaacacttctggttccaagcatttcagataaggaatactcaacctgtgtatatctaataataattttgggaaagtggagggtaagtctaatataagtatatttaacatgatttgtatggaaaaatgtagagagtaataaaatgaccacagaactcggctgagaagaaaccattgtttttataacctggtatctacctcttggtttcctctccaggatcgctgtggccaaagctgaaacccaatcctatagttagtataaaagtaaagggatttcacttcctttgtgggtagtgtcatttgtagcattaatgcctatagtctggttcgccttcatgagggggaagaaaaattcactgaat

SEQ ID NO: 10770 - DNA, 6000 bp, Homo sapiens
tatattcggccaggcgagccagcagggtgcggaccacatcaggccgctggccagccaggtcctcccgttcataagggtcagcactgatgttgaagagccacacggcctggcggacactggccattcgttccaggttccaccagctacccgggaaggtggccagtgtctgcggtgggatccaatcgccatagccggggtctcctgtcagcagcttccactcacccacgcggatggcagcctgcacggcggtgttccagatgccaaagccgccctccagggagccatgctgggcatggttgtagagtgggtcaatgttgtgcaggatctccgtgcgtggtgaggcccggccctcgctgatggccggccacacgtcgtagccatctagcccatcggctgctgaggtggtaccacctgccagacccaccagggtcgggtaccagtcagtgatgtgcatcagtgcccggcttgtccgttgctttcgcttgagcaggggactgtggacaaagcctaggccccgcacgccaccttcccaataagtgcccttgcgtcctcggagcggccagttgctgccccccgagaaagtctggccaccattgtcactggagaagatgatgacactgttgttgtagaaaccgtagcgcttgagggcccaggtgatgttgcgcacagcctcatccatgcaggtcaccatggccgcgtacttccgccgggccacattgcccatggtgcggtagcggtacaggtactcacgaggggactgcaggggtgtgtgtactgcctggaaggccacatagaggaagaggggacgctgagggctgtggctggccaggatatggctggcgcgctgggcataaagcatagtggagtactggccgctgagcccccaggccacattctcaccctcgtgcaggtcgaagccgcacacgcctgggccatcacagttgtcataggtgtaatagtccacattgcccgtgagcgagcccaggaaggtgtcgaagccccgacgggtgggcagacactccttccggtagaagcccaggtgccacttgcccaccatatgggtggaataacctgcctcctgcagcttctgtggcagtgtcacctggtccaggggcaggcagttgggctgctgtgggcggatgatggaatgctggagtcctgtgtggatctggtacctggtggggaggaggggaaggcacagaaggcacaggtaagctacagaccattgctctggccatccagtccccagtaccactgtgaggtgggctgtggtcccagcactaccagcaaaaataataacagtaaccaccaggtactatctactatgctaagcacctcaaatgcattatctcatcgaatcctcaaaatcactggaagtagatcatattgtcgttttacagatgaggagattgaagctcagaatggctaagccactcacccaagatcacacagctaggaagttggagagataaaagttgaacccagggtaataatgacaataataatagctaataccgagcactcactgtgagcttggcattacactaatcctcttatgtgaattatcttacttaatcctcaccacaaattcagaggtacatattattgttcccattttccaaataagggaactgaggcttggtaaattaaattagttgcccggtgactcacacggctagtagttggagtgggatttataacccaagcagtctggctccagacttcggaatccctaagctctaagctattaacttgcactggggcctagagcaagccctgctttcccaggcaaactcttactcactcttcaaagctcagtccaaatgttatccatgctataaagtctttcataactctcccaaagaattagtcacttttgcttctgggttcccctagcatttagtacacaccatcgttttcttacttggccgtgggattatactcgtctgcacatgctcttgcgcccagtgacatgtgatgagactgtcctttattcaaccttctattcctagcacccaagtgatgttcaaagagcactcaattatttatgaaatgaatgaatgaatgacacttaagagggttttagagccagaagggacccaattcattctctagtttactcacctcatcttaaaaaggacctaaggtctttttaagggaaggggaagggccttaactgaggtcgctcggtggtcaggaacagagccaggacttgaacataaatccaagcagagtctaagcagggactctttttcagcaaactgggctgccgtatctcttcccacatgggggcctcagtttgctcccgtataggagttggttgaaatgggaaatctctaagactcgtctagtttcccagttttttaagaccagctcccaagtgcctgcctgtgagctcatatgaccccttgatccaggctatcaccctgaggcaggagtaaatggttaggcaaatcctgaattcctcatttatccattcatatcccatcttcccccttctgtggtcaaggctcccatgtgatctgcttatggtgtcttgcctttactcaagtcttgaaagtcccagagtaaataagaagcctggaacttcacaagtatgttaaaatcccacacctttttctcacctccaggcatccaaattaatccaagccctgaatacctgacatctttaaccagagcacaggagtgagtttctgttttggtttccttatcttaaagctgttattgttgttagctctaattagctactactgccatttttaacactatgtgccatacacatacattatctcatttaactctcattttaaaaacctacagggaagtctattaccacccccattctacagatgataaaaccaagtcccccgaaagtgcagcaatgacccaagttcagagagctgacaagcagtggagctaagctttgaacctgggtccactcaagtcatgctcaaaatcttttggtgataacggcctctccaggcctcaatcaagctaataaattattggatttgatatgagaagcaccctagggccctgagtcccaactgggccggtcttcatagaggtggggtgctgtggagcgctggcttgtaaagcggatgggccagctaagagtcaccaaagcccacctgcaagtgagtcacaagagaaactttgcctctctccagtgtcacaaaacacaactggatgtgttaacaaacactaacgagggctgtaagcatcaatgagatggagccagctgcagggtgggggagggcaggcactggccggccaccttcagttagcttcgcagatcaggggactggagcactgccctcctgctgtctgctcattccgctacttaaaccaaaagtcacctcttaggacagaaacgctaagttgtgtataactcttgggaatgcagactcctccaccctcttctgcaggtcaacattggtcttcaccactacaccactaacctgcaccaccaccccaacccatacacaccccacacccctccttctttcttctgttctccttctgattcctggatctaaacgctgggtgccagatcgaaggaacaaaggacgccatttgatgcccagctccgggacccccgccaaacacctggcctctcaatcctatctcccacagaccctgaagttgggcacgggcaccaaactaggccctccctgagtccttgcctcaatttctcccatccaagaaatagtgagactaagaaacagggagactaaggcttctggttcctgagatcacattagtggctcttgggtggaacttgggagaaagcatgccttggaccccatccaaggagaattagcttcagcactgccaaaggattttctcctaagtggccagagtttgccttccatacccccacctcctgtttccctgctcttttaatcctgtaatcctgctgcctcgcctgtggacatttccttgtggaggaagcagcatgtctacttggggctcccagccaacttgggaggattttgcagatgaaaaaacagaggctcagagaaatgaagtaaccaccctaaggctacacaggtcatggtatcctatgtgtctttctcttccacctatcaattccttggtcttctcccaatgtattcatcaagcagtatggggacctgaatccctcaggagacatagaggctgccatatattgacagccaagcaggttacacacaactcattccaactttgccactccttttcaagatgaaaactgttctttgctccattttatggacaagaaaactgaggcttagagaaattaaatgacttgctcagggtctcggggtccataaatagaagcagcagtaaatgtcagaggctgccatgttcctctaacaaagggatgaccagatgtctccacgttgtgtggaatgtgagtgtcctggaacatcaaagcaagaagacctcaaagatgatgaagcccattcagtgtaaaggaagggtaattgaggcctagagagggcgagggacttactaatgattacacagccaacaggagatttcccagatcccagcatggggtggtactggcaggagaaatctatcaactgggttgatttggggtttagatgcccagccccggggccttgagccacgcctacctgccagtgaggagctggctccgcgaaggcgtgcagatgggctggatgtaataattctccaacttgacccccttggccgccagcctgtccagcgtaggggtctcgatatctgaaccatggtagcccacgtcgtggtagccttggtcgtccgtgaggatgaagatgatgtggggaggctggggcggagcggccgagggctgctcgccagcctccccgggcccgtcggccacgaagctcggcttggcccagtcccaggacaggtagccgaagctgagcaggctgaccagggagaagccagtgagggtgtgcatcgccaagccggcccgcgcgtcccggcgcgccgggctcctggggcctcaccacctcgcgcgcccagggcgcaccaccggcccgccggctcggatgctgcgagggagttcagcgccccccggggacggtccagtgtctggtccgggactggctgccggacggctgggccggatctgctcggccgcagcggggcgctctggggaggtcaggcccgcgccgagctgcctcccgctgcctaagcgcaggccctgcgccgcctttgctccctcttccccagctcagcccggccagcctgagacgcggcgtggcagcttccaaaaagtgctctctaccatcctctgactcccctcttccttcttgccctggatttctcccgcctcctaatttctctctcctctgctttcccggcctctcgccccacccggagtccttaaaacagcccagctccctgcagggaggtgggcaggaccccagaggggaaggggagggaggcacaagttgggcgggtcgaggggacacggcgggagagaattcgaaaaagttgtaacatctgccgggccgggccgagccccaggtggaggggcgggacgcagagcagcggctccacctcccgggcgggaagccccggccctctcggcctgctggctccagcgcccgcccctgaccgggatggggaaaggagggagtggggctgcttggaattcgatggaacagctccagaatggctgggtcagacattcctcgatcatggagtcttagcctctctgagtgccagccctggaaggaaagcccatcatttcctagtccaaccgggtcattctacagatggagaaactgaggcccggagatgagcctcaacgcgtctaagtcacagaacaagtcagtggctatgtctctaaggctcaccgtggctgttggagtggcggctcccttcggtgagccggtagagaaagcgatggagaatggcaagcactttggcaagcccccgcggctgcaagtcaggaagcttggttgtagccttgccagctcccctctcctcaacccctccctcctcctcgttctgcag

SEQ ID NO: 10771 - DNA, 6000 bp, Homo sapiens
tacttctatttctcttttcctggcctttgcactattgttgtcacacattttacctttacatatcttataaaccctgtaatagtttattattatttttaaacagtgaattatcttttaaagagatggaaataataagaaaaaaatctcacatatttatctatgcatcttaagctccatctcctcatttctggtgctcttcattccttcatatagaaaaatatttctacctggtatcattttccttctgcctgaaggacttctttttaacatttcttggttgtaggtgcttttggttatttcagtttttttttcaatgtctgaaaacttctttattccaccttcctaaggccctatgtgagcaagcactagccactattcctctaatcccttaagatgattctttccttggactagaacagtttcttcacacccacacgctatccaaatctgctgaatacaggaggggacactgcacatccctctatacagctttctcctttttggtactctgctttgcaaattccagttgtcttagtgttgttggactttcagctctgtatcctcaactcggagagtcttctgggccttctgtaatttttacactagtgttttactatctactttgtttgctttcttataggattactgttttaaatgttgacatgtttttttttcaaataattattatcagccatgtttatgtatgtatttctttttctttctttcttttttttttaagcgatcaagtcttgctgtgtcacccaggctggagtgcagtggtgcagtggcgtgatcttggctcactgcaacctccctctcccaggttctagcaattctgctgcctcagcctcctgagtagctgggactacaggcacatgccaccactaatttcttgtattttagtagatacgggttttcaccgtgttgccccggctggtctcgaactcctgagctcaggcaatcctcctgccttggcctcccaaaatgctgggattacaggcatgggccaccgtgcctggcttatgtatgtatttcttaatgatttatgatgaataagatgaaaagaaaaagtacagttgcatttcttctcaatatgattatatatttatgtgtaattgcaatttaaaacagtattaaaaacaatacagttcagtgttaatttttttcttagatttaacttattatttttaactatatgttttgtgaaacatttaaaactgaaaagataaatcaataatactaagatggtcacttagattgtctggttgcttttattcagttaatataagatgctgtgatattaataaaccgttaatactaggatttgtaattaacctcaacgatattcacatttgaccatgtttgtaatcagccactgtcaagatccctctaattttaatattctatgagctcatagtgttatactgctaaagggttcacatttagtctaaaaccagaagggaactaataaagcattaacaacacagaggggaaaatgataaagtactcaagataggcatatcaatacattttcatccagtatacatatctacatggaaggcccaaatcataagatcgctcttaagcatggaatcagagcaaggggagttagtaggacaatcttgataacttctgtcattaagccacttcaccttgtttcatccaattcctgaaaggaaagacctactgcacatcccagagaatgatatccagaggcagggactgcttctgtttacagtgtgggagccttaccataaattttggacattctctttctcccattctccaccctttaaaaacatagcaaataaaatgtactataagaagagtaaagtatcaattaccttctgaaatttaagatggtatattttgactgtgttcattagaggcagatttaacctagattgaccaaacaattaattttaaaatggacgtttttccatagaattatcagggatgaaaactaacaatttttctttcctatttttgttttttggtttttgttgcaaaccgaagccccttccatcactgcagcataaagaatgtaagggaacaggaaattgaaactttcagtaagagcaagatgtatttaagatgaagcaatagtaattttgctaatctttaaccaaaattctctctctaacactgtgagagtggagatttctccttagtatgaatttaagtgcacgatgattatgctactctgattttgatagtatagcatggatttattaagtcacagctgcaaaatagtcttaagccatgattgtatgtaatcacatcccatcaaaacaaaattttctggttgtgtaaattacttcgtattccatagataaaatggtgatcaaaatagttacctactttgagtccatttttgtagaaagcaagcccaggaagattacataccatgcttaatttgaatacctccaaaatctaggttttcagagcagcattaatcttctaagcctcacgaatatcacagaattttgaattttgatctcttaaaattgctatgcaataatttaacctgatggagatacactgtagttattaaaagacagaaaatgcaaagtttagggaagacttctggctaagagagccgagttcagatccttaagtggcagttcacttattagctatgtgactttgggacagttactaattctttatgggatatggtttcctcaatatgtaaactatatataacagtgcagctgcttttgtaaagattttaataatggggcatatagcagacattttaaatgttagctcctacttctactctttccccatgttttaggccaatctagaatttatttttatttttaattcttatttttttgagacaaggtctggctctatggcacagctggagtactcattgcaacctcaccctcccaggttgtaagcgaccctcccacctcagcctcccaagtatctggaactacaggcgtgcaccaccatgccaggctaagttttgcatttttggtagagacagggttttgtcgtgttgcccaggctggtctcaaactcctggactcaaggcacccaccttggcctcccaaagtactgggattacaggcctgcacctctgcgcccggctggccagtctagagttttctcgattgtgaggaaacaggtaacagaatgtacctctgtccaaagtaagatacatattttatatctgtctctcaacccagtaaacacagcatatataattgaaacaaaagtttcacaaaatagtatttatcatattatgtgccatgtactatgtattattactgtctgtttcctattaaaacataagcaccataagggtaggggtatttgccagtctttgttcacttgtgtacccccagaacttagaacaatgtttggcacctaggacacaagaattttttgtgtctgtgttaagtgaaagaatgaatgactaaattgtacctaccatgacacaatggtgttaagctcttcgaagtgtttttcttatttattccacagttagacatgtattattattattattattattattaagagacagagtttcactctttcacccagactggattgaagtggcacaatctcggttcactgtaccctccaccttccgagttcaaatgattctcctgcctcagcctcccaagtagctgggattacaggcctgcaccaccacacctggctaatttttgtatttttagtaaagacagtgtttcaccatgttggccaggctaatcttgaactcctgacctcaggtaatccacccgcctcagcctcccaaagtgctaggattacaggcgtgagccaccgcgcctggcccggtagaaattatttacatgattgtcatcactgtatatcttacatatgcaatatacagcagagagacaatttctggtccttcagtttcggagaaggaaaagcaaagcagtggttatgctgtgatgttcatcctggtggtgatgggggtggggtggggtggatttctttttctaaggaggactgaggcaggaaaatagggtctggaggcaggaaacataaggcctattcacacttcagctgtaacaggaaatatcctctccatagggcgtaggccataaatgactttgtaactttacttcatcttctccctttacatagggcatacccaaagtaaccaatggaatcctctagggggtatttaaactccccaaaattctgtaaccgggcctttgagcccctatgctcgcccgttcccacactgtggagtgtactttcattttcaataaaccccttcattccttccttgctttgtttgtgcgttttcttcaattctttcttcaagatgccaagaacctggacaccttctaccagtaacaggatgacaggcaagagtcttatcaagatgctcatgaaccaaagtatacctctgacgtcttgattcttggagtccaagcctagactgctttggtaagcagcaaaggaagaaaacgcaagatagtttcctgaacaatctcctgatgcaactgtttacaggtttcatgtcagcacccaaggggagcttatggccagagactcccacagtctctgtgtgttcccagtgcttgggctcaagggaggcgcgctgcgggctgaaggctcaggtcagaaccgcaggggcttgggcggaggcggactccggtcgaaggctgtggggtgagaactctcgccccctctactcggccgccgccgggtggcacgcccacgccgcgccttccggttggtccttgaggcgacgggtgaggcacagctgagcgccaaagccacaggctggggcgctaacgcccccgctcagcgctctgcgctccagacagctgcgagctggagtaggaaggttcaggcggtggcggagagtgcgctggaggctggagggccaggaggcgggaagcttcccgcacgggggcgctgtcacctgcctgtgggaggagccagagagggacctggctctgctgctctgaagcaccggagtcgggagaacccatccagacatgaagagcgccaaaggtattgagaacttggcttttgtcccctccagcccagacatcctgcgccgcttgtctgcgtcgccctcccaaatcgaagtctctgccttgtcctctgacccccaaagagagaattctcagccacaggagcttcagaagccccaggagccccagaagtcaccagagccatctctgccttcagcccctcccaatgtctccgaagagaagctccggtcactgtcgctgtccgagtttgaggaggggtcttacggctggaggaacttccatcctcaatgtctccagcgctgcaacacacctggaggctttctgcttcactactgcctcttggccgtcacgcaaggtaaagtccagcgcccgcttgaggctcgggccagtggagagcgaggtgggcacggcgagccagccgggggagagggcaggtgcgcggggtccgtgggacggtggacgcgccctgcaaggtggccccgggtttggaacttgcttgcgctctcaccaaggtcaacctaccggcccccagccagccttccaaagttcagcttctcctttatcactacagttcaaacttgcaatacaagcctttttctcttttgtgttttacctcagtttagcggattcaagacttacagggaagattacaagaaccttcctttgggaaaggtataccctggggagtttattttacattataaagacaaaaatttacctaggcactctttaaaggtattttacttttacatttgtttcattgcctcaggggaaggagtaatacgtttgcaggtgggagtgggatgccttacaaggaagaaagctatgaaaaatctatcgtataaattagatacagacattcatgttttgtgagtgtatttagtttgagagtatgtggtcaccagaggagcccagtgagtaaattagcaaaggctcccgacgttgttgagccttaatcttcattgtgttacattagttatccagcatctgttttgttcta

SEQ ID NO: 10772 - DNA, 6000 bp, Homo sapiens
gatcatgccaatacactccagcctgagcaacagagcaagactccatctcaaaaaaaaaaaaaaaaaaaaaaagaaacttttcatactgctcaccacagcacgatgagctacgtctaattattatctttattttacaagagaagagacagagtcagagagattaaatgcctgaaacagcaaggaactgaacgcaggtttgtctgggttgtctcattaaacacatctttagaaacctgaagccccaggggtacagagaacaaaggaggaagaggagagcatggcagatgttccctgaccattggctgctatgttgggagtccactaaagagtgctggggactatgatggcttctaagatgatcactgtcccctcacatggcagaagggcaaaaaaggcttacggtactcccttcaacatcttttataaattctctaatcccttccatgagggttcttccctcattacttaatcacttcccaaaggccccacttcttaatactatcacattggcaattaggtttcaacatacgaattttggtgggacactttcagatcagtgccattctatatggtgactcttcctcaaaccaggtgcttgagcaaaaccaatttgcacagagccactcctccagcttcaacccactcagccagttatgggcatatcacaggagagataaatcttcgtcattttaagccattgaggctttgggattgtttgttactacaatattacttggcctatcctgtcagtcatagacatgtttccagatctttcagtttttcaggaaatattaaaactctaggttatgtgactcaatgttctttttttaaaacatttactgatagtacgaaaacttttggtcttgcctaaaaaatacaatggaaatattctgaggactttaactgaataggtttcaccctttttattatcattattattattgagacagagtttcgctctgttgcccaggcttgagtgcagtggcgcgatctcggctcactgcaacctccacctccggggttcaagcgattctcctgcctcagcctcccaagtagctgggactacaggcacccaccacaatgcccagctaatttttgtacttttagtagagacggggtttcgccatgttggccaggttggtcttgaactcctgacctcaagtaatctgcctgcctctgcctcccaaagtgctgggattacaggcgtgagccactgcacccgcccatcaccctttttaaaaacttatttaggccaggtgcggtggttcacgcctgtaatcccagcactttgagaggccgaggcaggaggattgcttatgagagcaacctgatcaacatgccaagaccccatctctacaaaaacatacaaaaaaatagctgggtgtggggacatgcacctgtggtcccagctactcaggaggctgaggtcaggggatcccttgagcccaggaggtcacagctgcagtgtgccatgttcacgctactgcactccagcctaggtgacacagcaagaccctgtctcaaaaaataaaaattaaaaactatttagaatttttatttttaaaaatgcttttcctagtcttgtaataagaaagcaactaattttacatgtcagtctagaaataaataaatttatttatttatttttattttgagacagggtcttgctctgtcacacaggctggagtgtggtggcacgatcacggctcagtgcagccttgacctcctgggctcaagtgatcttcccacctccgcctcccaagtagctgggactacaggtgcacaacaccatgtccaactaatttttaaattttttgtagagacaaaatctcgctatattgccaggctggacttgaagcaattctcctgcctgggactcctaaagtgttgggattacaagcatgagccaccatgccctatttttaattgtggtaaaacatacagaacataaaattcctctttctaaccatttttaagtgtataattcagtggcattaaatatattcacaatgttgtacaagcatactcagagttcttaactgttgtcaactaatcaaaaaatattttgaatactttagggactgaataaaatgtgtctgtagacccagttctgccagcatgtggctctgcaggacaccatgctccctctcccaagcctgcagtccacgctccctcagcttccacttcatagcccttctcttctcatgcatgccttggctgctctgagggccctttcagctcagaatctttggtcccagataaagggtccgttggtggataaagcagtgaggcaagtggtgtatacctgtgttatgatacaaaaaacagacacttggtttcctgcggtggggatatcggggagcaggcagcagctacaaaacctttctttgcaaagaattaaactcctcagcatctgtcaaagaaagggtcatcccaggaggctgggtctagaagtagattacaccaggaagaacccaccatctatacatgcctacagtgtgcacattcctatccttgcaacaacactttcagccagaaagcagggattctatatgcccatttcccaggctcactggcttagtgatggctcattgcctgtaatcccagcactttgggaggccaaagtgggcagatcacgaggtcaggaattcgagaccagcctggccaacatggtgaaactctgtctctactaaaaatactaaaaatacaaaaattagccgggcatggtggtgggcgcctataatcccagctacttgggaggctgaggcaggagagttgcttgaacccaggaggcggacgttgcagtgagccaagatcacgtcactgcactccagcctgggcgacagagcaagactccatctcggggaaaaaaaaaaaaaaagctaagaaagaaaagggttgatatgtactattaaggaataatctttttttttttttttttttaaatacagggtcatattctgtcacccaggctggagtgcagtggtgtacttatggctcaatgcagccttgacctcctgagctcaagtgatgctcccacctcagtctcctgagtagctgggaccacaggcatatgccaccacacccggctaatttttgtattttttgtagagccagggtttcaccatgtttcttagtctggtctcaaactcctgggctcaagtgatcctcccacttaggcctctcaaagcaatgcgattacaggtatgagccactgcatctggcccaggaataatctctaagatattttataaagtgagaaaagcaggatgcaaaactgtgtatactatgccttttgtttaagaaggagaggtcagggtaggaggaagacctacttttcactgtacgctactttgtgttatttgaaaattaaacagtaggtacattgggattccacctgcaaatcctacacttatccaagataacttctagtaacattggctgtggttcatttcatgcttattttaatgtaaatacacggaatgtatgtatatatttatgcaggaactacagtctggcatattttcttctcctctttaataggtctttatttgtgatctttaacagatctttataaagctgtcttctctttaaattgctgtctctaggcttagccatccccccaacccatacccctaattctctaaaacatgccgtgggtggttcgccctgtgtactgttgctttgggaaggatttccttccctcatgtccactctccgccttccctcatggcaatctagctatccctagccccagggcacagttgtacccaggactaccaagatgctaagccttgcccgtacaggacctaatgtgccagtaccctctttccctctcctcctcgcccccttcccttccatctttagggaattcctggcaggttgggtaggggatgaatggttaaggggtattttgtgagcagcggaagacccagtgccagggaggccaacagagggcctagcaattagagaatacttatatatatttttggtgcctaccatgtgccaagcaatgtattaagaagtttgcacacattacatgtattccaacaatactgcaaagtaggtttcttggagggaaccatgtgtcgttgtttgcctgaaacagtcatggtgtttgcctgttgtcctggcaaaattattaatagcatctcctttctctagcaaaaggttcagataaaaaattgtatagtgaccttaactgtccccatcttatacgtgaggatattgaggcttagagaggtaagttcatctgcccagggtcacatggctaataaatgatagggctgagattaaaactctagtcagtatggctctgctagggactgaactctgacatggacatgaattgtgtccccgcaaattcctatgttgataccctaacccccaatgcgactgtatttagagacaaagcctgtaacagggcgataaaggctaaccgaggtccagattattgccttctccccaggccgcctctcttccacaaccgcccccaccccactgcagtcagggcccttcctcctctgtcacaacagctctgctaaccctgcactatcactgcctgcgtccttcgcagcctcctgctgctgctcttccaccgctgcgtcctcgttggctggcgcttaataaaaattgactcggtgaataaatgagtgaaactgtccttttagggatggatggatgatgtcctgttcaaggcggtgcccttctctggcattccctaacacaagcttgacccgaagtaggcgttctgaaaaaggccgacagtcgatggaggccaacgcagcgcccctctcacctcctctctccgtccaggccgggtgaccacgggcccggcccgcagaaaggaggcggcgcggccggcagggatcaggactggagggggcggagcctccctcgcggccgggcccggagtgggaggggcctccgggaccaggcctctagtgcgcactctcggaagcgcagccgaacccgccctccgaatccagagaggcgctgctgacaccgccgccacaccgccgccacaccgccgctgcctcagtcatgccggtgagtggttgcgccgtccccgccacgcagacttgcagtcccgggttgcttctcggctgcacagccgcttgaccggatgctgatcttgaagggctcaggcggcggccggagccgctgttgtcccctagcttaccccacccagcccccagcttttgcgacccttcagaaaatgggatccgaagggagtttaatctgggagccaggcttcaaaacgtcggagctggaaggcctccaggggcgacaagcccacaccttccctgcgtacacagagaaacagaaccagagagggggcaggggatgggggagttggtggccagcgggaactgagacgcctagtccctgagccttcctcctggctgccctgcccgcggagctggcctgaaggagggcggtggggaggctctggacaagggagtggacccggttatttcctcacggaccgggcaggttttcagaggttcatgcttttcttaatttccctgcccactctggcctacttttcagatcaactctgggcgacactgaatggagacactttctcagcctgaacccatgagccccagagaggttcaggaacccccccgcacagtcaccagttgctcagtggctgtgtctgggaagtcagtcttagcctgcctttgcagatcactcagtcttatcacatatattgttgctcgtggcctcgttttttatataaagaattgaggcctttggcagataaaaatataaaaagcccagtaacttattccaggtcgtgttgaagttggcagagccaggattcagctccttatccttaggctccccatctctccaggcctgaccacatgggaggtgccaggcaaaagcagtcacaccggcttgggaagatgctctgatctcagttgcatcttggttagggtcatgtggtgtttagcattttcttcagggtgcctaattcatggctctgggcca

SEQ ID NO: 10773 - DNA, 6000 bp, Homo sapiens
ccagtataatccagtgggggctgtccagtcccagtgggactccaggtgggtccacacagtttgcaactttgggaatttacaaaatggattcctttctgtgtgatttgaactccaccgagtgactttttgtggtaccattatacagtttctgtcccagacaactaagtcgtcctacggggtgagtgaattcttttccttttctagctctacaatattgtccaataattgaggtttttaggacccagaaattatcagggcgattcttttgagccgggaatttatcaggaactgggtctgtaggtactaattcttgggcttcccatggccattgatctcccattacagtttctctatatacataacatgaagtgacattgagagactgggctacatgctcggctaattgcaaaaaccaatttcttgtttttcctggaatttctgatactggcacatttagttcatcatagaaagtttgaaacagtggctcaagagagcgttcgtaaacttctcctcgaactaagatatttacctgaggatccagtctgaccccatcaattcctaaggtcacatgctccccttttttccagcacggatcaaggggattggttattactagctctaaggggttacattgtccctcagtaaagtaagggccattttttcctttttgaaggtggactggatcctttttattttttatccaagtggcccaaatgacacaagaccagtatccacatttatttccacacagtcctaattcatgacaaatgtacttattttcagtcatatagcctttttcccaattaaaagagccacattcccttcctaacttattgctattaatgacttctgggtggggccacagaagtggtagttggatccaggtggagctatggtccatctggacccatcagtcttcagatatgccacacaaaaaaaaaaaaaaaaaaaaaaaaacagaaaaaaaactgaaaagatgtctcaaaaggccaatcttaggttctacaagagtgatgttatctgcaggagtaattaggtaagttgtgacctctggaatactgtctagcgctccttgatgtctacgccttagcagaattcaggctcctctcattctcctagcctgatggtctctcaatagctttacaaaggtaattgagtttgggggaagggccattatcatttaaactataaatgtctcccaaagttagcttggcccaagcccaagaatgattaagggcagtttgaaagctaaaggcaagacagggtttgattagatcagatctcttttgccataattttctcactgttataattttgcaaaggtggtttcaacaataaagttccagtagacagactgtgatacctcgtttttttttatgctactaaaggtctttgtgtgtattcaaattagagtattgtaaattaattataatttatactgctcaaaacccgattttcatctccaaatcatccccaaatttcccagagtaataataatatttaacatctattgagtgacattttatactattcatagtgctacaggaaaggggtccagatccagacctcaagacagggttcttggagctcatgaaagaaagaattcagggccaggcttggtggctcacgcctgtaatcccagcactttgggaggccgaggcaggtggatcacccaagatcaggagttcgagaccagcctgaccaacatggagaaaccctgtctctactaaaaatacaaaattagctgggtgtggtggcgcatgcctgtagtcccagctactggggaggctgaggtaggagaatcgcttgaacctgggaggtggaggttgcagtgagccgagatcatgccattgcactccagcctgggcaacaagagcaaaactccgtgtccaaataaaaaaaaaattcagggcaagtccataaagtgaaagcaagtttattaggaaagtaaaggaataaagaataaagaatggctacccccatagacatctcttagaatgtcttaactgtctgggaatacagcccagtaggtctcagccttattttacccagctcctattcaagatggagttgccccggttcaaacgcctctgacaacagttctgttagtccaaactgcaccattttgtaagctccccactaattttgcagaccttggtcaaagtgaaacatttcacaggggttcggggctgtaagaaacatcctgtctaaccacttgaccacaaggcagacaaaggcccaaataaagaaacatccctatcatatcttgctgggcaaagttccaaggaataccatgatgacatctgccagaacaagggccagaactgcctcatcacaggaacatcttatcaatatcctgccaggcagcaagccatactgcccagacccttaccgcccatacctataaatacccccagcctataagcagtggtgggctctggcattaagctggtcccccacatctgtaggttttatgctggacataaagcctgcatttactgtcgagccgccctctttctgtgtgtgtgtgtgtgtgtgtgtgtgtgtgtgtgtgtgtgtgtgtgtgtctttctttaaccctcctgttcccttcaaaacctagcaagttctagagacttttcacttattaacacatgtataatcctcccaacaaccctacaatataaatattactattcctactttgcatataaaaaaaaaactgtggcgcagaaaggccaactaactgacccaagatcccacaattactaagtggcagagttgggattcaaaccaagactgacacaggaacccacattcctaaatttttagcaacagaaaaataacctttataatacccagtcctacttgtcagaggcgtttgacccagagtgcctccatcttgaataggggctgggtaaaacaagggggagacttactcggctgcattcccaggaggttgggcattcttattactattattatttttttttttttgagacggagtttcactcttgttgcccaggctggagtgcaatggcgcgatcttggctcactgcaacctccatctccgggttcaagccattctcctcctcagcctcccgagtagctgggagtacaggcatgcaccaccccacccgactaattttgtatttttagtagagacagggtttcgccatgttggtcaggctggtctcaaactcctgacctcaggtgatccacccgcctcagcctcccaactgctgggattacaggcatgagccactgtgccctctgcctatggagtagccattcttttattcctttacttttttaataaacttgctttcactttactgtatggacttgcctcgaattctttcttgcgtgagatccaagctctcctggggtctggatggggacccccttttcaggtaacactacctgacctgtttttacagatgtgcctggattacacagtttcacaggcagaatttaaagaaaatcaacgctttccttttcaaaaaggagacaaaacagtttgcagcaacacttaacaaaatcctcttccttctcctatgttctgtcctcacacagttggattccagggcctctagcaacaacggttaccagtactccaggccccacacaaaaagccacaaaagcagtcaccttcctccgttactttatttgatagatgaccccaggctccctgtggcaaagaagaatcctttctttttctttctttttttttttttttccagagacggtcttgctctgttgcccaggctggagcacagtagcatgatcatgccttattgcaaccttgacctcccacgttcaagcgatccttccgcctctccctcctgagtggctgggaccacaggcatatgccacgcctggctaattgtttttgtatttttgatagagacagggttttgccatgttgcccaggataagaatgtttctttagaaatctggaaattgcctttaggttcccttaggagtaggagagaaggccatgaagtttcgcacgtggtcactcctagaaaattgccctgggatagtttgctgaggaggcaaattttggtcaatactagtttctcctctccaaagtccatcaaaggcattgttcaaaagaaatggccgtaccactatttgtaattgattctctacagcttcaaaaatagttatctctggttgggggaagggcacgtgaacttttaagacttcgggccttctcatcacaaaaatgatccatactcacaaaaacttagaggcagagggtatgttaacctagattaagaatctctaggccgagtgcggtggctcactcctgtaatcgcagcactttgggaggccgaggtgggtggatcacctgaggtcaggagttcgagaccagcctgaccaacatggagaaaccccgtctctactaaaaatacaaaattagccaggtgtggtggcacatgcctgtaatcccagctacttgggagactgaggcaggagaatcgcttgaacctgggaggtggaagttgccgtgagccgagatcgcgccattgcactccagcctgggcaacaggagcgaaactccatctcaaaacaaaaaaaaaaagaatccctaacgcagaggaaaagattggtgagctttgtttaatcacacacgctgtacattttccacgccctccccctctgccctacaggaatccgctgtacttctgacggcccataggtggcactgtagggacaggtaagtgcacagggagcgccacccggagaggctgataggaggcggagcttcaatgcgacacaacgtggcgggaggagcctaagggacgaggaaaggcgagtgttctgcttgcgcagacgcaaggctgggcactcccccgggagtgagggttgctgggcctgatgacgtggcttggcaacgtccctaccgccgctgcttcccgggaacctggcgccgccggaactgatcgcggcctagtcccgacgcgtgtgtgctagtgagccggagccggcgacggcggcagtggcggcccggcctgcaggagcccgacggggtctctgccatgggggagtgacgcgcctgcacccgctgttccgcggcagcggcgagacatgaggagaccccgcgacaggggcagcggcggcggctcgtgagccccgggatggaggagaaatacggcggggacgtgctggccggccccggcggcggcggcggccttgggccggtggacgtacccagcgctcggtaagggaccgatccggaaggcagcgaccggccgggtcgctcaggatgcactttctccggcctccctccggtctccgctgacagcccgggacgtcccggggtcggcgcgccctctccccctgcctgcctccctgcgcgcaggctgcctccgggctccccgggctcttcgggtgcctgctgcagaaggaaggcgctaaagccaaaaagcttctgcttgaatttctgggttacaaggcagacagtcagtcttagaactgcccgccagttcacgtgagaggtttttctgatctgtgagaagcctttctcttggctgtttctccctgaaatagtctggcgactacttaacctttctgacgtttccctgcataaattaggggaaggtgtcaccatcagctctcttcaggcgacgaaaccaaagtacatacgtgaacttggatgttcaggggaacttggatgttcagattaactgagcacatcgagggtccagccccgttttctttttttattttgttcttaaataagaaatgtgtcctcgttgtcaaaaaaaaatctaaacagcaaagcaattcatagagtaaaaagtgaaaattcccacttcctctcttcaattctcccaccaacccgaaaagtaagggaccaacaggtgcagcgaccactttctagtgtatccttcctaagttctgagatagtgtcgaaaatgcacaaaatacagccctgcaatttggctggaactggtgttctttgcctccatttttaacgagttcttcccattctggaataaatacttcttt

SEQ ID NO: 10774 - DNA, 6000 bp, Homo sapiens
acaaaagcgactgttactgttgtgtgcacagtaggccagaggcccaggttgttccctttccactgggatggtcctcaaatcaactggacatggagtgcatggtagctctttttcaagattctaccgcctggaataacaaattgtgccaagctctttctctgctatttcctgaagttcaacacgctgtgggtcagcccccaagggccatccagcctccatcttccaaagccaattttacctcatgtctccaatgacaaggggaaaaatttggcattccctggagacttaacaggatgcagggaagtcaggcacttccaagagctgacccaacagtctgcccttattcatccctgactggttgtatggtggtattagggaggacctttactggacactctgccaaataattagagcagtacttatggtctaattcaattggttatctcttttactctggcatttcatcaactggaggaaggaaaaataagacatcgtaaagtgaaagaggccccttatgggtctttcaactctcatgtctatttagacgcaattggagtcccactgggaataccagatcaatttaaagcccaaaatcaaatagctgcaggatttcagccagtattttggtaagttacaattaataaaaatgtaggtttgataaactacatttattgcaaccaacagcgatttattaactaccctagagatgctgttaaaagaatagctgagcaattaggggctactagccagatggcttgggaaaataggatagcctgagacatgatattagcagaaagaggaggagtttgcatcatgattaaaactcagtgttgtaccttcatcccaaacaataccgcccctaatggaagtataacaaaggcattgcaaggtctgactgctctgtccagtgagttagccagcaactaagggtaaatgggccctttacaggatgcctagaaaagtggtttggtaaatggaaaggaataatagcctcaattcttaacttcccttgcagccgtaatgggtgtacttactcttgttgggtgctgtatcataccatacatctgtgggttggtgcagaggctcatagaaatggcacttactaaatcctcccttaactatcctccaccttatccagagaagcttattcttttggaaaatcaagcagaacaactaagccaagacatgttaaagaagtttgaagagaaagagctgtaaggaaatgcaagaggaggagttgttagatatgagttctaaatttcttttaaaagaatcagtatgtcagtgtattcaattctttgccttctactttgaaacttaacttcctcgtaaagcaaccttttccgattacctgctccaccctgtctcattctgattacctgctcattctctaccctggctcattccgatgtcctctctgtcataaccatttttcctgccaaaccactcaccctgtcactctctttaaattagccaactggaattagtttaacctgtgtggactaaccctaggcaataggggaatgacacagcagcaggggccacatgcatcaggaataaggaccccttcccctcccttgtccgggtgtgcgctcaccattgctccatctgtgagagtgcaaccttctatagaagtaaactgcgttgctgagaagaaaaaaaaattttatattcgagtgctatttcttctgtggcaccaaaactttatttataacagaaaccaagctgtcagagctctggaaccatagctgtctgctaggtgtctctagccatagttttgcttccccttcacagatgcagtttgtctaaaattgaagccataacccctccaaagccactctttctccactatttattttgatgaatggcccatcgtaatctagattttcaaatcaaaatataggattatttcagttgctcttttctcatatctacatctaattaatcaaaaagactagttctgaagcaggaaattttcctgaccccttcatgggtgggggcaggaactggagcacataggatctagaactagctggccgctttgggtctggcaggggtggactccattcactgggtcccactgcgttccacaggaacggggagcacaggtgagtgggtgcaggagctggggccagtgcatgcaggagcaaaactctatgtggcccttggcagtgtctagaggggtacctaaggcccctgaagccccagagggtgtgtgttacagtgctcttttaactttgccatccactgatggcttaaatgttaaacagctcagtaggccctctgttttttggtgtgaggcacttgctctctgccagtgagggcagagggtcagtgtgacagcctttagtgtcacacctgtggcacctgagctcttgtttggcatccaggaaaaatcaggtcacaggaacaaattgaataatggtgaatgcagaggattttattgccgatgagagtggctgtcaatgggaaggggagctgaaaaggggatggagtgagaaggtgatcttccccaggagcaacgccattaagccatacctctgaagtcgagctgtttcttctctcctctcctctctgccattggagcctggggtttttatgggcacaggatggggggcagggggaccataggtggttttggaaaaggcaacattcaagagggaaaacagggatgcatgttctcactttgggctgtgttttcaggcttgaggttggagccctcactggggacctgccctcttctgcccagaatttccctgccttctatccctgtcagttccatttgcaaatacagtttatctcaacatttcttcttcaacatttcctctgccttacttctggtttccataatttcccccaaatcttttctatgttctccttgcccacctctaattattgggggaacctgcccccaatatttcaacataggttctttctattttccataagtgtcagtcagctgagaaatagagaaagagtacaaagggaggaattttacagctgggctgccgggggtgacatcacatatcagtaggaccgtgatgcccacctgagcctcaaaccagcaagttttttattaagggttgcaaaagggaagggggtgtaagaacagagagtaggtacaaacatcacatgcttcaaagggcaaaaagcagaacaaagatcatatgcttctgagggaacaggacaaagggcaaaagcagaactactaataagggtccaacaaagatcacaagacaaagggcaaaagcagagctactgataagggtctatgttcagcagtgcatgtattatcttgataaacatcttaaacaacagaaacagggttcgagagcagacaactggtctgaccacaaatttaccagggccgggtttttccccaccgtagtaagcctgagggtactgcaggagaccagggcatatctcagtccttatctcaaccacataagacagagcagccgtttatagacctccccccaggaatgcattcctttaccagggtattaatattaatattccttgctaggaaaagaatttagtgatatcttccctacttgcacgtccgtttataggctctctgcaagaagaaaaatatggctgtttttgcccaaccccgcaggcagtcagcccatatggttgacttcccttgttccctaaaaattgctgttattctgttctttttcaaggtgcactgatttcatattgttcaaacacacatgttttacaatcaatttgtacagttaacacaattatcacagtggtcctgaggtgacgtacaccttcagcttacgaagataacaggattaagagattaaagtaaagacaggcataagaaattataaaagtattatttgggaactgataaatgtccgtgaaatcttcacaatttatgttcctctgctgcggctctagcaggtccctctgtttggggtccatgacttcccgcaacatccaatcaatcctccataatgggcaaagtgatctttccatagtgtaaatgtgttcccaccactctctggagtaatcctacttaaaaccgttttcagcacaaaattcaaacatctaaacatgatcttgctggctttgcttttgtggctttaccctctttctccccaaacctagctagtgtttgtgctgcctgtaatgcccttctttctttgcaggggtcgccactttaggtcctggtcctccttcagaaagtttttcctctttctccccagcggggatagggtctgtttattttgacaccattagctcacttacacacattggtcacaagtctaggctgcaccgttattgaaagtttaccatctgactctgagtagcttgaggatcctatcaaaactcaggagatgctcagtaaatgttgattgaactatgactgttctcaacatacaaacgcaagatcatttaggaacacttgtcaaaatgtttttgccccttgagattctattttgggaggtaagcagtgggggtccaggactctgcattttgacagtcccctgatgtttgcatgtagaagtgcagggattattacactgacaaatctttaccatccctaagggggactttccttcccaggggctatctctggaagcccctcaaggataggggccgcatgctgtttctctaggtcagcaactaaacccagaaaacgtttattgagtgaatgatgaaacgacaggtgaatagatgaacgcaaggtgtcgagttaactattcttctacacaagtcctagcagctcccattgcttccagccgcagaaatggcccctggaaggcaagtcttccagcgagtggagtcactcttaactacatttcccaggattccaagggagccgcgcgctctgcgctcatcttcctaccagaaatcggcaagtcactgaccctcgtcccgcccccgccattccccgcctcctcctgtcccgcagtcggcgtccagcggctctgcttgttcgtgtgtgtgtcgttgcaggccttattcatgggctcaccgctgaggttcgacgggcgggtggtactggtcaccggcgcgggggcaggtgagcatgcgaaggttggaggccgcgccccttgctgaggcgcagctggctgctcttttcgggccggcatacgcgcgcagccgcagctgaggtcaccccgctgaggtggtggggaggggaatggttattcttgaggcaccgcatctcttgaggaggaaagagccggaaacacctggtctctcaagcaggtacagcccgcttctccccagcaccccggtgtgggcttcccaaggtcctgcctgagaggagaggccaggctgggctgctgattgcaaaactgggtgaaagttctccctgacccttatctgtgggcatcgattgttactcttcctgcaattaactctcttagatctttgcctagtcttttaaaggactgaaaagccgcgaggggcgggggctggaattcgccccctgaagcgcagagatgtcagctcctgaaaagtcattcggtcgttcagtgtttgtttccctctgtcgtaagattttaagttcgtgagaggaccttctttaaagagggcgtctgataagagcccttccccgttggagtttgtatgcttagcaagtcacaatctgttctcgaaatccactggagtcttggcagaggttgtaagctcaaatgcgcacaggggtcaggcgtatgatggagaaagaaaatgggagtaggatgggcacatctgaggaactggagagcagagaattccgaagtggaccggccagtgggaaagttgcctgtatttcaggagcggcaaaatggaaaattgttatgtgaaatagccccattttttaaagtacaaaaaattaaaacaaaccattcataccaacatagatgctgtgcagtgagattttacattagtttctcaccagtgggtgacctctgtaacctccaagtgcagggatcttgacattatgcacctttgattctccactggtagtaccttatacctggaaaggccctaatg

SEQ ID NO: 10775 - DNA, 6000 bp, Homo sapiens
cacctcatttgggctttcaatactacttgtcaatcccttatatgtccctagcaaatgttctctccaattctacgcacaatctactgaaaacgctcttcctcatgccacttatgctgacattaatttcttttctcttactaattaacttcccccctaccccccaaaaatactgcttttgggtattgactttttccatttcttacccctatatttacaaacaagtctataaatacatccactgaggtacactgattgcattcattgccccaattaaccacctcccttttccacaccctttgccctacaattttgtagtcccttcccattctgatcctgtgcttgcccctgtaacttccttttgtggaggcttgaagaagtgcttgcctatttctgccttctgtttggagctctgctaggaccttgaacagaagcccaagccaacctgctggaggatgagagcacatcgaacagagctgaattgtcctagccaagaccgtcctagtccagccagtctcagccaatctatcagctgaccacagagcatgaacaagcctgaagataagagttgccaaatctggttcagtagaactgcctacttaatctgcagactcatgagaaataataagtagtggttgttttcaaccactacattttgggatggttagttatgtaacaatggctgactaacacaaactctcacctccatttctccgctctcagaggaagaagaatcctttctcctttttaagacaaatttatctacttgccctttatcccattcctgcatttcagatctcatccttttgattatctctctctatattgcattttcaacctcttgctcccttttgacctctttcccttatatattaatataagcaagttcaaatctttcccattaaaataaaacaaacatacaaaaataaacctgtgtcttccacaagttattgacctattctgtcattcttttcatttatattccttgaaatgataataatttatactagtgcattagttagggttctccagagaaacagcaccaacaggatgtatatatttatagagagagatttattttaagcaatcggtttatgcaattgtggaggctcagtgaatttaaaatctgatgatgtaggctagcaggctagagactcagagaaaagttacaattggagtccacaggcagtctgccggcagaatttttttcttgctcagaggaggccagtctttgttctactatggccttcaattaattagatgagacccagccacatgatggagggtaatctgttttactcaaagttttccaatttcaatgttaatcttatccaaaaaacatcttcacagaaacaaacactataatgtttgaccaaatatctgggcaccatagtacagccaagctgacataaaattaaccatcacaactttctacacccttttttttttatttccattaaccattcaccttttcagttatcatcttattaatctacccaaggtatgtgataccacaaatgctttcttctttgtccttttactttctttacagccctctctcatagattgcttcctatctctctgactgctgctcttcaggtttatttatgatctttctccttccttccttccttgcttcttaccttccttccttctttctctgtcttttttttttttttttgagacagggtctctctgtgttacccagcctggtctcaaactcctggattcaagggatcctcctgcttcagcctctcaagtacctgagattacaggtctacaactgtaaatcatccttagggttgtgattcccagactacctgggccttctcatgtaacagtggctccagctaccaaatctatatcttccacttagctcgctcttctgagcttcatttcattcattctttcattgagggtgttaatagggtgtctatcttaatgaatgcaatgcactatggggccttgtggcaacttttaaaatgtccccccaaaaccctgcctcctgttattcacactcttgttttactccttcctttgagtgtgggcttccaatgaatagaatacagctaaagtaaagagatgttacttatgagattaggttacaaaaacactctggcttcttttcttattaactccctcttaccctctcttagagctgtctccttctgtctttctcaaaggtctttgctctgggagaagcaagctgacatgttgtgtaggaagccttacgaagaggcttatatggcaaggaactcaggtttcaggccaatagccagaaataacttgaggcctgccaccagctatgctagtgagcttgctagtgagaggaagcaggtcctctccagttgagtcttgagatgactgcctacctggtcaataccttgattgcagccttctgagagaccctgagtcaggggcacccagttaagttgtataactaatgagctggtcaaagggatgtggacgtaagtggtgtgtgcaacttctggaatgtgcccttaaaaggaaggtaacatcatgtttccctttgactccttttctgctggctggaatgcagtgtaattgttgtggtgagctgacttgaactgtgaggattcttgatccacaaaaaccatgagaaaataaatatttatggttacaagctgctatgtgtttatgtaatttgttttactgcaataaataacttatacagggctggctactcaggatccatcctcaaataatgaatgctccctgacatcaacgatccttcagtccattggggtgatagaacagtgtctgtgaccacagcacaacatggtaggtgttaaaatatacacaacaactggtgggagcacaaagagaagataatttcaatcgtacttgaaagtgaagtgattcactcagtgattttattttgtcattgaatgaggaggctaaatcatttgatgaaaatgaagagaaaaagatggtggtatacttgaggagaaaatgactttttagcacctatgctgggaagaatagttgaaggaattggaaacgaaacaactaatgatatttaggcagtgtagaactcagaattggaaataatggacttataggatcttcaatctgaggttgggattcattatgcaaatactttagcaatctggatataagattagagaaattgatggctgaatttgggatttcagagaagatgaaacagaaaatcaaggaaccaaggaagaagatgagctgagaaaaatagcaagacaattattgcagttctggctcatagagtttaggctgactaaggaaagaaagacaatcaaagcttctgagagtttagggaaaaggcacttgattctgatcccccacaaatcactgagactaaggagttgatgctgtatttggtttaaacctaggtgatgtattccctccctgaggtggagaaaactcacagctgagaagaaagttcaggtatgctaccatgaaaaccatgaatgcactagcagagaccactagttccctactttcttctagggtaagtgaacccctaatttttagcggtagaaataacaacttcatttcctaatgtcttctgtagctagacatggccatgtagctaacgagctggtcaaaggaatgtggacaaaagtggtgtgtgcaacttctgaactgtgcccttaaaaggaaggtgacattattgttttcctttcactctttttctgctggctggaatgtgatgtaactgcggtggtgagctgacttgaaccatgaggaagagactacatcctagggagggcagaacaacagaaggggcccatgtccctgaatgatctcatagaaccttcacaccagccctagtcctacataagggacaattaattaaacttgttcatttttcaaaccacttttaatgtgggtctctgtaacaagcatcaggacctatatttcacctatttcaggtgtccactaaaaaagataagctgggaatatatatgaccatagcataagacagaaagtagtaagcaataaatagagacacatgtaaaaattaaggatgtgtataataatcacctcaagtcaagctgggagctttcataagaggttgaagtttttgatccatgacagactccagactttccataaggtggtggatttgcaggccagggaatgtgactatgtgctcttaagaatcatccattgattttcctatcatttttctagaccttttgacttattgagaaaagaattatgtggcttatgataaaattggagtgaatcgcagacgagaaattattcagagtcctttcgttatctagagctgcaatcactaaataggtaaccactggccacatgtggctaattagatttaaattaattaaaattaaataaaattttaaaactcagttccacacaccggccacatttcaagtgttcaggggtcacaggttgccagtagctactgtattggacagcacagatagggaacatttccatcatgtcagaaaattctattggacagttctagagagatctaagagacagtacgtgtctctcgctcaccaatactccatctcgcctcagcctgcgtgcaatccaagcccagagactggtgcccaggctctaccacttcctacagaagatttaaaaactggtagtgccaacagaaattatttagcctagtcccgccaagaaggtgatgtggtaataaagtccaagattctgccacataagtcgggtcagcaagtcggtggcgaaaagagggccacgtcccagactttctgggaggaggcgggacaaaggggcggggcgagcgcagcgccctccgggtgggcgccgtcaagaggccgggggcggggccgagcgcggctgggcggggccttgagaggccggccgggggcggggaggctggcgggtcggcgcgggcccagccgtgcgtgctcacgtgacgggtccgcgaggcccagctcgcgcagtcgttcgggtgagcgaagatggcggccgagagggaacctcctccgctgggggacgggaagcccaccgactttgaggatctggaggacggagaggacctgttcaccagcactgtctccaccctagaggtgagaccgcgtcgctgcgggtgctgcgctgcgtagctgccgcgcgtctcacctttcccctgccccgacttgtccctccccatcccccgtgtttgcaaggaccgtcttggggtgacacctgtgacgcgagccccacctccggtgcctgtcagagggatgtgcttgggctgagcgcagggcctcctcaggagagcagcctgcggcccgcgggtgccgacctaatcctcagaggggccagaaccgaaccgagcattgcagcggcgctttcccagctcagctggccttcctcggtgtctcttgcacgtcctcctcttcaagccggagaagggcttgctctgcatcccagtaaacctccaccgagctcttttgaaggggtgctcgcttttcctttccagagggagggtgtgccgctgccaggggagcgcaatgaagtgagcgctgaggggccgagggtctgtggggaacgaatgggtgcactttcccaggaatggcccttcacggactgctggttcctcttgagggagctgcttctgatttggactgttaaataggtaaatgcatttgcctctttttgtttgtctttagttcctagacttttaaaaggtcatagtatttataaaatgtaaagctgaaggcaggattagtccaggaaactgctgttgtgtgtgtgtgtgttttcgaagttaccaagggagaaatagaaacagatctccactcctttttcctcttttctcgcttgatcagcgatctctgaagctgtgtgttcctgtttttgtcaaaggaagcaccctctataaacttaactgtattgggccctccttatatccagttccatttgaattgctttgcgtttgatgagagcacccacacctcacagcctaattttaagtgtgtgtatgtgaattaaaatgtatgaaatttcccagaggat

SEQ ID NO: 10776 - DNA, 6000 bp, Homo sapiens
gagaggcccagtaacctttcccctgtatcgctgctacctcccacctctgtgtcagagccattcctgctgggagagacaggtagagtgccccatctgttgagcttccttctcttctgttgttcattcttccttcattcatttcctaagtgacctcgccgtgccctgcatgggaatccaaggtgactaaagcatgctgcttccccaagaggcactcgcagttcagtggtctgggagcatctggcttctaccactaacaaaggcattttctcttactggtagagaaatgctctgaggctaattttttttttaatgcactgttttgtttgttgctgtcttaatagttgccatgttatattttatcagtttaatgttctaattttgtgcttgggccctgaggcaattcagtgaagggtatgatttggaaaatgagggaaataaagaaattgtccacagaagagacagcctcccaggagccgaggacaaagcataagtgccgacaatgaattttattaggagcaaaacaaaaacaacctgttgccagacagaaggtattagacaatcctggtgtggttttgttttcgttctttaatttaattccagttctgcatttcttccagggtcagccaaggatgcacaatccagttccttccccactgccttccaaagccttccacattcctgcctccaggcctaaactcagtgagcaccttgcctgccctgccctcccttcttcttcaggagaggtctgtaaccattcctgcacttgccaatacttattaagtgcctgctgtatgcaggcactgtgcaaaatgttggaaataatgcaaccaacaaggcaaaggtaagtctgccttcagggagtttacattctactaaggcatgcattctcaaatggggccttgatgccctcgaggaaatgaaaactggttcctggaggtgttggtggaaaaaaatcttagatcttacaatggtttgtatgctcatcatgtacattcatcacccatccagccacccaagcagaaacctgggtgtcaccaccagttccagctcccagccctctctgatctcaggggtccctcataaggcctggcccgtgaaggattccactctctccctgcaaacatccatctgccttgcttccctcgctacccagtgtagatcccaggacccagaattttagcatctctttgccaatactttagactcctgtgcccttttttccccacccatctggcaaagccctaggcctggataaatcccactatgtacatacatctccccagcctgcagctgggtaggtgagccctgatggaggaattcactcagcaggacaggacgagacacacatacactaaggaccaccaacctcaactggggagccaaggctgtcaggcaattggggattttgtgggcaagttgcttctcaacactctgaatgatcattctttcaaactcctcaccacctcttcttcactctcagcagaagaccttgcctcccactttgcagaaaaaatagaagctcaaaatgaaatctcccttaacatcccactataaacctacatctacatctgcacccatcctctctttgttcctgcttttgggttctagagaactcatccctcctcctccccaagacgaacccccccaacccacatgcctgatcccagcccctcgcacatgcttgagagaactttactcgctgattatctcccctatttcttacactcttggttaacctctctctcctggatctgccattcacttttaaacaaatctcaggtttcttctaccttgaaacacacctcccctaacatacatattggccctagcactttatctttctcgtcctttttatacaaaaacttctcgaaagacccactgcctccctcatccctcctgcactcatcagaccactgccatctgaccccctccatcatgccacacataaatagccctccctaagtccccaacaatctccacgcctgtccataaaccaaagcccagggctgcaccctcctcctatctgacctctcagagcattccctccatcaagtcttcccagctttctaaaatgtctcccttggcctccttccataagcccactctcctgggctttctccaagctgtccagccactcctgatcagcctttgcaggcagatccttttgtacacagccctaatctgtagatgtacctcaaaacttcatcctgggccatctctcttctctctccacattcttctccctgggtaagcttctcctcatccacagccgcaattatcatctgtctatcgacaacttctcatcttcatctctagcccagacctccacgccacgtccaaacccaggtttccaagaaccttctcaacatctgcatgtggtgactgtaaggcatttcaagctcaagatgtctaacatagaatatatactttcacctctctgtccacatcctcctctcctcaatcaaaccacccccctgtctcagtcctcttctagttttttctatctcagtgaaaaatactgcctacttgtttgcacagaaacctcaaggtccattctgacattgccttttccttcccctcccattccaacacacctctgtgaaaactttagttcctgattaactctgggaaccttccactctcttcaactccactgccaccagcaccctccccgctgcccccgccacctaccacccgccccccccccccacatacactgtcttctccctggatgcctgcctgcactcctaaccctgacttgtcttcccacatctactcatacccaccagacacactccactctccactgggcaggcacacaggtcacagtaaaattcagatttcatcctgtacctcttgggcttacaccgtcagtggcttccaatggctcttaggatggaggaaaaaaaaccctgatgtggccaatccttcacatggagtctgccctctgcccaccttctacactccccagtccccctgctctccctccggactatgctacaaaggcctttttgtgtctattctctcagctgtaccttctgccctaggccctttgcacaggttcttccctctgctcaggtttcttctctctgactctcccttacacacagttctggtttcctcataaccattaatttctcagggaatccttccctaactcccaagaaaaaaatagatccctccttcctgttatatgctttcacaataatagcacacacgcacacagagagcgctattgttcagagctcctctaagcatttctgctgagaattcatttactccttatgacaacccagtgaggtagaaattataattatctccattgtacagataaagaaactgagtcacagtgacttgcccaaagtcacctagttaatgaggcaaagccagaatttgaacccaggcagtgtgactccagtgcagcttttaaacactatattattacataagaaaacactatccttttccttcctgcacttacccgctgtttgtaacactgtattgtatgactattagtttagtatgtgtctcctccgttagactgtaagctctattggagtagagacaattccatcactagactgtaagctctataggagtagagactattccatccccaatggtaggtactcaataaatatttgctcaagaaaatgggaaatgttgaatgtgtacagacacataacattttccattcaagttcaagacaaagataaccacatacctggacctcctagggttagggactcctgcgcccgtaagaaacatgctgccctcagattctcaatgggtcggtgaagttaagaacagctcactctaacattctccagcctacctcaccttttccctgccatccttccctcaacaactacaacagcctcacatttagtattaatggtatgtgctttggttttagcaatcttttaaaaacacaaaacagggtcaacctcctcggaaaagccagtcagagactatctaatgccctcagagcaaagtccaaactctgttgggggtgggggagttgtaggccttgtctacttcttcatcctcatgtgccctcatttgttccctcttccccacctcaccccaccccacctggacagcccagcagcgcagactaggggttctgggtttagggttcccaggcaatagcagggtgttttctcatgcctagactcatgcagtgccctctgccagtcctctcctttgcacccagcaatttcgggtgtctttatgcctcagcttagatatctctctggggttcggtgctcctccttggggcgcccataggctgcatctgtccctgacaaggcacacaagatattgaactatagttgcttggttacggacagtcgtctctgtgagctttgagggcaactgccatgtattatgcatcttttgaatccccctagcctagccgggtgctagcccaagttaggtgcttattacagatttgttcagttagcgaatgaatcaatgaataaactggcaattcgtgtctggttcatgggcaccaaaaaccgtgcgaaatggataaatgagcaggtaatggcagtacaaagttcggatctagagaaagatccagattagggagttcagagatgagtaaaacgcagacccagccatcagagaattaacaaggaagataaatctcttcaagaagccagccggaaggattaaaagagagtcgtccaagtcccggccggccccgggggcgggtccctgtctagccccgcatgctccgcgccaatgggcggtattgttgatcacgagtctccgcccccttcgccttgaggggcggggccggccactcccggagaggggactacgtttcccggcgcgccgcgcggccggagcgaaagaggagccggaagtgtggcgcgcgaggtctaagggcgcgagggaagtggcgggcggggactaaggcggggcgtgcaggtagccggccggccgggggtcgcgggtatggccgaggccaggaagcggcgggagctacttcccctgatctaccaccatctgctgcgggctggctatgtgcgtgcggcgcgggaagtgaaggagcagagcggccaggtaagcgttcgtgggccgtgtgcgagggccgcgtgcaagatgtggagatcagcggcccgcggcccgcgccccgtccccaggcgacccggcaggcgcccggagccgggtcccgcagtgctcgacggcgcggccaggggtaccggaggagccgcaatctctgccttcccactgcgacttcagttcccctgggcctcactttcctcatccgggcagtgggttgggccagaaagtgtgctcgcaggggccgaactttgtaattcccgcttcccttacctccacgcccttcctggtagcgggtattttaagtttcctaagtctcccgccacgtggctaggctctgcgcggccccccctggggcaaggaggttgctgcgagtctcgggggtggattgcgaccagcccctcgggggagcgcctggaaaagggaccctacagcctcttagttgagctggaactcaggcctttagcgattgtctgtactgagacggtcagctttggtactcgaactcgtggtacagtcatttcttacttgattaattcaactgttaatccggtactcagggtgcttcctggtgttcgaatggtgagcaccatctctcagccctcctggagcttacactctagtaaggtagacaaatcaaagaatcacaaaagtgactatatgcttagcaccgcaataagtgttaagaatgagagggatgggccgggcacggtagctcacgcctgtaatcccagcacttagggaggccgagactagcggatcacctgaggtcagaagttcgagaccagcctggccaacatggtgaaacaccgtttctactaaaaatacaaaaattagctgggcatgttggcgcacgcctgtaatcctggctactcatgtggctgaggcacaagaattgcttgaacccgggaggcagaggttgcaatg

SEQ ID NO: 10777 - DNA, 6000 bp, Homo sapiens
ggataaggaatctgatagaatcagccctaccagttgggcaagtcagcctgtggcaatggtagaagacagtattaattgccctggggcttggggagtgaaggccaccaggattttttgtggggggtggcaatgaggaaaaggctagcttgatcatcactgtattctgtatcttctggggattttgacaaaaaaccctctggagcagatgatgggaatgaggagggcacttggcaccatgtaccacaagataacagctgaaggaaagagggtgttagtcaagggatttcctcaaaactggaaagggaagaaaaaaatatatctatatacacatactggaaggggaagagtgtgttacctgagagttttctcagacaaatgcccgagagcacagggtttggaatcccagaaacctctgaaaatctgtgccccagcttgccaactgggtgacctcaggcaagttgctttatctcactgccttgatttcctcatctgtaagatagggacaaaaactttgacctcacaggactgttgttagtattaactggaaaaatgccagtaaaatatgtcacacagccactgatatatctagtccccaagaaatggtagctcctgtgtagacgtaggacaggtgggctagagctataggcaggtgaggccgggcatggtggctcacgcctgtaatcccagcactttgggaggcccaggcgggcagatcactttaatgcaggagcttgagaccaactttggcaacatgatgaaaccctggctctacaaaaaatacaaaaaattagccagacgtggtggcccgtgcctatagtcccagctacttgggaggctgaagtgggaggattgctggagcctgggaggttgaggctgcagtgagccgtgatcgtgccactgcattccagcttgggtgacagagtgaaagtgaaaccctgtctcaaaagaaaaaaaaaaaaggaaggaaggagagagaaagaaaagaaagaaagaaagaagagaagagaagagaaaactataggcaggcagctttcaatcccattttaacaagatctcagtggttaagcattgaggttttagaggctgactatgttcaattcaggccctactcagccgaatcaccgtgagtgtgtgaactaacccctaaatctcagtttcctcatctgtcaagaagggataataataggccaggtgcggcgggtaatgcctgtaatcccagcactttgggaggctaaggcaggcagatcacaaagtcaggactttgagaccagcctggccaacatggtgaaaccccgtctctactaaatatacaaaaaaattagccgggcatggtggcggacgcctgtagtcccagctactcgggagtctgaggcaggagaatcgcttgaacccaggaggcggaggttgcagtgagctgagatcgtgccactgcactgcagcctgggtgacactgtgagactcagtctcaaaaaaaaaaaaaaaaaaaaagaatcatcccacttactgactttaaaaacctactttaaacctactggcttttaaaatctacccattttataagtctttataaaagaccccagaggccatgaggaaccagaactacccagttatgcatctggtggtagagccaatcttgagattctcctataaagaagtgattactctgtccatgaaatagattttccatcaccctcaaatttatttttgcccctcagaggtggaggaggagagcactgaactgtaatgtttatacccagaagctggtttctggcttctgacctttatactgtgggggatgggacctactccctgtagtcagcgacagaaagtttcaggtatctgttgactttaggtccttgggcagcaaaaaactgtgctccctaaaaatgtgtttctagtttcagagcttctgctgagagtcagggttatgagggctggcggtgtactttgcttttccagaaccagcaagatttccctggagcgaagaaagcctaggttcatattccatactcagtagttatttgccacatgactgcaagctacctagtgaactcttgggaacttcactttcctcctgagtgaaataagataaatagctctctttccaggctcagtgaggactaacttagatactgtacaaagataatttgacatgtaatagacaatcagtagatttagctcttatgttgatcttgcaaacccttcaaagctttggctcagtatataagtacaaaccatagatgaattgattttctgctggttatcctagagcaagactcagcaaacttttttttttacacggcaccgatagtaaacattttagtcttcacaaaccatagggtctctggtacaactactcaactctgccattctagtgcaaaagtaaacaaatgagtttggctgtagttttttgtttttgtgtttctttttttttttttttttttttggacggtgtctcgctctcttgccaggctggagtgcaatggcatggtcttggctcactgcaacctccgcctcctgggtcaagcgattctcctgcctcagcctcttgagtagctgggactacaggcgcatgccaccactaccagctaatttttgtatttttagtagagatggggtttcaccatgttggccagaatggtctcgatctcttgacctcgtgatcctcccgcctcagcctcccaaaaatgctgggattacaggcatgagccaccacacctggcccgatttgggctatgttttaacaaaactctttgtaaaacaggtagtttgtagtgtgccaatccatgttccagagcatcatcatttttttttccaaaacaatttttttcttttaaattaaatggagccatgatctcactgtattgcccaggctagtctcaaactcctgggtttaagtgattttcctgcctcagcctcctaagtagctgggattacaggcacctgccaccatgcctggctaattttttttctatttttagtagagaaacaggttttgccatgttggccagactggtctcaaacttgtgacctcaggtgatctacctgcctcagcctcccaaagtgttgagattataggcatgagccacattgcccagcctaaaaaaactttttaatagaggagagcatcatctcagactgtaatgtggggaggaatgacttgggtgtcttgttaaaatgaggattctgattccggacttctgggaagggacctgagattctgcatttctgacaggctctcaggtgatgctcatattgttgggctgaggaccacattttaaagacaagattttgtaatacttactacaaatccttctttccagaatctgttattgttgctgtctgtgaatagtcaggaaacaagatgaaaaaatcagagatgtttagaagaaaggaaagactgaccattttctttaagacagattttgcagatttggccttaataaaaggagtggtttactagtcacaaaggtcaaacagtctgcactggaaaatcgagctgcttaattcttggtcttcgtttcctctgtagagcacagtgacaatccagactcagcggtgtttagagacttggaaagagtttgagaagccacttagccactttattttcaggtttgtagttttgcctcccgttctctccccagtaggttaaaaatggggagtggcagggcccgctccacatccacagagtcagttgaggcaggtgtctgggagctgcactttccacaaggtccccagattcttcctatgcacactaaagttgaaaaaaattgagttagctaatacccttttggtatagattagggaactggagcccttctggagcagagattttgcctgtggttttctagcaagatatatcactacacccaggattccaactgaggtaatagacttcaaatattttgaagtgctccatgaaaaatgtagccattgatttttgaagggaaacaggagagacaaatggaagaaattaataatccaatagctaaccttttacccaacggaacctagtactaggctctaatttccttaatgtgttagttatctattgctccttagtaattatcccaaaactttgtagtataaaacaacaaatatatttatagtaactcacacagtttctgagagtcaggaatttgggaacagcttggcctagtggctccagctcagaggctctcataaagctgcagtgagatgttggctggagctgcattcatctgaaggcttgactggagctggagaatccacttccaacatgtctcactcacatgcttgttagctcgagggttcaatctctcactttgtggacctctccttgtggttgctggaatttctttgtaatttagtagctgacttcctctagtgcaagtgaccccagaaatggagcaagacagaagtcacagtgtcctttatgacattgtgatagcttcagaagccacataacctcacttcaagccatattctataagacacacagaccaacccgagacatgtggaatgggattactcaagggcataaataccagaggcagagatcattgaggccatcttggatgctggctaaccgtacttaaaatcctgtgttcatcccattcacaaatctagagagggactcttaccctcaattttcagatgtggaaactaaggcacagagaagtaacatattgatgatcatgcaactagtagtgccagagctggtatctgaagccatatttatctgatttcagatggtctcatttccagagattttaaaataaagtattggtataagtaatccttgtgtgaaagcaaagcaaaagatccagaagttcaaaccagccatgtcaattatccattgactcaaaaataagttttaagcacctactctgtccaggcactgttccaagtattaggaatccagtagtgaactgaacaaaacctctgtcttctgggagcttaccttcagacccttgatctgttagatatcctagagactgtagaatgtagagcttacatgaagactaggagccggggatcccttcctgcctggcctccaacccactggggaacccaggcaatcctttctttccctggacccagatgctgcctctgagaatgcggcccttggatgaaagcagaatcacctggggtaatgagtagacataacagattccccagcccagacctgctgaccagaacctgtagtttttgcaagctgtaggtgactctagtgcagaaaataattttgtggttcataagtgggcccaccagatcagcattgctcagagtatgggggcccatccctgtcagagttactggtggccctgagacaaagctcatagctcaagaatcagtgttttgaaggtaggactgggaaaaagcattttaaactagatctccaggtgattctatttactatgtgccagacactgctaaaggatttatagggatgattccattgaatacaacttgtgaggtagaaactcttagctactctatagttgaagagacgggctcagaaacaggcttctgatgagtctgatgccaaccaggtcctgcccagtctctctgtcttctgtcttgaccctgagtgggcctgtctgctggcactgtgtgggggtcactctacagggctcgggtcatggtccccctgtgtttgtttcagaagcacgagttctctgtggacatgacctgtggaggctgtgctgaagctgtctctcgggtcctcaataagcttggaggtgagtgagtggccctgagttgggtgcacttatgccatgttcagatgcatgcagatgttgcaggagagacttagggttaagctgatcataacagtaaaactaaaatatattgagtacttagcacgtgccaactactcttgttattttcttagtggcttatgtgaatcacatcatttaatcctcaccacggccatttcagatagttttttttttactagctccatgttaaacaggagacagctgaagttcagaaacattaaataacttatctgggatc

SEQ ID NO: 10778 - DNA, 6000 bp, Homo sapiens
ttttttattgttacagctttcaaaatctatgcaataaccctatggagaagatcatttcacaatgcagattctttgtttcaagtaattctcttaagttctgtttttccaagttatttggcatttatctatgtatctttttattagtttttgcatgttattttgtaaattttttcataaattattgtgtaaattaactttgatatttgttcttatttgattatgttggcttggatatacactttatgctaaaatctgtgtattactgtggccatcgcatacttaactttcaatagattataaactctttgagggcaaacaccattcttatacatttgtgtgtccctctgtagattttcctgcaaatagtaaattatcaattaatgtttgtaaatatataattggatatagggagatgttttatggtaagtgtcatcagttaaacatatgaacatggagttatggtataaattagtgactaaacatatattggttctgtatgtaatttttgacctcttttgagaaatagtttttatttctttcattttagacactgtgtgttgtaaaaacttaaaatatgattttctaatattttaagctcatgcgtgtttcttttaaaatcaccattcttatacataaagactttcttatggagaagatatttcaacattgtgtgcttaatctttaaaaacttttttattgtggtaagaatacttatgacatctatcctcttcacaaggttttaagtgtacaatatagtattgttataggtatgttgtatagccgatctctagaacttatttatcttgcataattgaaattttttttttttttgagacagagtttccactctgctgcccaggctggagtgcagtggcacgatctcagttcactgcaacctttgccttctgggttcaagcgattctcctgcctcagcctcccgagtagctgggattacaggtgtgcatcatcacgcccagctaatttttggatttttagtagagacggggtttcaccatgttggccaggctggtcttgaattcctgacctcaggtgatccacccgcctcgacctcccaaagtgttgggattacacgcatgagccaccgcgcccggcccaacgtaattggtactttatacccattggttatcaactctccatttccagcatctcactagttcctggcaaccatcattctattttgtgattctatgagttttgatattttagataccgcacataagtggaatcatgccagtatttgtccttttgtgactcacttatttcgtttaacatagtgtcttcagagtttattcatattatcacatattgcagtattttattctttttaaatgcagaattacgtttcattgcttgtatataccccattttctttattcattcacctatccatggacatttaggttgtttccacatcttagctattgtgaattgtgttgcagtgaacattggagtgctaatatcctttgttatttgaagagaatttcaagtcagtttttcttctgatttcagttcttttggataaagatgtggaagtaggattgatcgatcttatagtagttttgttttcctgtgtatttaatcttaaagcgattttcacattttttcttttcttttgctgaaaagtggatgaatctttttttttttttttttttttttacttttcttccctgctccttttttttttttttttttttcctggaaagggtcttgctctgttgcccaggctggagtgcagtggcatgatcatagctcactgcagccttgatttcccaggttcaagcaatcctcccacctcagcctcccaagtagctgggactacagatacatgccataatgcccagctaattattttggtttttagtagagatgaaatcttgctatgttgcccaggctggtggtcttagactcctgagctcaggtagtcctcccaccttagcctctcaaagtggtggaattacgggtataagccaccatgcccagtcttctttactttttgaaagaggaaaaacactgcacagttaaaaatttcatgagaacaacctgtatttaaatagttttgctgtttctttatgtctgtattcaaaaatgaagaggaatgttttgaaaatggctgtgttgtgtttagtaagatgggatagggtaggaaggaactgggcagatgactgaagagatgtgctagtaattagaatttcattttccacacacacacacacacattttgaaagtctagaataattaattgttgtttgcttgtttttgcattacagtgaatgatttgggaggggacttcaaaggagttggtaaaggctccttagctgctgataaggttgttgaagaaataagaaggagaggtggaaaagcagtggccaactatggtatggtatttgagagaactatactatttattttccttcaactaatgctatttgtcacattaataatctttgagcaaatatctcagtattccagtataattatgattttctaagtctgccaaagttttctgactacatattttatatatgtgagaattgttaaaacttttgatgtagactatttcatgattctaagctttgttctattgtttactatttttattagtgagcacatgatataattagtaaattattgtagatatggatatgttcttctgagttctgttgggtgaatagtatttgtcgtgtactctgacccacagaatttagaagtcctttggaagggaggttgccgaaatttcatacaaattttcctttccctcagattcagtggaagaaggagagaaggttgtgaagacagccctggatgcttttggaagaataggtgatgtttctttgtgttatggctcttgtggagcaacttctaccttcctaatgaaatatttttaagttgactttcatttactaaacagatacctctttcctcataatcacattttaaaatttgatttataagttaattattgtacttatttcataaagggtttaattgaggtggcaattttatggatatagtgttgagtttgtttttttgcaccttaagtgctttaaaaaacttacgagcgtttactcagtgccctttttaaaataattcagttaaacctcaaagatgtttataagattaaaaaataaaccaatattttggcaatagagtacccagtggattcttttggataattataataatttggattaaaataatccaatatcttgcaaattacttaagatgatttctctataataaaaatcttaatttttaagaagtatttcaaataaattgttgagtttgttatttctgtagctaatcttcccagtttagtcccacacactcttaataaaagattatttaactactagatggagacatcacggaacataagcccaacatgtttacaatctgaaaaacattacttattcttaattgaatgtgctctcccttttttgtttggtctattacacttatttttctaattttgtttgattgaactcataagaaccatgttcacatatcgtctgacagggatagaaaccacaaaaatgtgaaatcatagggtgaaaatagccacaagagggttgaaccttaaaaaataattattttctttcatagtgagaaaataattatgtatcaagataaggcatcagtttgtaactctaatggttttctttttggactttttacttttgagtggcaagggaaaaatgtaactttaacttgctaagtgaattttgaggttaagtgtagaatggcttatggttctgattccttagaacctaagagttgtaaaatggctaattctataattaagtggatagaattttgatagagaggtgggaaaatttatagatgttagtttgagaggaaggtgcttgatataatgtgatacttaggcttttgtgagtcaactttttttgatataggtatagacttttgttttgaaagcactctttacctattatatttactttttcatggttaaaaaacgccagttttgagagaaatgtgagttgtaagcaaatgcaaactaatatgcttgcttttagatgtaacttgtatctttttatattgtagatgttgtggtcaacaatgctgggtgagtatttctttttcatttttagtgatgtgtgtataatttttttaaaaagtatatactttcctccttttaccctatacaacattgattttttagaattctgagggatcgttcctttgctaggataagtgatgaagactggggtaagttgtttttagtatttctctggggaacatacttatccatttagcctttttagtatttgataaatttatacatttaaggaaaaacctgcttctatctacttttgctgctaatataaatgatgagtaaactgtatactgaagacaatgaatagttagaagtagcctcttttagaaaacatttaatacttttaaaaaatgttaaatcatttgtttagaagatatctaaaaggattttatttcttcaggtttccctctcccctttttttctccttaagaggttgtcagcattttctagaggtattaactcttaacagcctttaacgtgcttatccagctgtgtgaatctttttcaagaacaggagcaggatatttaagggagtctagtgcactaaaaatgatggagattttagaacaggttaggacaaaacctggatataattttgaagcttctagtaaataggaaagttttccattctttctgaattggaaagattgagtttagataatgaacaaatcacagttaagaattttttttttcttttgctcctctttgtgcttactttcattggccatcagaactaaaatgaacagtggtggctgagacagagggaagcatggcaactgaggtgaaacaattgtatcattgtttatagagtgtgttttgggggaatagtgcctgactgtcttttggaagaagagttagtgtctttgatttagaattaagctaagaagagcttttagtttctgcttcccttgtaacaactggggtaaaaaagaagctgagaaagataggatttgctggcaaagggggcctatgttggtgcttttcttggtgctgcaacgggactgaggtatttccttctctgattccatcctactaagccactactcctgactacccttctccctctctttcttttttttagttccttttttcactcttacattcttcttctaatatacacatgaaaacatttgttttaccaaaaataagtaagaatgcttaaaaaacttgacaattaaaatctagaattgtctgtctgaatgtttcataagtggtctgttcgttagattgaaatttgtgaaaacaggcctctcactaactcatttgcaaatggtaacaatagggatctagtgagtattttgtaaatatttcttaatgagctatgtgatttatgattatgccttaactgatgttagtgttgggtgccagttatatttataaaaatcttggattttatattagcaaaatttttatatgaagtaggcataaaataagggcgtagcattatatttagatgtgtataggcattacattaattttacaaattatgaggagagctgttgtagttctaagtgtgaagtattgattagtagcataactggaataaaggcaaaatactcattggggtgtgacagtaggcaattttatacattaggtataaaatgaacatctttgtataaatacaacattgcttatgttgattcttagacatgcctaagtttttacaaaatatttaataaaaataatttattgttttagatataatccacagagttcatttgcggggttcattccaagtgacacgggcagcatgggaacacatgaagaaacagaagtatggaaggtagagttgcatgtggttgtcaagggggatttaagatgttgtgtctgggggttcttgtgtacagggaaagattatgtgaagtgttgtgaaatgatttatgacattgaggaatatgtac

SEQ ID NO: 10779 - DNA, 6000 bp, Homo sapiens
aaggatgtgatagctgaaggtcaagcagccaccgtgaaccataagataaccagaagataaactatgcactgaggaaggtggaacagaaagagaatatcctgagcctctaatgtcactgtgaagttgctatgagagctgtggactgcctagacttcctgtatgtgtgacaaaaaataaactcaagttttttttttttttttttgagatggcgtcttgctctgttgcccaggctggagtgcagtggcacgatctcaaatcactgcaagccccgcctcctgggttcacaccattctcctgcctcagcctcctgagtagctgggactacaggcgcacgccgccacacctgatttttgtatttttagtagagacggggtttcaccgtgttagccaggatggtctcaatctcctgaccttgtgatccgcccacctcggcctcccaaagtgctgggattacaggcgtgagccactgcgcccggccttaaacttaagtttttaacccatttctttgttgctattgctttctatatagtgtttttgtttttatggtggccacatattacttcaaaaattagatttaaaaaacaaacaaaaaaaatgctaggaagcatgacaatcagcaaagtactgaattgtttataaatgtggcaagagagttaaattcataatggatgattcaaaagaaagggggtgaggggctgataccgagaaaggtaaaatgatgatagttctaggctgggagtgatggctcacgcctataatcctagcactttaggaggctaaggtgggaggatcacttgagcccaggagttcaagaccagcctgggcaacaagtgacaaaaaacacaaaaaattagtcaagcatggtggcaagggtctgtattcccaactactcaggatgctaaactgggaggatcacttgaggccaagagttggagaccagcctggggaacatagtgggacctcgtctctacaaaaacataaatatttaaattaaaaaaaaaaaaaaagttcagcctgggcaacatggcaaaaccccatccctaccaaaaaatacaaaaattagccaggggtgatggcatgtgcctgtagtcccggctactcaggaggctgaggccggaggatcacttgagcccaggaggcagaggttgcagtgaaccacgatcgcactactgcactccagcctgggtgacagtgagaccctgtctgcaaaaaaaaaaaaaaaaaaaaaaaaaagtcaaacataataaagttactacataacccagcaatttcactccttgaataaaaaactcaagagaattaaaaacattgtccacaaccttgtacacgaatgtgcacatcatcagcattattcataatggccaaaaagtggaaacaacccaattgtctatcaagtgatggataaataaaacttggtatattcatacaacagattattattcagctaaaaaaggaattaagtattgatacatgctacataagaatgaaccttaaaaagtgttatgtcaagtgattaaaaaaaacaaaaaaaagtccagaagagcacgtatcattccatttgtatgaaatatccagaataggcaaatctacagagacaagagagttggctgggtatggtggctcacacttgtaatcccagcacttttggaggccaggactggtgcattacttcaagaccagcctggacaaaacctcatctctactaaaaatacaaaaattagccaggccactcgtggcgcatggctgtaatcccagctacttgggaggctaaggcacgataatcgcttgaacctgggaggcggaggttgcagtgagccaagatctaactactacactccagcctgtgtgacagtgagactctgtctcaaattaattaattaattaatagaaagtagatgagtgcttgcttgggggtggtgaggaggggacaacatggactgacagttaaggagtaaggggtttttcttagaataaaatgttctaaaattagattgtggtgatggttgcacaactgtgaatatactaaaaaccattatattgtacattttaagtaggttaattttatagtatgtgaattatatctcaataaagctgtttaaaaaaagaaatacagctggcctggtggctcacacctgtaatcccagtaggttgggcggatcgctcgaacgcaggagttcgagaccagcctaggaaacatgatgaaacccccatctctacaaaaaaataaaaaaaattagctgggcatggtggtgtgcacctgtagtcccagctactcaagaggctgaggtggaggatcatttgagcctgagatatggaggttgcagtgagccaagatcacaccactgccctccagcctgggccacagagtgcaatcttgtctcaaaaaaaaaaaaaaaaaaataggcctggcagtggctcacgcctgtaatcccagcactttgggaggccgaggcggacagatcatgaggtcaggagattgagaccatcgtggccaacatggtgaaaccccgtctctactaaaaatacaaaattagccaggcatggccaggcgcagtggctcacacctgtaatcccagcactctggcaggccgaggtggggggatcacctgaggtcaggagttcgagaccagcctggccaacatggcgaaactctgtctctactaaaaaatacaaaaattagctgggcgtgtccgcaccactgcactccagcctgggcaacagaaggagactcagtctcaaaaaaagaagaaaaagaaaagaaagtctacttacagcttaatatgattaactatagaaatctaccgatgtgaaagagtatctaacaatttctaagacccagaaaagctgacatcctagataccttaccaattttgatcgccacttctcatgacagaagatgctaaacatagcttctctcggatggaccatggctctgtggggccagtgcttagcagcttgtgttctgggaaagggagaaaaaaaaaaaagccttggaaacaaccactgagactgtagtgctaagctccaaaatccccaaaaagaggactaaaagcctaatacaaaacatcccaacttgttaggacaaagtgagctactataaccaaatcttgattttcacctctccaagtgaaatatcaccagtgaccggggtacctattcgttgcatgtgaattattaacattttatttcttaaaacgccatggcttgaagctccgctttattaagaaacagggaatgtcagattaggcagttctccctaaaagcccagttttaagaatactggactttattccagtttgaacttattcagggcttatttcccaggaacccgagcggccagcccctcctactaccccgcctccctcttagcataaacttgtttacttctctcagatcctctactccaaatgtcgggggtaaaagagcttttcagtccaaaaaaagaaaaatggctgaaatccccgagatgcaatttcctgagtggcaagaaaagctcatggttaaaagaccccacttccactgcctcacaaacgtcagacaaaaaaatgaatggctctttgaggtgccggttactccgtctggctcataacatcttttcgtctgcacgcccaagtttctagagtgcttttacggttaacccgcagagttcctaacacactaggattcactaagctgcttctctcacacctccgctctctccctgagaaacaagaccccagatttctgggcccccaaacgttggtcttcacgatgctgtagagcgcaggtctctgaaaaccctgggctctcaagcaacccacttctcccactccctaagcgtgtaacaaaaatatggtgcctagcctcggatctacaaaggcctttcacgcaaaacctgctcagatactcactgcccgttcccgtcgccatcttggccccgaagtctccaaccctgaggagagacggtctggaagggccgaaaccctggaattctgggaaatagtgtaccggcgttggttcgcggtgcctcctgggaaatgtcgtttttccccttaagacaaagcaagcaccctaaaccagttaccctgtgcactcctgttaagattgttgctaaggaaggacaggagttggctgctgaagcctcaagatttcctttaggctcttaggtaagaaatgtctaaggttcaaggaaaaaggttaagttggaagaatcccaggcaaaataagtgcgaatccacgacagttggtaacccggacccacattagaactcagaggtcaagcagaagcgaacgactggaattccagtcaggcccgccccctttccttacgcggattggtagctgcaggcttccctatctgattggccgaacgaacgcagcgcgtaatttaaaatattgtatctgtaacaaagctgcacctcgtgggcggagttgtgctctgcggctgcgaaagtccagcttcggcgactaggtgtgagtaagccagtatcccaggaggagcaagtggcacgtcttcgggtgagtgtgcggctgtgctggagcccgggttaccagctcttgcccgcgcggaataggctttaagaaatcggagctgcagccatctgtttttctcttaatgctgcatctctgttctcacggtggtccttggggtgaggttagagaaggagccgagggatcctgacaccacctccacagcaccggcgggcgaggtgccctactttaggcgtagccttctgcttttggagccagatgtctgtggacttctgttcgcgttcagaaatgccgcctcaaacttctctcaattgttcattaagtgaacttctctcattcccttcccctttgccgataattggaggggaaaagaagtaggaagcgggacacggtgtcctggggcaagggacttattacctaaaattcgcggccccttctgtccctaaaggttcttctccctgcccactttttggtctctttttagacctaggctgcccctgccgtcatgtcgcaagggatcctttctccgccagcgggcttgctgtccgatgacgatgtcgtagtttctcccatgtttgagtccacagctgcagatttggggtctgtggtacgcaagaacctgctatcagactgctctgtcgtctctacctccctagaggacaagcagcaggtaaaggaactggggagtggctggggcggaaagtgatatcctcaggccaataattgtccatacagggtagtatgaggtcaaagactagcaatcctaaaggtctgagatcaattcaaaattaagggcatttaggacaaaatggctatgaaaagaaaaaaagaaaaaaaaattaagggcatgacaagtaaaaaaaaaattgagttgtgtgtccagaagaactataatttgcattgcattaatgaaatagcctcaaatgcatgctcttagttaatctttcagggaataatagttatctctctttgccttgaggcccagttgtgctaaataatttgcacaaggtcatataggcattatgtaagtggaatgtatgttcaggttttaatagtatcaccatagcttcaatttgttgtaggtttcctgctaggccagggtttctcagttacagcattattgacatttggggctagacagttcttgtagggatctgtcctgtacatttcaagatgtttaatagcattcttggcatttacccactagatgtcagtagtgccttcccatttgtgacaatcaaaaaatgtcttcaggcacttcaggcattgctaaatggcccttggagtggaaatgaccctggttgagaaacactgtactaggtcctatgctaaacattaacatacattgtcagattttgtgctcttatagagtttctcttagagacttataaagttccatgagagcatggtccttgatgatgtctctcactatggactatcagagcttctcggttcctaggccatagtagacactctaaatatctgggttttttttgttttttgggtttttttgttttcgagatggagtct

SEQ ID NO: 10780 - DNA, 6000 bp, Homo sapiens
ggatttcaagaccaacttaggcaacatagcgagaccttgtctctacaaaaaatgttttaaaaattagccaggcatggtggcatgtgcctgtagtccaagctacttgggaggctgaggcaggcggatcacttgagcccaggagttggagactgcagtgagctatgatcacaccactgtactcaaggctagatgacagaggaagaccccatctctaaaaacaatgtttttaatttaaaaaataagtctgaaagaacaccacaaacaagtataagtctaggaatgaattctaaatggaaagaaaagacaacagactaatgtctgagactaccaggtctgtataaagcataagatctccacctcctctccaggctgtcctgtgccccacccaccgaaaccaactttgctacggtcactgatgtcctccatgctgcttcctccaatgggcatcccctggtactcatcttacttggtgtctcagcagaattcatacttccctccttttgaaacaccatcttcttttggattctgtgacatgacattgacctgattttcttcccttttttttttttttttttgagacaaggtctcgctctattacccaggttgcagtgcagtagcacaatcatagctcactgcagcctcaaactcctggcctcaagcaattctcccgccttggcctcccaaaatgctgggattacaggcaagagccaacagcctttttccatttatctaacaaatctttcttgtctttgccaactcctcctcttctaactcacccctaaatggaccaagtcctgagccatcctctcttctcacactataatttcttcttgagtcatctcatctattaccttggcttttttccataaatacctatgattctccaattatctccaacccagacctcacctctggctttctaattcagacataaattttctggaagttgacatttggatgtctcacagcactccttaaacagtgtccaaaccagaaatcttgatccctgcatcccaaacccattcctctcccacacttccccagctcagtaaatatcacttccagccacctatttcctcctttcctccaggcccgaaatctgggagtcatgttgcctaggctggagtggcacgatcttggcttactgcaagctctgcctcccgggtttacaccattctcctgcctcagcctcccaagtagctgggactacaggcgcccgccaccacgcctggctaatttttttgtatttttagtagagacggggtttcaccacgttagccaggatggtctcaatctcctgatctcgtgatctgcctgtcttggcctcccaaagtgctaggattacaggcgtgagccaccgcgcccagcctggaagtcattcttaatacccttcactccttttacccttgccatgagccctacaaacaactaacttaccactaatagtcacatcgtccctcttattaatcatcatcctagccctaagtctggcctacgaatgattataaaaagggttagactgagccgaattggtatatagttcaaacaaaacgaatgatttcgactcattaaattatgataatcatatttaccaaatgcctctcatttacataaatattatactagaatttaccatctcacttctaggaatactagtatatcgctcacacctgatatcctccctactatgcctagaaggaataatactatcactattcattatagccactctcataaccctcaacacccactccctcttagccaatattgtacctatcgccatactagtctttgctgcctgcaaggcagcagtaggcctagccctactagtctcaatctccaacacgtatggcctagactacgtacataacctaagcctactccaatgctaaaactaattgtcccaacaattatattactaccactgacatgactctccaaaaaacacataatttgaatcaacacaaccactcacagcctaattattagcaccatccccctactatttttcaaccaaatcaacaacaacctatttagctgctccttatccttctcctccgaccccctaacgacccccctcctaatactaactacctgactcctgcccctcacaatcatggcaagccaacgccacttatccaatgaaccactatcacgaaaaaaactctacctctctatactaatctccctacaaatctccttaattatgacattcacagccatagaactaatcatattttatatcttcttcgaaaccacacttatccccaccctggctatcatcacccgatgaggcaaccaaccagaacgcctgaacgcaggtacatacttcctattctacaccctagtaggctccctccccctactcatcgcactaatctacacccacaacaccctaggctcactgaatattctattactcactcttactgcccaagaactatcaaactcctgagccaataacttaatatggctagcgtacacaatagcttttatagtaaaaatacctctttacggtctccacctatggctccctaaagcccatgtcgaagcccccatcgctgggtcaatagtacttgctgcagtactcttaaaattaggcggctatggtataatacgcctcacactcattctcaaccccctgacaaaacatatagcctaccccttccttgtactatccctgtgaggcataattataacaagctccatctgcctgcgacaaacagacctaaaatcgctcattgcatactcttcaatcagccacatagccctcgtagtaacagccatcctcatccaaaccccctgaagcttcaccggcgcagtcattctcatagtcgcccacggacttacatcctcattactattctgcctagcaaactcaaactacgaacgtacccacagtcgcatcataattctctctcaaggacttcaaaccctactcccactaatagccttttgatgacttctagcaagcctcactaatctcgccttaccccccactattaacctactaggagaactctctgtgctagtaaccacattctcctgatcaaatatcactctcctacttacaggactcaacatactaatcacagccctatactccctctacatatttaccacaacacaatgaggctcgctcagccaccacattaacaacataaaaccctcattcacacgagaaaacactctcatgttcatacacctatcccctatcctcctcctatccctcaaccccgatatcattaccgggttttcctcctgtaaatatagtttaaccaaaacatcagattgtgaatctgacaacagaggctcacgaccccttatttaccgagaaagcgcataagaactgctaactcatatccccatgtctaacaacatggctttctcaacttttaaaggataacagccatccgttggtcttaggccccaaaaattttggtgcaactccaaataaaagtaataaccatgtacgctactatacccaccctagccctaacttccttaattccccctatccttaccaccctcattaaccctaataaaaaaaactcatatccccattaagtaaaatccattatcgcatccacccttgttattagtctcttccccacaacaatattcatatacctagaccaagaagtcattatctcaaactgacactgggcaacaacccaaacaacccaactctccctaagcttcaaactagattatttctccataatatttatccctgtagcactgttcgttacgtgatccatcatagaattctcactatgatatataagctcagacccaaacattaatcaattcttcaaatacctactcatcttcctaatcaccatactaatcctagtcactgctaacaacctattccagctattcatcggctgagaaggcgtaggaattatatcctttttactcattagttgatgatacgcccgagcagatgccaacacagcagctattcaagcaatcctatacaaccgtatcggcgacatcggtttcatccttgccctagcatgatttctcctacactccaactcatgagacccacaacaaataaccctcctaagtgctaatccaagcctcaccccactactaggcttcctcctagcagcagcaggcaaatcagctcaattaggccttcacccctgactcccctcagccatagaaggccccacccctgtctcagccctactccactcaagcactatagttgtagcaggagtcttcctactcatccgcttccaccccctagcagagaataacccactaatccaaactctcacactatgcctaggcgctatcaccactctgttcgcagcagtctgcgcccttacacaaaatgacatcaaaaaaatcgtggccttctccacttcaagccaactaggacttataatagtcacaatcggcatcaaccaaccacacctagcattcctgcacatctgtacccacgccttcttcaaagccatactatttatatgctccggatccatcatccacaacctcaacaatgaacaagatattcgaaaaataggaggactactcaaaaccatacctcttacttcaacctccctcaccattggcaacctagcattggcaggaatacccttcctcacaggtttctactccaaagaccacatcatcgaaaccgcaaacatatcatacacaaacgcctgagccctgtctattactctcatcgccacctccctgacaagcgcctatagcactcgaataattcttctcaccctaacaggtcagcctcgcttcccagccctcactaacattaacgaaaacaaccccaccctactaaaccccattaaacgcctaacaatcggaagcctatttgcagggtttctcatcaccaacagcattctccccacatccaccccccaaatgacaatcccactttacttaaaactcacagccctaggcgtcacttccctaggacttctaacagccctagatctcaactacctaaccaacaaactcaaaataaaatccccactgtatacattttacttctctaatatactcggattttaccctagtatcatacaccgcacagtcccttatctaggccttcttacaagccaaaacctacccctactcctcctagacctggcctgactagaaaagctactacctaaaacaatctcacaacaccaaatctccgcctccatcatcacctcaacccaaaaaggcataatcaaactttatttcctctctttcttcttcccactcatcctaaccctactcctaatcacataatctattcccccgagcaatctctagtacaatatacacaccaacaaacaatgttcaaccagtaactactactaatcaacgcccataatcatacaaagcccccgcaccaataggatcctcccgaatcagccctgacccttctccttcataaattattcaacttcccacactattaaaatttaccacaaccaccaccccatcatactctttcacccataacactaatcctacttccatcaccaaccccactaaaacacttaccaagacctcaacccctgacccccatgcctcaggatactcctcaatagccaccgctgtagtatatccaaaaacaaccatcattccccccaaataaattaaaaaaaccattaaacccatgtaacctcccccgtaattcagaataataacacacccaatcacaccactaacaatcaatactaaacccccataaataggagaaggcttagaagaaaaccccacaaaccccattactaaacccacactcaacagaaataaagcatacatcattattcttgcacgggctacaaccacgaccaatgatatgaaaaaccatcattgtatttcaactacaagaacactaatgaccccaatacgcaaaattaaccccttgataaaattaattaaccgctcatttatcgacctccccaccccatccaatatctccgcatgatgaaacttcggctcacttcttggtgcctgcctaatcct

SEQ ID NO: 10781 - DNA, 6000 bp, Homo sapiens
aaattcttttcccataagtcacccagcagatctcattggtcaaccttgcattacatgcccatggctaaatcagacacagcccagatgcctgggaccagcctaatcacccttcagcatcacctcaattttttagctatgcagaagaggatggtaactcaataaatggacttctgctagaaaggaagatgacaaggggctgaaattggttaagtatgcttcagggctgagacaatttcctttccccatgtttggatttttttccaaataaactccaacctctctcagccatgttttaagttttctctgattccaccttgagcctaacacacagccttacataaagtagataccttataagaatattatcaagtattagttttatgaaattcactgtagccagatcaataaagcctctatggatcacctgaaggggcataggaatcactgtcatacacagagtctattgtctcatgatttgcagtgctaggattctcccctgtagggagccactcttctgtatgttctgctggtaaatgattggtcactgaacaactggaaaaaaagaactccaccaaccttccatttctttcacttgccaatcagagcggtgatctttcatggtttctcttgttttatgctgtgctaaatcttttactaatatcccaagctgagcagtgttggtagtcaagacttatggctttagtggtagaatttatgtgatgcctggacacttttggccccaaatattttccccattcttcctgaaattcttgactttatacacattgactgaacatgtgtctttattttgctgaatgtctaaaattacatcatgagaagctcatctctttacattaacaagcttctaccttttaatatctccagggctgtcagcacatgaagacagggagtagtcatcatccacttcggaaggaatttaactgacacagccgctcacagccactaactcttgatgttgaaatctacctgtcttggtgatcatcccacaaggtggtaaggggtaggtaacactggaattttaatcttaggaaagtggggaggcagtgatgatatttaagcaatcacttccaaaccagaccatacatcagaaatatatgagccattgtaaatactgaatcctaaaccccagtccataaatttaagtcaaacagtggctcaggacctagtattaagagagcaaagcttagctgaggttgggcaggtataactgctaagccataggggagcaaagttactttatcagagggcggcctaagtcccattaaggggctgaggatgagaccagagaggtggtttagggtgggacccagcaaaggtaggttacctcaagctttcctttttgttgcaaaagtaaaagttctctactttataattttgcttgggattgacccttctagcattggataatggtcagttgcaaagagatgagtgaaaaggggtgaaagcaacaatgcaatgaaggcaaagggagtatttggaaaatattttcacactaaatatggtatgatcaggtgtagtcataacaaagaatggtgtatatagatggctttagagtgtgtacatgtgtgggcatgtgtgtggtgtgtgtgtgtgaatgtgtatttgtgttcaggaaagcatacagtaaagaaaagattggataggtagaatgtacctttttatgacatgccaagaaattggcactttaccctacctgagatggggagccactaacatttgaaacaaagcagtaattggaaacatataagtgtcttagaaagatatcattagtgaaaatgaagagaatgggttggagagataagaaaagaaaatccagtttaaaagttacatacagacataagatgagggactgactgggtggcaggagttgcatggatgggaggagagccaagagaatttggagagtggctgtgaggttgaaaacatggggacaaattcctggctttcatgtttgtgtgataataatactgccattaaacaatggtagccaatagaggagaaaattctggaggacacgtattaaattcagttttggaaatgttgaatctggcttacttacagactgtctagctggagaaatttggtggctgatggaaatactgatctggaactcagaaggggaggctggctggagatagggacctgtgcagggaatgggcccagagacaatctgcagaatgaagaggaggattcaggatgaaactctgcaaacaccaacaaggaaagagcctgtgaaggagatgacgggagagcagcgaggaaaggaggagaaaaacaggaagagaacagaagccagaagtacaggatgtttcaggaggaaattaaatatcaaaagaaatattttttttacaataagaaaaattagaatatttacagactgaggggaagttacattagggagagaatttgaagacgtgcactgaagagggatgagtgctggggcagggtttcagggatagtaagaaaagatgtggtctagaacctgggtggaaggactatccttgacctgtgaacatactggagaaaatacgtgatggccttcatttcaaaattacatttgccttctgctaatggcctatatttagtttatagattatctaggcctcttatgttctctctttttcatcctcagactgcccatttaccattttcatggtattaagcacttagaaatgagcactgaaaggtgataaatataggactaaactatgagtacattttcttcttaagcacctgtgaaaaggtttctggaaagcaaatttgaatgtaagtgttaaaataagatttgaaggtgatatgtttttaaagtggtttgcatgtatgctagagatgatacaagatgtctaaacacacatgtgttttatacatattaacaggtatatatatgtatatacaattgtatatacataacacggcatattgtatactcaaggaacaggttttctcttaatttaagatcatcataatgaagctctgtcacatacatagcttttaaatttgaatttttgtatgtgatatgatgcaattgtacatactataattttataacagttatgtgtgtgtgtgtgtgtaatgatagtgaatgagaaattttatacagatagggtaatgccatacaaaattttagatactactgagctagagatttcacttattcatgttaacctgggatactcatggtaccaaaaaacgatgctgcttctccaggaacctcaagtgatatcacaaatgagagagctttcttatgaggatcttaaattaagagaaaacctgttccttgagtatacaaatggctggagtaggaggagggaataaatgcacaaaacttttgcagatgttattttcgatcatctctgcttgcttgccctgaggtgtccttattaactccaggttaagtctctgttcctgacttcatgccttgcagcgttacattccattaaagaatttctcactgctctttacataacaagcctcaacatttcaaagataagaaaatgatgttatgtttccacagcttattttaatactgggtaattacagagagatgaaaagcttgggtttatatttctattagctctagttgtattccagagactcattttcaatgtcaagtacaactttacctgaaatccgtagattagggttggtggcccctcaaaacaactcatctggttcccggagaaagtatctgaagcacccaatacaggtgagacagaaaacctaagatgcccattctctgctcgggctggggacagtggtgctatttctctcttatctctgacctggagaaaatgccaccaggttgacgtggactaggattcattcctccacaataaagaatagcaagtggctgaatgtcagtctcaaaggaggacagcttaggaaatatttatcttctttgtaaaaaaaaaaaaaaaaaaccacacacacactttaaaatcagagacaacttttttgttttgttttgatcgctgttcaaactacattatacaaacgtgtctccttctccctccaaataaactaaaattcttaaatttgaccacactctagctctgcctaatggtcagggaaaaagtactcaggcgatggtcccacaaaagctctccaccccagccttatttcctcctcttagtgtaaaagaactcaggaggtgggcgggccccactgccacagcactacagttagagcggctgctccggcttattctctcattgcggcatctaggatccagaagtgaaaagaacttttcctagcctaagtttacattcgtcgaatagacaatgttacaacaataagaggaaggcagaagggaaggaagaattcccctctgccaagtatttaagtggcgcttggtttattccaagtccccccgggaagaaacacagcgcttcgtcctcaagtaagaaatagaggcattattcacatccttgggttgaaaaataagcattttggggctcgcaggcttctgcaaagccagcaagcaccgcgctggggagctgcaggccgccatcagcaatggattccggatttccctggtctctggcaggcgcggcacctgtctgagccaggggaagttgggctgcaggactcgcggtctccaggacacccgcggatccccacactgtccatgcttgagtgcgtgcgtgtctgtctgtgtgtgtgtgtgtgtgtgtgcgtgtgtgtacctaaaacaaagcactcactgagatgactttggagggtgcttaacagacagggcgagacgcgcctaatggggacgcaaggcctgggatagcaggaagggaacgaagaagtatctctttccaagcaggtcctggtggctgggagcccgagtccacgtggaatccgagggaacacacggagctcgctccctagttccgcccaatccctccagcgagccccaggaagccgcgcgggtccctcctgcagccgatgcagagcgaaatccccgcttaccttgactgagcgctaacaccagcagcagcggcagcggcgcggcccctgtccgttctggccccatcctgggtctgaccgggggaccgtagttgcgctgggtttgcagaggtttgcagaggatacccttggccgagggatacgagaacctgcacactctagaagctgtccagagggcttctctcccccgcccggtgagagcagggaaaagtttctgggcagctcctgcagcgccgagggcccgccccagcccgcccctcctgattccgcaaacaccggatctgctccggccgcgccccgccccaccccggccctgcggccccgcgggctgcacctcggctcgtccacacgcggggcaccgcaccttggctcccgtacagcggcccagccccggcagcctggaggcggtggggatggggatggcgccctggcaggctttcctgccctggacgggacgggtgggcatatccgacgggcgagcgcccgccctggcaccactccgcccccgcagcctgtcgccagcacgcaggagatgccccagtccccgggagaacgtggcccctccgcagcccttggcagcgcccggctcctggcagcgggtgccgagggcactagccctaaaccacagtgcctaggggctgcgcggtgcgtccctttctctgtttttcctaagtgggtggagaaagggacaaaaataagcgcagaatgaccaggttagaaactaactcatcaggaaagaagatctgctcacaagttatgattatccaaggtgatatttaagcaatacctgctgcaagagctgtgtgtgtgtgtgtgtgtgtgacagagagacagagagagagaaatcatcattacttcctctcctccgagataattaagagctgatttaatgactgagtttaggagattaacttcaaggccagagaaaaggctgagagcccatacatgcacttgtgactctccctgtctacattacaccatgacatagactgtgaccattttcttccattatttcagtctcacatc

SEQ ID NO: 10782 - DNA, 6000 bp, Homo sapiens
tctaaataactttattgtgaggtatcagttgtttctttcatccccccttgaccaaaagctatgccaaccttgttaaaataagatacagtgttgacttaattatctgggtaattaagcttttcttaaaatgaacttcttggtcataatatccctttcctggaagccctccttttaatcatcctacatctgttgagtttttaaaattcaatatacaggccagatgtggtggctcacgttttggaaggccaaggtaggtggatcacgtgagctcaggagttgaagaccagcctgggcaacatggtgaaaccccgtctctacaaaatatacaaaaattagccgggggtggtggtgcacgcctgtagtccccgctactcgggggactgaggcaggagaatcgcttgagcctgggaaatggtggctgcattgagccaagatcacaccactgtactctagcctgggcaacaagtgagactcagtctcaaaaaaaaaaaaaaaaaaaaaaattcaatatacgacagctaagattaaatttagacctagtctgggaatcagaaaagctagaacttattcctaaatttataaagaccaggtgggtatgggcttgaaccttagctctgccatttactacccgtgtcatcttgaacaagtaccttaacaagcgtaggcctctcattgtttcctcatatatatcatatgctgagatacaggcacatactaggtgctcaatcaatgtacgtgattaatacttttgattctcaatctgtaaaaattgagataaaataattctagatatacaatgattgtaaagtattttatatacctatagggctctataatataaacgtttcttcagtttctgcaaaaggagatgtgttcccattttctttttttttttgagacggagtctcgctctgtcgcccaggccggactgcggactgcagtggcgcaatctcggctcactgcaagctccgcttcccgggttcacgccattctcctgcctcagcctcccgagtagctgggactacaggcacccgccaccgcgcctggctaattttttgtatttttagtagagacggggtttcaccttgttagccaggatggtctcgatctcctgacctcatgatccacccgcctcggcctcccaaaggtgttcccattttctatggtgcctatgtttaatattaaaagcagatcattttattccatagagctttttttagtacaaaattcaaacgctccccccaccacctcaaattactgccactaccaaaattgaaaaaatgtgataataggttttgctagttttgttagaggaaatagtccataagatttggtttcctccctgactgagctataaaatgactaagaaatctatatacaacaggtaatgttcatggagaatatcagaagtttctggagagactgttacaggctctttcctagcccctccacacacactggctctggggtcattaacaggtaattcctttacatggtcacgtatgtgcagcttatttaactttcagtggaatcttatacatagctggatttccatttcaaaagatctgtacatgtttttaaaagaaaccataaactgtgatatttatcatcataaaacacctcatctaagaaacatttaacataattttgctattgttttgttcttgacaagccaggaacttaaaagctcatgagaggttttattttttaattttgcatttctttttttttttttttttagacggagtcttgctctgtcgcccaggctggagggtgcagtggtacagtcttggcttactgcaacccctgcctcctggggttcaatgcaattctcccacctcagcctcctgagtagctaggattacaggcatgcaataccatgcctggctaattttttgtttgtttgtattttttagtagagatagaatttcatcatgttggccaggctggtctcgaactcctgacctcaagtgatccatccacctcacctcccaaagtgccgggattacaggtgtgagctatagcacctggcctttttttttttttaatagagacgaggtttcactatgttgcccaggctggttttgaactcctgagctcaagcgatcctcccaccttagcctaagcaatcctctagcctaagcctcccaaagtgctaggattgatctccccaagtgctacgatcataggcatgagccaccttgcccagcctaactttgcatttcttaatcatctcaaaagcacgtgaacctgaggctgcattggcctttgtactcccgtgctacctctccatcttaggatttgtaaatcgctgacaaataagccatcattcactcccagcaaggtgtaatacacctgcccactcagcggcagtacctacatgtgtccatctgtctagaactccatataaactcaagggctgcatattttcagctaacgtagacccacttttgcaaactggttcatttctcctcctctttactgtgcttcagaagaattggggtaaagtgttcttctattcatcacccacacataccaggtcactcttcagctcccactgtaattctttccctccagtttaatgctgaaaagagtaagtcagtctcactctctctcaccctgcagcattttgcaaaaacaattatcatctgacaccagaaggcaaagcaaggtttggaaaacctatcaatttcttctccccatttctccacccttaactctgtgataaaatatctccgccctccaggcagcctataacctcatactctggtgtttttgggaaaaggacctcaaatgacacttgttgataacattttgcttctctgcaaaaacacaactccattaagtactttgcttacatcagccatgataatcaggttagcaatgttttaaggatgagttagaattattagacctgcgaggataaaccatctggatagttgtctcttatgtttaacctcccttttgtgacttcaggagattctttttcttatactaaaatcaaacctagttatgtcagcctttcattaaatcaaggcaaaagggaggcaatattgtggtatgcgtcaggtggtttaatgatgacacagactactcttatttccactagttatctcgatatgattcttacatgcacacaaacacacaccagttcagatgagcagcctgggctttctgacaacctttggggcagctccaagaaggtaagccttaaaataggaaaggctcgagtgaatatacagcatttgactcatctaaaatgggcaatgtagtaaattcgtgtctaaaagcttttctacggattgtaggaagtgttcaaagtcaccagttactatagaaagaagggaaggtgggcgggtacagggtggagcagggaagaagcccttggggtacccttgtgaggcactggcagggcacagtggcaacggaagagacaagattttatcaaaggacattggctggcgcggtaaacaaaggtctctagagaatatgccatattgtgaacacctatcaccaacaaaattcaaagtaaaaagtagcttacaatgtgggctacatattagagagcttacagagttgcaattattcaaaagttttgagcacagaaagacaaatccaaacagatattcgtcaaacgaaggagtcacacaaatctccgatttgtaactgcctcctgaaagctgttttacttttacaatgagtactgcatcaaaataggtgcatattctagataaatatccgtttaagtctcttgacttaaaaggaaagaagaaagacagtaccacaatacaggagtgccgctcgtcacacgctctggccacttgggacacctgcccatcagggtggcatgtcactgcctccccatcaccaaatcctctccccggccttagaacgcagctgcatcccgctggtggccctgccaaaacggtccccacatgcaaagtgcagggtgccaatgccccatcgctggagagcttgcagcgctagattttcaatgacgccacatggagaaaacgtgaaaagaaacaaggacgagaaggcgaccccaaacaaaaatgtgctccccttctttagtggtccatgaaaaaaaaaaaagaaagaaagaaagaaagaaaaaaaaagaaaaggaaaaggaaaaaaaagaaatcccaaactagaaataaatggtcaagaccggcttatcaggacacattcgggatacccctaatccttacctggactacgaaacaaatgtttaaaaatggaagtacctgggaaatcaacttggacgcattataaaacagaatctccccaccgtcaccattaccaccagccatgggtaaataaaaacccagcacttaagctactagaaactacattttaattagagctgaggtttacataatcgcaaattacataatactgccgtgcactaaaaacccttccataggtgaagcttcacaccatccagtctttttaacattttccagagagggctggaaaagtctgctgaataattgaggggagggagggagggaatggggtgctggaaaagtcacccttgacaagctgcacacccgaccaaatgtttcaggataaagagggactcggagcaggtgactcccctccgcccccgtgtccgggcgtgtaaggccaaggcagggcgagcgggcgtggggcgcggggccggggcttacctgctccccgaagtcgatggctatgttggtgatgcccaggggcaccaagaaccggatcaggggccagtagtgcgtgagcgccgggaatttcaccatagtccccgccgtgggctgaccccacacacatctgctgccgcgaggggactctgcggggaggcgaggggcgacggggcgacggggcgagcggggcgcgggccgacagaggccgcgggcggcggggcctcgggcgcggcggcggcggctcctcctcgcggctgcggcgccttctccgagcgcggctgctctagcaggggatccgcaagctcaagtccatccctgctgccctcccacacaacaaagatctgccgggaaaaaaaagaggagggacggcggcggcggcggcggcggcagaaggttctgctgacagcggctccattataagcgctctggggcccggaaataaataaccgcgcgcacgaggcgccgccgccgccgccgccgcccggaggaaatcaggggcgggcgcggaggcgcggacaccgccagcggccccgggggcgggctggggagggggccgggccgggcgcgccgcggcctcctttcctgtgccgtcgcctgcgcttggcgcggccgcggggggcgctgcgcacgctcgggccgtggggctggcgcctccggggcgctgggcgggactcgccgcggagcctcggccggcccgggggcggcggcgctgagggcgcggcggggacggtctgggggcttggggacgccggtggggggtgagggcggtgggccgcctggagaccccggggtgccctggctcgccggccgggccctgtagccctcgtcccgtggggccgggggccggggttcccgcgctgtgccgggagggcccggccgtctggaagacttggcagccggggcaagcgacgtgggctcggacgcgcgaggagggctggggagcggggcgcggggctgggaagggcgccgtccggcggtggccgggctggcggcgggcggggactgcggaggaggcagcttgcgccggggctggggcctgcttcgggggactagcggcccgggaggtatggaggtgccgctccggggggggcgaaagaaacgtggaaaggtcgcccaggagggagcctgtcccccagggtttccaggggcaacggtggcccgtgtccctggaggacatgcgccagggcagcagggagtggtccccgcaggctcccaggctggggccggccgccttctggggcgctcagacctgtctgctgcagtttgcaaacagtacgcccgaattcttttcattgtaaaaaatttctattaaaaataactcgta

SEQ ID NO: 10783 - DNA, 6000 bp, Homo sapiens
taatcgctattatgttttcttttgtcataaggtcatgatacataggcatttattaaaatttatgtgttcatttattttttagctttactgatagatatagaaaacaagttcaatatcacctgaaaaagtctaacatctccttagctaaaaattactcctactaaatctgatgttttataagtattacgaccaaaatgtgatttcatttttggtagtgaggtataaaagtaattagtaaaatgaacaaaattgttgcctggtgcactgagctgtctgtggtactgaaaaatgacaccaaagctgaaatctactgagctggtatcttacaaagcctccccatcatactgttttaatacaagcacttccatccatgactcacctgaaccatcttgttttgccagagtgtgtataaacattttataaaaggtcacacggatctgctttccaaggttctccatgaaaatgtcagggcctcctcttgcttcattaagcaattccagaggacatagagccagaaagtcagctataacacttacttttcctgaatgcagtgagaaatcatatcatgcaccagaaatctgcactggcgagcttttactatctgattatcatactgatatgctaaaaagaaaaagctaaactgtccttttagattatatgctacatccaaggacacgctatgaatggcagcataaccttgcatttagtttcttaactcaaagctaattgatatatttggaattatttagcgtgagctgagaagtgctcattagcttaaaactttttatgaaaaaacatatatacccacagcagtgacatcaataagtaaaaaaggagggcggggggcaattcatcattttccatgcatatacataagcctgagcagttggtttcattgtgtttcagaataaggtatttgacagccctgctgacgctcttctctggacaaattagaacatctttacctttttctggttcttgacttccagttcagggtcttcacatttgtttggcccttctccattttatttatttattttttaataaaagcatctcagataagaatttggagcttcagcttaaaggagaaatccctctagataatacaccgagtaaaaaagctacatccaaattaattaaatgacatgacccaagcatctattttgaaattatcttaagtatagtgggtttaacagaaaccacatatcatataaaataaaccgaattttaaaacatatatcattctataacgtttatgttgaccaacagtaaggaagttcactgtgcatatttgccgtggagagtcattccatgtcatttttctcacccatgcaatacataccctaatcaaaatatatgtgcatatgcataattgaaatggtcctcaaaattagccaatgagtggaatgctttcaagcattaatctataaaaatatgattttttataaacttctgtaaattttaagcgttctaatatgacatcaattttttcaaatagttaacatttggtagctcttagactcctatgaattacttcaaaaaatctcccaataattcttaaagagtcaatgttttcaagacactttgtttttgatgttaataccagcaaatgtcctcccccatgaatgtttctttagctgtgtgattttcacaaggaacaggcaataacacaaagctgatatttaataaaacccagcaagatctctcatttcagaatcattaagcaaaacgactctgtcctccaaacaaaacatttttcaagttaacttgatttttaaaaatatgtaagaacattttggaatgatcttttaagtttaactgaatttatataccaaacttttggatttagagggaaactgcagaaaaagaaatattcacgtttcacagtttttggcatgtagcagcagctcgcagaggaagcattatggcctggaagctaggatagggctggttctcactgtgcactgtctagctgtgtggcccggcaagctacctctgctgatttcagattccttatctgtaaactgagtcaaaggaccattaaacctattttgttccttccagctctaattgtctactcttcaagtcaaaatgaaaagataaatttctaatgtttaagttatattttagtatcactttaaaatgttcaaaataatctcaaaagcccaaccatcactagtattgaattaaagatgaatctatgtaaactgttaaaactttaaaaaattcaaatgtgtgttcatctcattttgtcagtgcagttttgtaatttatttctgagtagtctcactctttctaattatcattctccaacctcatcccttcaaaaacacatttttcaaagttttacaagtataaaggcaacgtgaagtaatttctccctctgcacttggagtaatgtgcatcactattttgtctgggcatcattaaaaacgatttcttccatatttactttgtgtttgctaattactaatttaaaattaatttaatttaaattaatactaaattacttcaaaggcaaatcctatataagattttaaattgaaaggcagcttaaatctgaggcagtctaaaggaagatggcctaaattaagggtctcaaagtaccaccaaatgtctaacaactgctcaaaaaagaaaaaaaaaaactcagaaaatacatagtgcaaattctcatgcaccaggaccacaggactgagccaccgcgcctcccacacagtgcaaattctaagctgaaaaaagtcccaatctaatttttgaaaactctatacttattttaatttaaaagccttaatattcctgtgtaggctaacaactgacaagatgacccgtaagttttatagagcattctgatatggatactaacagtcaaatatagagctcctggctgcatttaaacaaaagaaatattttcaaaaaaaaaaaaaagaactcacaaggacagtggccttaactcttaaattacattttaaaaaatacttcatgactggatacacagaatttgcattctaaacttacaacagttttttttaatggtgggggatttaggaaggggttagatcttttcccatatctcatttatataaattagctggcaactcatcacccagttttcttctctatgctaaattacagaagattatatagatagatacaatctcccataatgacgcacccactaggaagaggtgtctcaaacaagaacacaagttcattccagattaaaactagagcataactggccttaaggaacaaaatgtgactgatctggagaaaaggatccacctactgaagagaagtaaaaatcttaagggtccaacaaatacacctcagaaaatgctgcatgtttatatgctaccctgccttgtgttgttttccacttcctgaaagaacaggtcaggtgctaacggtaacaatacagcatgtgtcttctgtaacctcaagcaaggacatgatggcttgaaaaaagcctctgctgccttgcgtttctctaggctgactgtagggctttgggtcattcataaacagcaggacctaagttacctgtatttccctggcgtggtacacgatgatcagaccgagcaggatgatcgtggagagactgataaggcatttcagagctaaggaatacagcgacgcctgcaacacagtcagacagaagcacttttaagaaagaagcacttttaaccgccttccacgtccccagagtcagtcagtcccccacaggtggacctgaactcacagaaggaagataaggggagaggggtgcacctgtcttggctctgtgatctgtcagatcactcggcctcaaaaccaaaagagacgagagtagacctggaaagactgggaagacgcgtggctgggctgctgggtccacgccatagaggaccgaagcgagcgccgctgttccaggctagcaaaaccagaggaacttacttctgagttcaagagagcgggttgaaagggcccttctaaacataattcacgaggggatgaattacagatggtttccccaccgacttccagaaccacttacttaaggtgcccgaatgcgctgagcactcttaactgcctcgagaactttggctgcacgcggaaagggttcatctccgagttgtttagctgactacggatgcgcgtcctagacgcgcccgctgtcctggcgggctcccttgatcgtcccggagaggctagggatccgcacgcaaagggtccccgccagtgcccatcccaaccacccagtgcccgactccggtagcgtgggctggggttcaagcctgtaccttgtcgtaggcgccccacgacagctcggtctcgatgaccatgaccacgatgccgaacatgccgaagatgagcgcgtagtcgctgagccgcttgcgcttttcgaacagggcgcgccggtggcccagcttgtagccgatgttctggtttttctttttgctggacttggtgccactgctgctgccgtgcccgctcccgccaccgccgccgcctcctccagtgctgcctccgccgccggttccatagagcgccaggttgttggagttgttgtgctcgggcttagacaccacgatctcgggggctgaggacgaaacagcggcggcggcggcagcggctgcagacggggaggacgcgccgccacctcctccgacagacgcggggggctgcaggggctgcgcctctgagtccatctcgtgcaggttccggcgggacgcgctcaagttgctgagcggccgcatgacgcccccgttgtacctgcagctgctcatggctatttcggtgaaggggttgctctcgcggcgcgcctggggctggtggtgctggtggtgcgccgggtgcgggtggtggtggtggtgcgagagcgggggcccggagcccagactgccgaggctgcccgtggggctggcggcgggctgcaggctgtggcactggtggtactgggaggcggacgccgactgctgcgcggactgctgcgcgtactgctgccggagcgcactggcatggctggacggcgtcagctcgctcacattgagctggctgccccggcgcgacgagcagcagcagcagcagcaggacgagcccgacagcggcgaggaggtgcgggtccggaaggcgccgccgggcgaggaggtgcggagcagcagggacaggttatctcccgcccccgccgccggggcaccggaggaggcgcagctgttgcaccggaggcatgggctgctgccgccgctggccggctgctggtgcgcgaggtgcgggtggtggtgagggtgcgggaggggcgcgaagggcgggcacggcttgtcctggctctgttgctgctgctggcaatgcaggtgtgaggagcgcggcggcggcggcggctgctctgggaagaagccgcgctggaactgcaatggggtttccatgtcagggctgttaaagctgcagggagaccaagcggtggtgcaccctgcgcaatgcgttatggtcgggagcggggactcctgctgctggtgcgaggaagggcccatgccggctccggtagaatccaggcggcgagtccgattggttgggcgcaccaaaacaatgggcatgacatcacctgcggggaccgagactgagtttgcggcgcgcgcggcttagggaagcgtgtgtggcagagaaagatggggaggggaatctgcaggacaaaccctaggggggtgcagtccagagccagggcgctccagggcagggattccgcctgctgattgcgtggagatggagagcccccacgcagtgcagctgggctgcagggggaggagaaaagagaaaggcgcccctccctcccgtgccgctgcccccttgactagtgccggacgcgctgcccggatcacctgcgccagccactgcagcacgtcgggccaccttggccgggggcaggctcagggacggtgtggaaccccgaccacttctccgactgcacgcctcgcagggctgcaaaacagcagccccctcgtcccacgcccgcttctcccagat

SEQ ID NO: 10784 - DNA, 6000 bp, Homo sapiens
cagacctttttgtcagtttctcaaactggcttagctttctcttgtcatgcaatctatggagatattttctggcatatttgaagtatgagttatatgactatattttattatcataagagatcttgtacaatcataagctagtcaaaattccattggaggtaaaaataaaaatatccaaaaactggggaatgataatattaactatgtcacattattcatatgatcgaatcctattaaaccattaaaaatgtttatgaatgttatgaacaattttaatgacatgagaaaaacgcttctcatgacacgaaaatgaaatgtaattaaagaaaaggaactgactgtaaaatagtatacagaatatgatctcagctttgttaaacaaaatgcagagaaaatagattagaaagaagtactgtcgtctcttggtatacttaagggtagggaagactgattccaggggttccaggacccctgcatataccaaaatccaagaatactcaagtcccacagtcagcctgcagagcctgcgtatacaaaaagtcagccctccgtatgtgtgggttttgcatcctggaataccgcatttttgatccatgttttgttggagaaaatccacatatgaggggacccacataatacaaacccatgttgttcatgggccaagtgaataccaaaaaggtaacattgatcctctgtgaatggtatatgcataagaatatataaatgtgtatatatatgtattccttcatatatatgtgaagaactcacgtgttcttcacatgtacacatatatacacatacatgttcaccttttgaacaatgatcacacagtctgaaaaaatagttttttagtaaataaaaattcattttctaggctttatatttttataaatatcaattaggtcaataattgtcaacaattatgtcaattatgttgatttgatttccatctaaatagtatcttccttatatatatcttttccaacacctttggtaagtgtcttccttacatgctctatctctacgttccaaatgagtttagcctatctccaggtttagctctatttcatctgttttttatttatatgcaaatattccaagagcatgggtttgctaactctaaaccaaacagggcttctccaacactcttcttaagtaccaaaggacagaacattcatcttcatcgtacctaaaacaggtccttgagcaagtaaatgtttaaaaaaatgcttctatccgatcttcacctgggcactgctttttcatcttgtggaccctatctcttcactcagttgctaggaagctccacgttaatgagtgctctggccaacagacagaagcttatggcaagtgttttgatactattaataacttcactcctagtttctgcttaacccccctactcttctctctgttcgatattccaaatctacttattatttaatttaatttaatcttatattggaaatatttattaaagtatcttaaatcctaattctgaaataagaaggaattttcttcttttcttttacaagaaggggtgatagtacatacgctactgataacagaaccagttccttgagattaaaatgagaaataaggattataaattaaacaatcttttagttgctacacctcttcataaagatgaaaatattgtttttcatttctacatagtcctcaaaagagaactggagccagatgcagtggtatgtgcctctaggcccagctatttgggaggttgaggtgggaaaattgcttgagcctgtgagtttaagaccagcctgggcaacatagcaagaccttgtctcaaaaaaaaaaaaaaaaaagttcaatttatataatatcttataaaatcttcacaactctgacattggcttagtcactgcagaacttagaaacttgtatattattctctgaacaagtgtctttatttttcttcttcccataaactacctgctgctggtaccattcaaagagtctccaaatgttagattattgcttcctatttcctattgcccctattggtggggggaggggggcaaagtaactgccccccaccaaatattattacatattctttttagtgaactggatatttttcttccattttctgtatctaaaaatgaaaactgatggtaaagggcaaatctccaaatcaggaagagattttataaaaacatagaacttaaaggcaaactgtccatcttatcaaaattaggctcaaaagaaaaatggttgtgcatttttaatattagggaactcaagcaaccaacaatgttttaaaggttccataagcttcatggaatactagagagtagcattcagtatttaatagcaacctaccgcacaggcccagcagcaaaagagatcttgctgcaatagcacagtaacccctgaggcagcatgctaacagagaagtgagggagtacagtgtgcaatggtctagcagacaccagctgcaggcaaaggcaacagcagcacaatcagtgttactacagtggagtggatgagagggaagtcaggagatgagttcagagaactagtcagggactagatcacacagggctttaaagccattgtaagcctgtttttcttttcttttttttttctttctttttttttgtgattctgataagaagccaccagaaggttttgaagggaaatgaaagttctgagtatgtatgacaaaaatcactgctatttggaaaagactgtagaggagcaagggcagaggcagagacttctcaatcatgtaggtaggagaggactgtggcttagcttagagagggagagagaggtgggcagatctgggtagagtcaacagattttgttggatgcttggatgcggagtctgacctaaaaagagaagtcaagagtaaattcctagaattccggcctacttgaatggcagtaactgaggctgtttattgagataagggagggagctgaggggaaacagagggagaacttggtgaatctggcatcagtagttctatctgtccatactaaatttaaatgcctatcagacttccaagtggagatgctgagtaaacagctggacatacacatacatctggagctcagaagcgaactaaagctaggaataaaattttggaagtcatcagctgatagatattatttatagccaaggaatatggcttgggatacaaattgtcctgggggaaagtatggctagaaaaatatggccaagaaatgaactctgtggcatactaagatttagtggtggggaagcctggagacacaatgaagcagaatgaaatgcagaatatggtgacctggaagccaagtgaagaagaaagaatattagtgaagaacattagtgaagaaaaaagaatattgaggagggagtgatcaaatgttactgaggggtcaggaaagatgagaactgtgcacagacactggatttcacaagacagtcattggcaacatcaggaccatgcagggggtaatggggacaaaaagcctcagatgagagggggtaggaagaaacagggaaaatgaaaatggagacttagattaaatctttcaaagaggatttttgtttgttataaaaagaagcaaagtaggggagcgggacctagaatgggatgtgtggtctaggggggattaaagacagaagatttaacagcagatatttgttaaatgaatacattttaagaatagcataaggaacaaatgactcaacacagatgcccatgattcaacagtgtaaacatggtttatacttcaagttccatacggtaaggcgtacatgtcacatttactttgcttcaaatgtaggtgtcaatattctatacctgcttatctattttctgatttgaatgagatataaagtggagttgcttaactccatttataaccatcctactacttcaaaatattaaaatgtaaggattgatgggctgataggtgcagcaaaccaccatggcacacgtttatctatgtaacaaacctgcaagtcctgcacatgtatcccagaacataaaattaaattaaacaataaaaaaatagaaatacagattctggaaatcaagcttaccaaattaaaccttcagaggtggggggatgcattttaaacaaaagtcccaaatgcgtcttaccatcaggcttgtttgaaaaacactaatctaaggaatactaaacacttggagaaggacaagttcttctcctgtgtagacgtgcaatgtgggttcaggggatgacacttcaactctatataatggtgtatttttacctccagatcatatagcctttcccacccttgcttttcaaaattaaaaggataaattaaaaaataataataaatatgagaatattttaaaatactttctttaagaagtttactaccgtggaaagctggagaggtcctaatacactgaaaactagctcacagctgccagtcaaattatttttatccaaattagctttgcacaaaaagccaagtaggaaaacccatgccaaaacctccagcactggctctgtgtgcctggcaggggctcatgcagagcctttagagcatttaagactctgggctatttgcttatggttctgaggtgtcttttcgaaaatgggttttctagtcaaaatgaaacaaaaaggcagacagctgtgtggattttcccttcagagtaagccaagtgacggaaaggcctgcccgccccgctggggacaacagcgccagcacccgcgccgtcgggtcgggtaggctggggaggtagcgcaggcggcctggcccccagaccaccccgcgcccctggcggcctggccccagcccaccccgcgcccccggcggcggcccccgccctagcgcccggtacttgcctgcaggcgagcgccaccacagtcagcccgcggcttttctgtcttcctttctggcccagcgagagcgcccagggggtgggcgtcttgccccgggcgtcgagagtttggggccgtcccgtacgcggcgcgccgcaacccagtccccgcgaccacagcagcctgctccccaccgcgcttgcagagcccggacgcgcgtgagtcgggggcccgcagaggcctcacccttggaggtcgccgcttgtcaggcctgactgctgttggcgcccaccccgccgcccccgaggggccgctcgaggccggactgctgctttgccgtggcaggccccacccgggacgtggcgctgcgggccggggcggtccagctgtgagtcaggggttaatgtggcgggataactctctgcagagggaaggagctcgcaaagaagggtggaggaggggaaaccgcaatggggaactgtcaccgaggctagtggactctccctgcgcttttttttttttttttttttttggcatgtaccccaaaagccagaggtcgaggcccagaaaaatctggaaaggaattccaccgtgtttgctccttacagaccagacaaaccgtagatctttcagaggtacagcgactctcctggttccctaagatagtctcgacttttcctttccctttgcggccctctcacttgactactgcagccaaccatacccctgattagggggtgcagcacatcagcctctgcccccaaaaactaccctgcgaaagatcctttttctcaggttcgttctccacaaccgaacagattggaactccactgaataagagagaacaaaaaagcaattagttaaatgaagcgtaaagaagccttataaagccccattgctgcctcaggcacccaatctagtcataacctaagaggtccagttcagaaatctcccctccccttttaattctcaggcaatccctactccctgccaaaggagaacccagttactgaacatcggatgagaccatggatagtaaattgggagtgaaggtccatacctgggtctcagaagcacagtacaggtaaagctaagagttatttcctccttctctttccccatccaacaacaggatgccttactgaaggtaggcacttcaggtagtaattacttagtgaa

SEQ ID NO: 10785 - DNA, 6000 bp, Homo sapiens
gtctctcgggtctctgctgcccagagtcagccccggtcccagctcccaggttgctctggcttttcctccaggcagctttggggataacagtgagggctctcccatcttctaagactatctgtctctacacaagataaggctgatagaaaagctagtccaggacaatggggagggagtgggagtcccacccaggactgggccgagggcttcttagaagcagacaggtggagagcaaggcgatgcagagcagcttggaagtttcttttctttttcttttttttttttgagacggagtcttgctcttgtcacccaggctggcatgcaatggtgcgatcttggctactgcaacccccacttcccaggttcaagaaattctcctgcctcagcctccctcccgagtagctgggattacaggcacccaccaccacgcagggctaatttttgtatttttagcggatacgaggtttcaccatgttggccaggctggtctcgaactcctgccttgtgatccacctgcctcagcctcccaaagtgctgggtttacaggcatgagccaccacacccagccggaagtttctcaaggaacctgtctgtccataggctggacagagctatggtgaaaccaaagagcggacagcccagacaacctcagaaacaacccaggtttccagcagatggggcagtccatggccaagaagcactgcatgatgggttggctaattccccagtaccccagggatgactgaggggccagaggagaggccagccgagaaccatgtggaccaccaaactattcctggaacatgggggcataaaactcttttacctcataaatcatttttatttattaatattattattattcttttgagatggagtctcgctttgtcgcccaggctagagtgcagaggctcgatctcggttcactgcaaagcccgcctcctgggttcaagcgattctcctgcttcagtctcccaagtagctgggaatacaggcatgtgccaccacacccagctaatttttgtatttttagtagagatggagtttcaccatgttggccagactggtcttgaactcccgacctcaagtgacctgctgccttggcttcccaaagtgctgggattacaggcgtgagccaccacgccctgccaatatttatttattaattgctagcagattccctctgccaatcccaacacctcattccacatccatgtggcatcaaagccccagtcagtgggcagggggagtcacatttcctttaaaaaattccagtcaatccttttcagccaccctcaagtttcccttctaagaactgaactatttttctttagttctcaaactttagagatgatttcttaaattattcattaactcattcaataaaaattttcctgagaacctccctctgcatccagaattgtgtcagaaattgaggaagacgcaaagatctaaatccaccacaaagtttggtactacatgtatgtactttaacttgaacaaattaaaaaaatccaaacaggacacctgaggttccagtcttcagtggaaaaaatatgactagtaattcaataccagtgtacttacaaacacctttatgtatgatttggggcagagggcaggcttagagacatttagcaggcatgggactagatgcagtggtcagcaggccaggtttgggttgaaagacaacaggccatagaaaaagccattagaatgttgatgcagcaacttccagcagtagctgttcacctgggaacaagcagctctgaacttcaagtcaagcattccagtagcccaaaacaaagatctaagcattaatctggcctccctgcaaagactgacaacatataagtaggtgaaagggcacataactcctttgaaactgctaagacagctaaataaatagtctaaatattaaaaaacaaaaggctgacattggcagcaagataaggtcagaccccctggcacagctggcctttgggagctcatcaatgccaccatcactcagcccaatgtgggatggaggcagcaaagcaggaacaagtgactagagtaagccggggaaccctcaggggtcaatgtaaaactccaagagatgccatgtgcttcttcttgcttcactacttccctcttctttaggcagccccaagtagaatttgtagggattcctgtgtcatgttcccctctgtggcctctgcctgcaacctcagggacagcctctgctttcatagtactcactggcttccgggaaggtaacacacccacctgtgaggctaggacccaggatttgtggcaactgaaggttccaatttcctgtggattcatgggccagaaagcacagttggctacctccaaggagtgcctcttttgtcaagccatgatgcctctggacactgaagctatgtcactagctaagaaatcccagtggggctccggtcacactcccactacatatatgtggagaaagcaggtccaaatgctggggacatcaaatttccaaaaagaaaaaacacacacatgcacacacacttggatctcccagggtagctctcagactccattgaagggtgatgacgccaagaagcaacacagttgggatctccagagcccctgtaagcccctctgaggctccaggaggggaggctcagcaccaacatccagcagggcttgaagctgtgccagggcctgtggcactctccctctctatgaactctcccctctctgtgaactccgccgtcctgctgggtggtttcttgctgctgcactggggccttcagctcactattatgctgagctgaacaccctaggctcacggagaggcctcctcttctgggaagccttctctaacctgcgaattggtcatctgcacatttagtgagcctatctatcaatgagggctattcactggctacttactcaatgctgctgaaacttcagggagctagagtgccagtgtctaaaaaagacacaaaacacatacatcattaacatcatgttcctacatccagctccaacaactgctccaacaggttcggaggggacagacaaaaccacccagagggaaaatccaaggggatgagaaatgagaaaggctcccctacaccctatgacctaaggctgtatgctttaactaaatctggccgacagccttgcctcataatacctgagaaaatattccaggtcaacaagtcaccctgaacccatcttcagatgaatggatcttaaagagtgacaactgacggcctggcgtggtggctcacggttgtaatcccagctttggaggcagaagcaggcagatcacgaggtcaagagatcgagaccatcctggccaacacggtgaaaccccgtctctactaaaaacacaaaaattagctgggcgtcgtggctcacagctactcggagactgaggcaggagaatcacttgagcccggaaggcgaagattgcagtgagccaagaacgcacgactgcgaaggttgcagtgagccaagaacacacgactgcgctccagcctggtgacagagggagactctgtctcaaaaaaaaaaaagactgacaactgaccatgggaaaaggcaaacaattacttacagggcatgaccagattgtcgtttttgggttgtggacggtaggggaaggagtaactagaggaaaaagggaagaggcagttgtatacacatgctttatttaacttttaaaagttcaggaaagagaagtatttcttctcttctaaaaagaaatcaagagactagaggaaaaacgggatagcccctggcccaagtcctggctctgctacttaccacccccaaccccaactagagtaagtcctggacacacagggccatagagcatcgcccagggaccgccaggaccttcctggtaccctcttcaaagtggccatcaggacgggaggccagactgaccacctgtgcagggaggagcacactgtggctggaggtcacctcgtgaagcgttcccaagccacctggctggagggtctccatcgctagggtgttgaccgttgggggagggggagtgacagcgtccagtgcgcatctgggagagaggagctcgggttcaaggaccgcgacaggtcctccgagccctggtctcagccccagcaggggccggcacccacctcggtcacaatggtggacaggtagacgtcctgactgaactcccagccatccagacagctctcctgctccagctgccccaggtccacgtcgcgccccggctccagcccaagcgccgagaagttggcgatggtggcgagccggtagcggcggcagctgtggggcacctcgcggccgtcccgcagccgcagtgggacagtgtggttgcgccaggcgctgctcaggttcgcggcgtccggcacccggcagcggtgctccggggtcgctatcaggaacacggaggacaggccggtgaagccattggggatgatgctggcgctgagcaggaagaagatgaggcgctggaagggcccccactcgcccaggaaggcggtcacctcgtcgtagtcccgcatgccgccctcagaggcccacagagcgcggcctggggtcggggaacgcggcgggctttgcgcgtgcgcgcggggcacccgccgccgaccaggcaagccaggcagcaggcgacccaagaccgtccgcggagggtaggctcgcgagctgacaccgccgccttggtcctgccgcggctggccttacatagggcgcacgaccagggaaggttgcgggcctgggccgcaaggcgcgccccgctggcaggcagagcggcgccggcgaaggcggagctggggcgggacgcgagggcgcggggcgggccgggagtgcacctgaggcccgggcggggcctgtcctggggacctggcgaggcccggcctctgccagccaagcctgctggggacgaccgaggtagcccgggctcggcttaggaaggcagcgggactcgaggccttggggtccgagtccgaactcgctcctctagcgccgggcggggagcgagtgggagagcggccgcgaagctccagtgttgaaaacgcacccctcccagctttttgcaaggcctacttgggggcggaggtaaggagaaagtcactggcccagggtctcacagatagttgctcttgacaccgcctaatcttataagagggacggggattattttgaacctgggactgttaactaccctagtagagaggctgggagctatgacttttcattctagtccagatgccctttccacattttcgtctgtaacaagccattttgttcatgcagatgtaaaaatttaacttcacgattaacgatcctagcctagggttaaatattccccacagattagttatttccgtgcagagtttattcagaagctaactggaaaaaaaaaaaaagcagcgaggtgattctaaagcagcaatgttccataggataaggagctacatttgttatgttaacttttctagtagccatattaataaaattgccagatttagcaaataaaaatataggactcctagttaaatttgaatttcagatatagaatgaataatttttaaatattatgtcccaagcaggaatatataaaataaaaatgtaactggttgtcctgtattttattgggcaatgctgcatatttaaaaagtaaaaataaaagatgaaattaactttaatggtatatttaatcaagtatatccagaacatgatcatttcatcatataatcaatatagaaattattgatattttacattgttatatgtaaatcattgatctttttttcccctcctcatactaaatcttaagaattcagtgtgtttcacaggttctcaggatttgaaaaaaaaaaaaaaaggaatccagtgtgtattttacagcacatttcaatttggactagccacactttttattttttaatatttatttattcatttatttattggagacacggtcccactgtgtcacccaggctagagtgcagtggcacaatcatagct

SEQ ID NO: 10786 - DNA, 6000 bp, Homo sapiens
aagtatggtctttgtccatattgttccatttaattttaaaagtcatcaaccaattcattagatagaagatataccccaaatataagtaattgaactaatttaccgttttcttagcaactcgccacttatcttcttcaatgctatggtactggatgagagtgtttttaagtttagttgcaaaagaagcaacatcagacaggccttccattacttctctctgttatggagaccaagattagcatcagcaaataccacagtttgaggcaataggccagtgggtctcgaatctggtttcacaatataataacctaccagagctataaaagatagctaccctcaccccaaatcaactaatcataatctctgagagtaggacccgggcatagtttttttctaattgctcccaagatgaataacccatagccagaggtgagaattacatattttttacaattaaaatcactcatacagaaagtagaagagaagacaggaggaaggggaagcaattgtatctcatatatagatatgctgttaactctcaaacatttacctccagtcctctttgtttcaatgagctcaaaaatcccagatccagaagcctacttaaagcttcaagcctaaagggaatctcttgcctcccctggcttccctcaatttgtcacagtattcctcattttaacaatttactattaaaatggcaattgagcccaagttctcaagtcaaaaggcttggaattgcccttaataagaataggttccttttaacaccatcatacctcattgtctacagtattctacactggttttctttctgtccctcaaacaggctagcttatcgctgacttgtggtctttgatacggctagatcccaaatcttagcatcactaataacaatgtaatgccaatttcagtttaaacctcctatccttcataaagccttcttaagttactattacatcgttattttcttcatagtgcttatcattatctgacaatataataacttatttataggtgtatgattctactctttgaccacctcattcctaactaatagcatagaggtccttttcttattcaccactataactccaccacctagaacactgcctggcacatagtaggcccttattttgttgatatgttattgtctcaaaacaagaattacttggtctttgtcttcttttggtgccagggcaccaatttcttagcataattcctacttttcactattctatctctattcctcccatcttcagtaaaaggctaaagaagaaaagagttttaggggtaaagttgcccattacagaaccatcaaattgctggaaaggaggtcaagaaaacatctaaatgaaatctcctaatctaaatgaaatcaccctctatgggaataaggctgcagttgtcaactatggatgcacacatcagaatcacctttttatgctttgtactagttgtcgctgcttttaggtgttagattttagggcccagtgccaaatagtctaattcagtggctttgttctggaatgggcctcagaaatgtaggtcctttaaaatagtctcactaattattctgttgtctagccagagatcagaactaactgatctaaaaattaaagtgacagaaataaattaaggttgtagccaatatttaaataccactaattagagcatataagccattaaaatttataaatactaaaattatgtagaaacatgggaaagtatacaaagaaaattcaatataacttttaggatctatgtaagtgatgcaaaatatataataagtatagatccaatccacggatgaaaagttgatgagctcattcaaaaagtctctcagtcaagaatatacctaatttccattcaagaggctgtcaacttgatagccagttcaataactttattcaagagtatgccacaaacaagcagaagttcttgcagaaggcttgtaaaagagatttaatttatctattacagggatcactatgattaaacatattctttaaacccaaaggtcacctgctaggttcctgtggttggcagataagagtatttatgcaaaactttttgatagaaatcaaaggtgaaacagaaagttattattatcataagcaaacattatcactgggcaaatccagtgcacggaaagttacctagaaagctagctacctagaagagatgagaatctgcaactttaaggtacttgacttagtaattcatactgatcagtataaagttcaagctccttactatagcttacaggcccttttataatgtggcatattttcattacctaatttccacttatctttcctggattcccctgaacctgggttagttccccctccaatattttctgacagcaactctgtactgtaattattcacttgttatcttctcccgtttaactgtaaaatctttggggggtaggaaatctggcttgttcaatattaattctccttacgtctagcactcagtaggaacacagtgaataaaaaatggaaaaatgtatagacaataagctaccattctcacttatggaagacctcaagatatctaaagtatgcccatttacgccaatcctagagcttctgaataactaaaacttcctttaccataatgaaacaccatttctcaagaaggactactattaaatatttatcaagcatctattatataccaggtcctagaactacagaaacagatggaattcagattttactctcaaattgacttattccacccttaagctttaacagaaataacaacaacaaaaactaaaacattaaaaaattctattaatagcctttttaagagtggtgcagtgggaggtaggaaaggaagagaaagaagtacaaaatcagaaagctctctctgattaaatatgtccagcaatgtatttaaccaaacagttaagtcttgcatggattattttcatcaagattaagtccataatgaaataatcattgccatcaaaactgctacctctgtgtaaacaggcataattgagcatttctcaaaatattaatatattctagaaccaagagggttgggggagatgggttatcaaggtcttggctctctctcctaatataacagggtactgacattaattgagaggaaaacacctaatttgccctcctgcaatctccaactgtggagaatgtcaggtaaatgttttaaatgccattctgaacccattctgaacttccttttactaattcagtcttttattcccttatcttgaccttatatcaggaaattatccaactctaacatttacacgtcagagagaacaggcaccacttaaccttatcagaatataataggttcatataaaagattttatactcttgtcagtcccatggccaaatgctgagtaatgtccacctccatgtttttcctttaatctttttgttcatgttttctatgcccatgcttttgaagctatcactagtggtgatagtggctgccatcatagggagggcagctgtctcaagttacttttcttgaggccatctatcagcaccatagtcttgaccaatccaactccaattattctcaaatatctgtcacagtgagatggcataggttctattttaaatatggaacataataaaacatttaacctgtaatgtaaagtgaatgccataaaaatctgtttggacttttgtagtacgactaggtcagaattcacttgttaaagaaatgcaggtatcagaacggtctaaccttgcattacttgattaatatggttttcacttccgtcaacagcttcagtttaacatgccatggactttccccaatgtcatacaaaccaaagctttgtaaattaaattatattttctaactaacataaaaatttcagcatatgcttgatttccaatcaatgttgaactgttaagttttctaactcagacaagtacagcagcttctcattttttgagactggctctggcaggagctcactatttaaagaaatgcaacatggaagtatatttctacaatatgaatagtgagccaacttactgttcaaacccctaatgctctaatacttgattaaaaaaaaaacctaatgctctgtacttgattttaaaaaataacaataacatttattgatcacttactacatggtcagtccttctggctgctttacattgcatttattttatttaatcctcacaacagtaatagtcctccttgagaaaatgtgtttcattatggtaaaggaattttagttattcagaagctctaggattggtgtaaatgggcatactttagatatcttgaggtcttccataagtgagaatagtagcttaatgtctatacattttccctgttttacagaaagggaaaatagcaacaggaaggttgagtcacttgtccaagatcacacagttcataagtgatggagccagaattccaacccagggcgtctgacttcagagcctaaagctctctcttgtaaaactgtggaagctgatcacaggctggaaaagacttcatataaaaaacctgggcccaccaaatatttgtcaagttttgtcctggctgctgaacctaaaaatctaaggtaatctttctcaagtgtaaattcgggaaaacaatgacactgatttggtgagaaattatttgagttaatacatttagcagggaccttggaaggcagtaagccctgggaaaactttgtctcttgtctttggcatcacctccgcgaagcctggtgggacgcggctgcccctgcgctgtctgtgcacctcctaagaaccaggaagcgcggtgacctccaaagaacaggactgtcccaaatcaagcgggattaccaccgcccctctcccatttaacagctgaggacactgaggtctaatggattccaagtacttaaataggtgagcggcgcgcaggggcgagttgcaagccctgggatccttccagctcgccgcttcccctcccaggggctcaggtttctctttcatctgtgaggtcctctcccgcccggacgccggggcccgccatccccaacgtccaccgcgagctccccagatccatggtctggagcaggtccagaagacgcacctggcaggacgccccgggcgccacagtcgccctccacacgggccaccccaatcctgccgcggctccgtggctctccttacctttacctgaggtgaagcaaggacgtggaagcagctacggcgcgctaccaagcacctcacaccgctctcaacagtactgctcagcctcccggcccgccgatgcgcaggcgacagcagccaacttgtaagtcaccgctggtcgcagccaactggaaggcacccagcgcctcagggcaaggcgggccgagcccccagccccgccccctggcccgatcccgggggctccggggagggggggctgagaggaggtggccggaacaacgtgcgcttgttcggattggctggcgcgggagcgtgtggagggctgattggtggccgataaatggaatgattccgcgtgggtgtgggctggcccgagccgcgccagggttccctggatgtctggggttgcctgcaggtttggattggttgggttgggttgtcctgtgatcacttaattgtgaaagaattttgtcaagcagtaaaccgactgggagaaattgaaacagaaggcgaagtgaaggatcacagtgagggataaggtccaaattcatcccgcttgtggatatcctagtatctcgcaactacgctactcctcccaggactaaaagtcaaataagaaaaagcgcccatgcagaggaggacgagctctctgcctcctgcttagcctgactcagaactgagagagctgggaaggaaaatgcatataaacgaaagtccctgccactatgtgaattgacctttagccaaatacgtttgtgtgtgtgtgggtgtgggtgtgtgtgggtgcgtgtgtgtgtttccatcctcagataaagagtttagagggcaaccttagaagcagagaaaaggaggaggtgtg

SEQ ID NO: 10787 - DNA, 6000 bp, Homo sapiens; identical to SEQ ID NO: 1184

SEQ ID NO: 10788 - DNA, 6000 bp, Homo sapiens
cacagtcaggctgggcaaacagattgggcagcggctgtgagcacagagcgcccattgtgtacccagagctctgctttcaataatcttctcggaagaatgtttcattgagcgccagagaaaggagccattgaaatgccagggctgggccctatgaagggttaaagacaaggaggccatgggtacctgggctcttgcctatcctggctcaaagacctgatatagggatcctgatcactaagacaagggcactcagtgagaccacccagaggtctggaagcgagggtcagagggggagatgtatgtctgccccagaaaggctaaagtaggtgccccagtatcaaggaggaaaacccctgtcttcccagcaccattttgcccaagtaatatccaagaagatgttagataccttctcagataccccttcagcctgccttctgtggagagcaacccatcgggcagacgtgtctctgcgtggacttcctgcgtggacctcctgcgtggacccataccacgggtcctgcaatccattctccacaatgcagccgtatggcttccttaaacacctgtggcctttccattaatcagtaattaattataatgaatgatgctgaagcagagagtgtgggagttacggtaagagccagtggtcactaaactaggtgaccaagggaacatgtagagttttctcttccaaatagaaagacctgctcattagagggatatggcctggctgtcagagagggcaccagagtgggattctctgcttccacactgagtcccacgtgtctttgccagctactgaagcttgtggggcttgaagtgtgggtaacaccatgctggcctcagtgggctgcacagaggaggcagaaggtggatgagaggggcctgccactggggagggagagcactcttgttgggcagctgagaatgacctccggcaccaccatggaacccgctgaagatgttgctgcctcactgagcctgtgtctgcagagaggatgttctgcaactgaagctgaccttgcactatgaaccgttcatattaaccattttggatggaaaccttaaaaaacagatgatgcctttctggctttcttaaaaagagatcctcaactcttaaaaagagatctaaactcacttctgtgcggaacggtgatttggcgatgtttctgggtctgttcaggtgaatatagttcttggctcctgcaccgataaaccccaaactcccaggcttttggaattcatcagtttgaatttttgtttattcttttgtttctccttaatttttcactgtgaaacatgtaagcatattttactataaaataggcaagtgtctcactttcttatatattccatctgagctgcttctaatattctcggactgggaaaggaaatgattggccttataagaattgtgaatgaagtaagagtcagtagacttaagagttaggaaggcctgaggagctctcctctgagttaagtgattgaactctgtgatattttgagtgttcagaggccttctatgttttcttttggtctttgatttgatcctgcctagacaaattgacccctagagagaggacgacagcatgcataatttatgcataaggtctttgccaagggcaataaatcagaaggaaataatattggtacttagataattttagttcaaagatggccaaacatacacatatacctagccactaacatgcacacacacacacacacacatacacacgaatagcaatgacagacaaagccacaaaaccaactaacccagtttttcacttttatatctccgctccctaaaaagttgtctgggaacaaatgattaaaatcttaacattttcaaatgggaaagagctttcacagtcctttcattttgcttccctctttttagttcaggaatctcttctattatctcctggatagacaggcactttaacccccttcttgcatggatccagtaatgggaagctcagtactttctgaagtctgatttcatcaatggaaatctgtgacaggaagtaacaaaactacaccctgccacatctgaaatgcattttgtatgcagatattaggctttctgtagtgttgtaatgtggatgtcgtttgggggttaagggaggagatcacatctgtgagaatggggggacagatctttcctgtgtggggtggacattcctcttgtcaattgtcttggaaacagctgagttctgagacagaaactgaaaaggctagtttagcttgctggagagggaatgtctgtgtctctaagtcttaattcttgggcctgaacttgagacatgttggagttttgagagtctgtgtaggttggggtagggctgatggacattgtcccagggaagacggcaggtaagcaccttgtcttgtagagaacacaaagggaagataagtgagccaatcttgaaagctatatgaccacgattcacattacactttgtgtttattccctccttgtcatccttgagcctttggaaatgtctggtttaaatgttgcagcctggcctagctgtgtaatggcatcactggaattgctgagggtcagtgtttatttccttagaatgatagagggaggatagtgctctctgaggcctctgtggattttggtgattatggagactcttaagaaaaaagtgagtattggggaacaagagttgggccctaagtccacccactcccctccacatggtgattcaccaatcactgtcatccttttattaagcaggtggccggatttcttacaaaagcaatcccttaaattggtccgaaatctgttttcctgtaactttcacccacaggacttagtccttcctctcaaaagcacagagaacaatcatcgtaaccattcacattcaccaagtgcttactgtgtgctgggcactttactgagcattgtagtagatcttatatatactattatcccattttacagatgaagaaattgaggctaagggaggtgaaataacttgtgcaaggccagaccccaaatgagtggcaggatttgaactcaaatagtctgatagcagagcccactgtcttgaattctgaaatactacttgtctcagtgacagccccacagaggtctgccgcctgtgacctttcctccctgggccttttttgatccaggtggaacccccaccccatccccttgctgcttctctttgtgcttggagtagaagggaggcagccctgcccagttccttttgccctggggcaatagaaagaatgcaaaaccctagtccacctgacctctggtgacttgttccacttcgaccccccaggacagacagccttgtggaagcctctggaagcaccattttagcagccttcccctcaggaggctgtatttttcctgtctgtcctcaacatgtcttctgccagaacaacaagctcagttttcccttctgataaatctggtcaccctaaatatggggctttgagcaaatgggagcggctggccccacgcagccctcatttcaaaatgcagattcacacgggctgctattttggaggtctggtttctttccccacacgcagtggttttaagtaagagggaagggatcatgacagaatcttggcaggggaaagatgctaggagagaagatgcacctgggcagtctttgcttcccaaagtccccaaacactggcccttcaagaagctggttggggggtggggggagcaggaaagagggtccatggtaacataacactgggaaatacagcctaaccagcccctcctgcagatcagcagtgtgcatgttaaacatttgaaatcctagaagtaaagaagcctaactggttttgtttagcccagtttttccatttaaaaatgtagcctagtaaaattttgcaaaacaatgatgcagagcagagcttgcaaaccggcaccgatggtctgatatattcctgggagaggtctgatttggcctacaaagtgcttaaattttgctttcaattagtcactaacatttcacaattggaatagttctcctaatagataaagagggtattcctcttgaaaaatcagaagatctggaaacactggtccgtattcttgcctgactgtagtcagctggaagccaggctgtggtttttaacttgctgcagcccctgtgtctccttagggcaagacaactatctcttgctctactcatttatgatgctcatcgggttccagagtcccccaagcttgccttctctggtgtggaggtttccttgggtaggctggcctaggtgaccattggggcccattcatccattcactcatgcaacatatactgattgagcttatactgtgtgctgcaccctgtggatacgagatggataaaacagcccctgccctctggattccagcgctggcattctaagattctagttgggaactgcagaacgaggaggagggaggggttgaggagaggggagctggcaaggctacaaccaagcttcctgacttgcagccgcgggggcttgccaaagtgcttgccattctccatcgctttctctaccggctcaccgaagggagccgccactccaacagccacggtgagccttagagacatagccactgacttgttctgtgacttagacgcgttgaggctcatctccgggcctcagtttctccatctgtagaatgacccggttggactaggaaatgatgggctttccttccagggctggcactcagagaggctaagactccatgatcgaggaatgtctgacccagccattctggagctgttccatcgaattccaagcagccccactccctcctttccccatcccggtcaggggcgggcgctggagccagcaggccgagagggccggggcttcccgcccgggaggtggagccgctgctctgcgtcccgcccctccacctggggctcggcccggcccggcagatgttacaactttttcgaattctctcccgccgtgtcccctcgacccgcccaacttgtgcctccctccccttcccctctggggtcctgcccacctccctgcagggagctgggctgttttaaggactccgggtggggcgagaggccgggaaagcagaggagagagaaattaggaggcgggagaaatccagggcaagaaggaagaggggagtcagaggatggtagagagcactttttggaagctgccacgccgcgtctcaggctggccgggctgagctggggaagagggagcaaaggcggcgcagggcctgcgcttaggcagcgggaggcagctcggcgcgggcctgacctccccagagcgccccgctgcggccgagcagatccggcccagccgtccggcagccagtcccggaccagacactggaccgtccccggggggcgctgaactccctcgcagcatccgagccggcgggccggtggtgcgccctgggcgcgcgaggtggtgaggccccaggagcccggcgcgccgggacgcgcgggccggcttggcgatgcacaccctcactggcttctccctggtcagcctgctcagcttcggctacctgtcctgggactgggccaagccgagcttcgtggccgacgggcccggggaggctggcgagcagccctcggccgctccgccccagcctccccacatcatcttcatcctcacggacgaccaaggctaccacgacgtgggctaccatggttcagatatcgagacccctacgctggacaggctggcggccaagggggtcaagttggagaattattacatccagcccatctgcacgccttcgcggagccagctcctcactggcaggtaggcgtggctcaaggccccggggctgggcatctaaaccccaaatcaacccagttgatagatttctcctgccagtaccaccccatgctgggatctgggaaatctcctgttggctgtgtaatcattagtaagtccctcgccctctctaggcctcaattacccttcctttacactgaatgggcttcatcatctttgaggtcttcttgctttgatgttcca

SEQ ID NO: 10789 - DNA, 6000 bp, Homo sapiens
atccagtattataaactaatgctttcagggtagggcatagggaaccatgtagcaatttacaagtcaaattcctttcagtagctggcaatctttttcttcaaaacatgcaaataacatacgcctcctttaagcactccaaaataaacatttcttcctaaacagaacagattcaattctgaatagcagagttgcccattcaaagctctaagacattcctaaacaaaactgcaatccatatcctttgttattctacaattcttcaaaatacagacttgtgttaagagaagagcagtcaccttagggtgggatatctggccttggaatgatggtcccactgcccacttcctctggaagtttgagcaagctctttaacttccctgacttttccaccattagcaaaatgggaatacgaacacctaaccttaggaggcttctgggaagcttcaatgaaacaacctatgttagttcataggtcacctaacaatgagctactatacccaatagacactcaaacactcattagttcataaaatactttgtaaccctctaatctgtcacaaagaaaactgatttggctgcatttcaggtaaatgatgcaatattaagagttacctgtgtacagaatgaccttaaagcaacatttttatatccaaatttctaaaattaattcctcaaattactgccaatatattttagcttttctttatagcacaccaccaagttatgattcaaaaaaaagaaaaagaaggccggcgcggtggccaaagtgctgggaggccaaggcaggcagattacgaggtcaggagatcgagaccatcctggctaacacggtgaaaccctgtctttactaaaaataaaaaaaaattagccgggcatggtggtgggtgcctgtagtcccagctactcggtaggctgaggtgggagaatggcgtgaacctgggaggtgaaggttgcagtgagccacgatcatgccactgcattccagcgtgggcaacagagcaagactctgtctcaaaaaacaaaaagaaaaagaaaaatcagccaagaacgctggaccagtggtcacagaaaaggaaagggaaagaaagaatttgagattaaagaattgtcttgaaacagaaatgaatgcctaatggatagccagcgaacaggcctgtggcagcctcccagtgtggtatttggtcgagtatctgccactggccctcaggacatcaatattctcatccgattgtggctgtagttgtgggtggctgaaaccgtggtgctaaaatactgaatgccagtcttagtctctctcatggttggagacaactgactagagacaccatgagcagccattttcttctctgatgtctcagtactgcatgcagaacaaaggcacaatcaatgctgctgttctgggaagcaccctgtggcaatgcagagcaccctctctcatctctcagacacagcaacttagcagccagataagctggtcaccattaggaatcatcgatatctaggagtaaggagatgagggagaggaaaagtccctggtgagaaagggttgtatgtatcctacagggaacaaaaagatgaaacactatgttcccctgggactaagtgcactgactaggatcacccatggggaacctaatcatgggccctcatgcattcaaaatacaactaggtaaccctgggctaggtactatgggagatgtacacaggtacaatccaagtctctgtcctcaagctgcttataccttagctggagagagacatgagtaaacagttacatgaccctgttcataatctaagttgcatttagtcttgtcctaactttgccactagttcgttgtcaccctgggcaaactacattacccctgggcttcagttgccccatcctttctagctctaatattgataggccctatatcaaagctctaagatgcttaattaatatcaaaacaaggctgggctgggaacgatggctcatgcctgtaatcccaatactttgagagggtggggtgggaggactgttgaggtcaggatttcaagaccaacttaggcaacatagcgagaccttgtctctacaaaaaatgttttaaaaattagccaggcatggtggcatgtgcctgtagtccaagctacttgggaggctgaggcaggcggatcacttgagcccaggagttggagactgcagtgagctatgatcacaccactgtactcaaggctagatgacagaggaagaccccatctctaaaaacaatgtttttaatttaaaaaataagtctgaaagaacaccacaaacaagtataagtctaggaatgaattctaaatggaaagaaaagacaacagactaatgtctgagactaccaggtctgtataaagcataagatctccacctcctctccaggctgtcctgtgccccacccaccgaaaccaactttgctacggtcactgatgtcctccatgctgcttcctccaatgggcatcccctggtactcatcttacttggtgtctcagcagaattcatacttccctccttttgaaacaccatcttcttttggattctgtgacatgacattgacctgattttcttcccttttttttttttttttttgagacaaggtctcgctctattacccaggttgcagtgcagtagcacaatcatagctcactgcagcctcaaactcctggcctcaagcaattctcccgccttggcctcccaaaatgctgggattacaggcaagagccaacagcctttttccatttatctaacaaatctttcttgtctttgccaactcctcctcttctaactcacccctaaatggaccaagtcctgagccatcctctcttctcacactataatttcttcttgagtcatctcatctattaccttggcttttttccataaatacctatgattctccaattatctccaacccagacctcacctctggctttctaattcagacataaattttctggaagttgacatttggatgtctcacagcactccttaaacagtgtccaaaccagaaatcttgatccctgcatcccaaacccattcctctcccacacttccccagctcagtaaatatcacttccagccacctatttcctcctttcctccaggcccgaaatctgggagtcatgttgcctaggctggagtggcacgatcttggcttactgcaagctctgcctcccgggtttacaccattctcctgcctcagcctcccaagtagctgggactacaggcgcccgccaccacgcctggctaatttttttgtatttttagtagagacggggtttcaccacgttagccaggatggtctcaatctcctgatctcgtgatctgcctgtcttggcctcccaaagtgctaggattacaggcgtgagccaccgcgcccagcctggaagtcattcttaatacccttcactccttttacccttgccatgagccctacaaacaactaacttaccactaatagtcacatcgtccctcttattaatcatcatcctagccctaagtctggcctacgaatgattataaaaagggttagactgagccgaattggtatatagttcaaacaaaacgaatgatttcgactcattaaattatgataatcatatttaccaaatgcctctcatttacataaatattatactagaatttaccatctcacttctaggaatactagtatatcgctcacacctgatatcctccctactatgcctagaaggaataatactatcactattcattatagccactctcataaccctcaacacccactccctcttagccaatattgtacctatcgccatactagtctttgctgcctgcaaggcagcagtaggcctagccctactagtctcaatctccaacacgtatggcctagactacgtacataacctaagcctactccaatgctaaaactaattgtcccaacaattatattactaccactgacatgactctccaaaaaacacataatttgaatcaacacaaccactcacagcctaattattagcaccatccccctactatttttcaaccaaatcaacaacaacctatttagctgctccttatccttctcctccgaccccctaacgacccccctcctaatactaactacctgactcctgcccctcacaatcatggcaagccaacgccacttatccaatgaaccactatcacgaaaaaaactctacctctctatactaatctccctacaaatctccttaattatgacattcacagccatagaactaatcatattttatatcttcttcgaaaccacacttatccccaccctggctatcatcacccgatgaggcaaccaaccagaacgcctgaacgcaggtacatacttcctattctacaccctagtaggctccctccccctactcatcgcactaatctacacccacaacaccctaggctcactgaatattctattactcactcttactgcccaagaactatcaaactcctgagccaataacttaatatggctagcgtacacaatagcttttatagtaaaaatacctctttacggtctccacctatggctccctaaagcccatgtcgaagcccccatcgctgggtcaatagtacttgctgcagtactcttaaaattaggcggctatggtataatacgcctcacactcattctcaaccccctgacaaaacatatagcctaccccttccttgtactatccctgtgaggcataattataacaagctccatctgcctgcgacaaacagacctaaaatcgctcattgcatactcttcaatcagccacatagccctcgtagtaacagccatcctcatccaaaccccctgaagcttcaccggcgcagtcattctcatagtcgcccacggacttacatcctcattactattctgcctagcaaactcaaactacgaacgtacccacagtcgcatcataattctctctcaaggacttcaaaccctactcccactaatagccttttgatgacttctagcaagcctcactaatctcgccttaccccccactattaacctactaggagaactctctgtgctagtaaccacattctcctgatcaaatatcactctcctacttacaggactcaacatactaatcacagccctatactccctctacatatttaccacaacacaatgaggctcgctcagccaccacattaacaacataaaaccctcattcacacgagaaaacactctcatgttcatacacctatcccctatcctcctcctatccctcaaccccgatatcattaccgggttttcctcctgtaaatatagtttaaccaaaacatcagattgtgaatctgacaacagaggctcacgaccccttatttaccgagaaagcgcataagaactgctaactcatatccccatgtctaacaacatggctttctcaacttttaaaggataacagccatccgttggtcttaggccccaaaaattttggtgcaactccaaataaaagtaataaccatgtacgctactatacccaccctagccctaacttccttaattccccctatccttaccaccctcattaaccctaataaaaaaaactcatatccccattaagtaaaatccattatcgcatccacccttgttattagtctcttccccacaacaatattcatatacctagaccaagaagtcattatctcaaactgacactgggcaacaacccaaacaacccaactctccctaagcttcaaactagattatttctccataatatttatccctgtagcactgttcgttacgtgatccatcatagaattctcactatgatatataagctcagacccaaacattaatcaattcttcaaatacctactcatcttcctaatcaccatactaatcctagtcactgctaacaacctattccagctattcatcggctgagaaggcgtaggaattatatcctttttactcattagttgatgatacgcccgagcagatgccaacacagcagctattcaag

SEQ ID NO: 10790 - DNA, 6000 bp, Homo sapiens
atgctatctcatactcctgggcttctccatatagcttgtatttctcatagcttagtggtctcagagtagtagcactaccaagaggcaagaagtggaagctaccaggccagttaaaggctatgtccagaactagcccaacataccttctgctacattctgttggtcaaaacagttactgtcacccctaagctcattatccaaggggatggagaaatagacctcacctcttctgggtagagtagtggcaaagtcacattgtagaaaagcttgggaggtggaaaattttttcatgattgtctttgtaaagtacaatctactacctacactttaacccaccaattcatcttttagaaatttatcctgtaagtggacttacaaatgtgaacaaaaataaatgaacaagggtatttgttactaaaatagtaatagcaaaagactggattaatctaaatgtccaataatagggttatttaacccaatttatttgtgcccatgcaatgcatagctatgtgcctgtcttaaaaaacaaacaaacaaacaagaaaacctatgtacttactttgaataaactctaagatatactttcaaatgaaaaaaataaaggtgaaggctgggcacggcggctcatgcctgtaatcccagcactttgggaggccgaggtaggtggatcacctgaggtcgggggttcagaccagcctgggcaacacggtgaaaccccatctctactaaaaatacaaaaattagccagatgtggtggcacacccctgtaattccagctacttggaaggctgagacgtgagactcacttgatcccaggaggcggaagttgcagtgagctgagatcaccccactgcactccagcctgggtgacagagtgagactcttactcaaaaaaaaaaaaaattttgttttggtagagactgggtctcactgcattgctcagtctggtctcgaattcctggcctcaagtgatcttcccacctcagcttcccaaagtgcttggattacaggtgtgagccactacacctagctccatctctattgaaaaaaaaaaaagtacttacagaaagaaatgtttttataagtcctttacaataaacccctggaaatcatatatgaaactaagccctcatatgtgttggactgttggggacacacagagatggggaagtcctgtttggagtctcactgctgctactgtctcatctttcccgctcgcttgcgagttctgctcaatctgaagtccaaatcctgctctcctaggaaggctgcattgatatccacaacatacagttctttacactgctcatgtttacatgacagcatggcctttggaaccagacattagggggttaagtattgcctctactgcttattagctacctgaccttgacaaaataatgtctctaagtcccagctttctcacttgtaaaatggggttatactgatacctacttctgaggagtaagagggctaaaaagatacatagagcacttagcacagtgcttggcactaaagaagtggtctttagtattccactcatagtcacatcacattaaccatatccaacaaagagagtgggcatcaaagcaagaaaccacagggacttgtgaggtgggcagttgctttgctttggtgtcatcagttcagattacaagtgccaaactatgtggagtggaggcccaccacctccccacctatcagctccttgatatagggcctggccaggaacagcaaggtctgtggctctaatcccagctaaacacagccatctaagggtctcttcaaaagaactcccccaggcctgagaaagtattgagatactgaagggtgcagacacctctctttatgtattggaagcatatgtgcatgtttccaccctctccatgcacactcaccccccaaccaccatcactaagggagactccagctttgtggcagtttcttcccccttctcttctccaagattctctgtgcttttgtaataatgagataggaagtatcagtgccccctagccaaagaccaccacgagcacacctgtagttgaacaagttgggttcattgcttgttgaagtgagagaggacacgtagcatgggaaaccacgtggcatctcaggaagagagcattggaaaggacttagaggatctgggtttgggttagtgcttttcaagagggttaaagaagcagaactttcctttgtgctggatgctgtcaagaagcaagagtaattctatgattgggtatattaataaatcttatctagaaagaggaatgattagagtgaggctaaagctgcaattggtaaagaagcagcaggtactcacattagctaggacagcaggcactcattagctaggtcatttttgtgacttggacaatgttcatgcttttgtatgtgttagacatgattagagtgctgttgtttttgtcttgatccatcattgttaaagaacggccctgtctcacattgatgccctgtgaaatggcttatgtccaatgggacaacagtaaggccttgctgtgaatgtcaggtcaaattctggcaacaccaaggtccagctgggcctttcagatgttaggggttacttttctctttctcagaacagaagaggttaagagagacgtgggtaggtgggatttcagttttctggggacttaggcagagagttgcttagtgtgtgcaagaggtgagcggtaggtgggtggagtgggttaataagaatcgctctggactgcatcctcatggtccctagcagagagttgcttagtgtgtgcaagaggtgagtggtaggtgggtggagtgggttaataagaatcgctctggactgcgtcctcatggtccctagcagagaggtgctgtagtgtgtgcaagaggtgagtggtaggtgggtggagtgggttaatagaattgttctggacactgtgtccccatagttttcaagaaatataagtaaaaaacataaccattttttttttttttgagacagaatctcactctgttgcccaggctggaatgaagtagcgtgatctcggcagactgcagcctatgcctcctcggttcaagcgattcttgtgcctaggccttccaagtagctgggactacaggtgcgtgccaccacgtccagctatttttttttgtatttttgtagagacagggcttcgccatgttgccgaggctggtctcgaactcctgagctcaagcaatctgcccaccttggcctcccaaagtgctgggattacaggcatgagccaccgccccagccaacatgagcaattaaaaattttttgttgttgtttgctgggctgtctttcttctattttgatgctgctgtgagactctgtggatcagggtcttaaaaatattaaaagtctttcaggccgggtgcggtagctcatgcctgtaatccagcactttgggaggccaaggtgggtggatcacctgaggtcacgagtttgagaccagcctggccaacatggcgaaccccgtctttactaaaaatacaaaaattagctgggcgtggtgcccggtgcctgtaatcccagctacttgggaggctgaggcagggaaaattgcttgaacctgggaggcgcaggtttcagtgagcagagatccggccactgcactccagcctgggcgacagagggagactctgtctcaaaaaagcaaaacaaacaacaaaagtctttcaaagccgaaaggttcttaggcactgtcttaaagcctagcgctccagctgaagctggtgcctgagtccagatggtgttgaagaaggagcagggcccagcgggcaccactctcagaagtcgggctcaggtgtctcctgcctccgaacccaagaagacccaagaagacagagttcctcaggctcccagtgtccctaggaagtggcaaccttgactcttggccagagttcagagtcctggttattaacaccaataaacctttatttgccagggatactaccatgggaggacacagcccctgagcccagccctgttgatcctgtgggagcgggagggcagcggaggacaaaggcagagacctgagagccggagaggctcatcaaagggtccccagcccctctcaggaacggagcatttcttggcagagtggtattcataggacagagtttgggaagtcggggcaggggagcctgaggacacagcaaggagagctcagtggcaggtgcaggcagagcgttctttggaaaatggagatcctggaaggtgagggcctcgagcgccagtgtccagccttagtgggtatgcatatgtccagctccctaaggacacactcaggacagctaaggtgcacacaagtccaggggcttccccgtgctccgcccccctctcccccaccccggtagcaggctggagggcccagaccatgctgggtagtgggagaaatggaaagaaatgggacagggaacaggagacaagagcccatggtgggagtcaaagagctggaagagttttggaaatgggggtctgggggtagagttgatcaagggccgagttactcagcgggacaggtgggaggcacgaggccctggcagctctgttttcttggccgggcttgggggggaaagcgggtagccgtcaggcgcctaagggcccgccctggacctccccaccgagggaggtgtcaggccccgagggacccggcccccgagcatcacggacgcgctggaggccggtgggcggtcgccgtagtcgccctcccaccacctcgctcaggtttctccggcctggggcaagaggcctgtggcccgcgcgggaacgcactgtccaccctcagacctgggactgggccggcgcgcggacgctaccaagaggctgcggctcccgcccccgcggccggacgtggcgcctcccctgaggccgcggccggagcctggaggtggggtcggagtcagagcccggggctctgatgtcaccgcgcggctgcgacggcccaggagcgcgtctcggcgggagcctcaggtacgcggcgggggcgggggagcgggaagcgggcggctgggtccgcttcccccgggaggccggcggggctgcgggcggacgggggtgaagagcgggcggcgaggcggtggtcgcggggcagcccgggcatcgttcggccgggacgtgtctggctcggcgccgcgtcaggttgcgccagtggagtcggaccccagcgcgcctctcccagctgcagagctgcagggcggagaggcggcccactctaagctggcggcgcggctcaggggcgcggctgggcgcgccgcgtgtggcgccggcgggcagcgcggtctcactccgccaccctccgctcctgccctttgtcgccaagcatctggagaagccgggtccttccctcccgggctcgcgctgtcccctgcgcgcgatccttccccgacggtgaacccaacgggaaaggcccagaactgcgcggggctgcggccatctgctgtcgagccgctccgcgtgtctctgccgccccctgcggccgccggggcctgcgcctctctccctcccgtgcctcggctcccagagattgaaccccaggtaaccgggtctgtccacgcccgcggccgcctctccccgggtgtcgccagcttcctgcatttcctgtgcatggcacggagctcgggtctccagagactctgcatctggggtgcagcgaccgatgagcccgtaaaccagtcgcacactcggagcgtggatgctgcgtggggtgcgctgtcagcgcggacaggctgggagaacgggggacgctggggacagggagagccggtgaacttcccagaacgtccgcctagccagacccagctgcgggtactgggttttgagacgtggtccagtacccaggaactcagtctgacagggagacagcgcctacacagtgagcccagtactgagggaagacccgctgggaggggcggcctggatagcccctccacagagaggtcagatgtgaggtggccttgagggaggtatgatgtaaatcctgatcatt

SEQ ID NO: 10791 - DNA, 6000 bp, Homo sapiens
cgtgaaaaccctgattctgattcagcaggacggtggggaggcccaagggtctgcatttctgacaggctctgtcgtcatgctgatgccattggaccatggacgctttgagctgcaaggacagaggggagcctctggaccctgaagggacagctccgaggatagctcccctcatccccacttgccacccagctccacgcagcactttccttttttccagacctgcttgctacctcattgaattctcagtccagtgaaatagttggtagggcagagctatgatcctcattttacaggctaggaaatgagcatacagccagcatccctagagaggggccaggtcacctgatccggggtcagctcttccatggagcgctcctgccatcagtcatgtctggcatcggcagaactggtcctgcttgagatggagagggggcttccagggacttgtgagcgaccctcgctggccaaacaggacatagacccagctctcctcacctaagaatcccttattgtctttctgttagtgagtcccacgtgtagattttgtccactagactgtatttacttgtttccccactgtcccttagtcagtggcttctgtgactgtcaaccagaacttctgatgaaggaccgccagttttcatcctaacttgattccaaccaaaagcagactccagtggagcattcatgccccaggctgtggctcctcagagacagtggtggttctgggctacaaagggctctgtggtgaaagacgcttgggatgtggtggattccatcacatacacaccttggagggtcacgacgcacacagcacatgaaaggctttgaaagtcttgctgtaaagatcctctttagctgggttttccataggtatttgaccacagtctttctggagaatcctcacacagaacattcaggcaatgctgaactaggtgcttctgttagatggttagtcagtgtcctacttctgccaagtttttggaaatggtgaaatagctaaggtcctgcattaggtcgtcctaggacctccaagggtctttaggtgtcaggaacctcaggttgggaactcccgatggggaagtaatgaacagagggtgcctaggctgggaagactttctgaggaggtgaggcccgcactgagacctgaatgacaagaagcagcaagccaggaacaggtctgggagaagcgtgttccaggaagaggtgatagcaagtgccaaggtcctgaggcaggaccaagctaggcttcctcctgcgccaaggctgccctcctctgaagtcaggggggcacaaggctggggaggacacagtgccccagagtaggctgggcaaagcagccttgctcaagggcaaggctgggggaaagcagactgctataaaagcccgtcctatctccacccgcagggcatccgaggaggctttcgtgaaggaatccaaggaggagaccccaggcacagagtgggagaaggtggcccagctatgtgacttcaaccccaagagcagcaagcagtgcaaagatgtgtcccgcctgcgctcggtgctcatgtccctgaagcagacgccactgtcccgctaggtgcctgctaggtgcatggccacagagcatgggctgggcctgggcacaggaggagcagctgctttggtcggggtggagactcgcagcagctgctacccacagcctattccactcctccccatctccaggcgctgggaggggggccctcaccccatcacgcctcgctccctcctggccctctggtccagcccctcacgcctcctctcagtctactcaattgtgactgtccctcctgatgtattttttttcttggcttaaagggtgtgttgttgactctttttacacttatttattatcattctcacttctctggaagccacaactggtgtcagggctcggtttgtgcttagaactttcccagcttcatgaccttgagagaagggagaatgttcccccatttcccagccaagtgggagccccaagctctccatgtctgttgcctccacctccaggaggaaagacagcctctcgcagaatgcttttgtaacctcgatcctttaacaagtctgtgaggtaaattctgttattctcaccatataaccaaggacaccaaggttcccagaggggaagtggcttgtagtgggagggaaaagcgagaccagaggttcctggtggtagcttcctcctaagcctgggtaagagccctgaagacccatgagactcccctccttagggttggctgggaccttctggatgtggagggtccactgccctgtgtatttcgcttcctccttcaactgggctcatcttggattttggataaacaaccagtgatcacaccttcttccccttcagcagagtttgcaaacaggacgttcatgacctgcatgatgtttaaaaagatttgagtaattgccagtaaatattagcttcctagggcttctgtaagaaggtacatgaactagctggcttagaacagaaatttattgtctcatagttcttgaggccagaaatctgaaatcaagctgtggcagagccatgctccctctgaaggagctggggaagggtctgttccacctgcttctggcttctggtagcctcaggcatcccttagctggcagacgcatcaccccaatcctgcccccatcaggtggctgtttgcacattgccttctaggtatgtctgtctttgtggccaaatcttcgttttctgttttttttctcaaacagggtctcgctttatcactgaggctggagtgcagtggtgcaatctcagctcactgcagcctcaacttccttgggtcaggcaatccttccacctcagcctctcaggtagctgggactacaggcacgtgccaccacatttggctaatctttgtatttttagtagagacggggctttgccatgtcacccaggctgggcaaactcctgggctcaagcaatttatccactttggcctcccaaagtgctgggattacagggatgaaccatagcacccagcctaaggtcaaattctaaggcactagaaggacttcaacatttttggagggggacaccatgacaccaacacttacaaacagtggtcatcactccatgtccttgtcttgtatctggatgccaagggtcaccacagtgcactgctctacatctatcatctctgcctcaaagctgagagaacatggtggaggcaagcaacttagctggccctagtacagccctccactgagatctagactgttggggggttcaagaaggggtgtgtcttcactccctttttccttctgccagcttgaagctggtgttgaaaacagtacaatcactcgggaagagcgcaggtcctcaaatccaacatttgaggagcgctgaccacagaccaggaatacttgtttgaaactacatgaaggaggaactaacaggtcacctctcttctagagtgtgctcaggtcctcagcctcctcttccagaaccctcaaacactatgtacacaaatctctggagagcttcgggactgtgttcttcccactgtaccagactgcttctctgagcctgtttcctcttctatactgtgtcaagaaccagatggtctaggctgggcgtggtggctcacgtctgtaatcccagcactttgggaggccgaggttgggggattacctgaggtcaggagttcaagaccagcctggccaacatggtgaaaccatgttgttttagtattctactaaaaatacgaaatacaaaaattagccgggcgtggtggcacacacctgtaatcccagctactcgggaggctgaggcaggaaaattgcttgagcccgggaggcggaggttgcagtgagccgagattctgccactgcactccagcctggctgacacagtgagactcgtctcaaaaaaagaactagatggtctagatcagtggagccccatagactctagggaggtgggagcagggtgaggaggttatgcggagtggagggcagaaccctctgcctctgacccgactatgggaggcctcatctgaaggaaggttgtcctactgaaagtctgaaaaactgctggctagaccagtatttttcaaatggcattactctaggcccactgaactagaatctcaaggagtgaccttgagattctttttttttttttttttttttgagatggagttttgctcttgttgcccaggctgaagtgcaatggcgcgatctcagctcaccacaacctccgcctcccgggttcaagtgattctcctgcctcagcctcgcgagtagctgggattacaggcacgcaacaccacgcccagctaattttgtatttttagtagagatggggtttctccatgttggtcaggctggtcttgaactcttgacctcaggtgatccgctcgcttcggcctcccagagtgctgggattacaggtgtgagccactgcgcctggccaaatctctgctttcaaagtgccctgggtggctgttactaggaaagttcgggaatcactagactacacgatttctaagcaccactccaaagtccgtttcctccaaaatcaaagaccaaaaaccatggggatgatactgaattaaatacaagtggatttttagagtttattaagcaggggagtggaggggagatgtggcacaaatagaagtatgtaacattcaaacaacagcatctaggatttttgaaaaaactttcggttacagttacacaaagggtcacttcctccccagcgacacatgggcctctcaaaggagaggagggagtaagtcccacggtagggccagtggttgctccctgggttttggaatcatttctgcggagctttcaaggccagaccctgggcttagggtcgagacttcatagcagtgacagccagacccagcaagatggctgcgaccgtgaaaccctgggcggcgatccgggtgcgcatcatgagctgagagcgctggctgttgccccggtggaaggagtagaggccgtaggtgagggcggccgccgtggccaggcaacctgaggaggggacaaagcaactgggaaacagcaggtcgggccccgcaggtcattccccgctttgggtctcgcttccccaaagccaagatctctggatcacagcggagggagggcggcgagggtaggtcgagtcgaggtcttcctagttacagagtcctcccaatcttaggccccaaatcccgccccctaaacccgctgctcccgctccaatcagtttcgcccctcaccgccccgccccctcgtctcttctctagtccgctctccttccgctccccgctagcgctctggtccttctctacttccttccctccgacatcactgtcctctccttgtgcagttcctaccgcacccacttacctatgggtaccaccgggttctcgcgggtcttgcgaacgaacttttccttgaaactctctggattcctgtaaacagtggggctcagcccctcaatgactggaggcttcgatggttcaaaggggacctccggaatcacagggccgggagtcgccatgtccgggccacagcagcaggagaaaatcgggactccgacctcagcctcccggtgaaggtcatgaaaggggcggggaaacgaataaattgagccttgtacgcaggcgcaaatgctcgttgcatcctgggagtcgtagtgctcagcacggtagtgctacaaaaggactacatttccccaaatgcccgcaaagccttgtgcacgccttccggaaggagtttgttacacgaggtctgagagacagaggcagcgtgtttgagctgctggtgcggtggtcagcgcgatgcccaaggccaagggcaaaacccggaggcagaagtttggttacagtgtcaaccgaaagcgtctgaaccggaatgctcgacggaaggcagcgccgcggatcgaatggtgagggggctggggttccgggtggccgtgggcctcggccgggacggtccgcgagatgacggatccgcgatgtctctctt

SEQ ID NO: 10792 - DNA, 6000 bp, Homo sapiens
ctgcagtgagctatgatctcgccactgtactctagcctggcgacacagcacaatctgtcttaaaacaaaaaccaaaaaacacaacaacaaaaaaaaaaacaggtgcggtggctcatgcctctaatacctgcactttgggagactgaagcgggaggatcacttgatcccaggagttcaagaccagcctgagccatgtggtgaaatccctgtctttataaaaaaaaaatttttttttaattagctgggcatggtggtgtgtgcctgtggtcctagctcctcgggaagctgaggcaggaggatcactttagcccaagaggttgaggctgcagtgagccaagatcgcaccactgcactccagcctgggtgacaaagaaagaccctgtctcaaaaacaggcaacacactatggggaaaccctaaagtaatacaaaataaagcgaagacctggggaggagttaataaacatccacagcagtacaatcagaaccatcatatggaatgactacttttccattatacatgaaaacactgaagctcagaaggcttaaattatatgtaaaagccaaagaatacactttggacaggactatagagcctctctctgcttctgctgttccataggcatactccaaattatacttggccactgaaaataattaaatctaaccttaaaagactaagatttgccaccaatgaagacattcaaacatatatgacaccagttatttgtggtaattctcaataaagcatcctgaaaatattctatggaaagcatctatagaataaacacacacagggaaaggaaaatacctggcacttttgctgtccctccccctcaaacactgggtcaattaaagaaatactgctaattacttggcagttgaatttaggtgtaaactatctgccatccttactgtggtctttaaagagttacttaaatacttatgcactgattctctgcccaagtgagcatgaaaatcttctgaggggactagccatccctgttttataaaagcaaaaaacaaatatcattggttaaaaaaaaaaaatctgaaatgtgtaaagaaaaaaaaaaaaatcaatcacaatgactttagactcactcctaacaggtaatctgaagccagaccatctgcttattcaaaaactgaaccttctgttcagcaaaaaagagagggagacttgactcagaatatgtcaaagtaattttttaaatattatagattataaacatgttaaaaataaattggtaagacaataagaacaaaggacaatctcacacgatatggatgaatctcacattgaacaaaaagcagacacaaagtacaaaaaactaggcaaaattaatctatgctgaattctaatattaagccagtggttacccctgaggaatgggtagtgactggaaagatactcaagtggagggctagggcttctgtttcttgctctaggtactggtttaacaagtatattcacataaggttattagctcacatatataaaatatttccaacattaatgatttgcttaaatgtaaagtttagcttttaaagttcttaggagaatccagacattaaaaagataaatgctgaagtaaaaatcagttaaagcaatgagttagcataaacgcctgggctcagggtaagacagcaattcctgcctcctaaaaagagtactataggttaaaaacatggtggcgagcctcccaagggaaaaacataccaacagataagttgacagggctggttattagagtgtaaagacatgatgagttggcttgatggcatgcaccttgtattcccagctactcagggcggatcacttgagcccaggagtttgagtgcagcctgggcaacatcttgagacctccatctcttaaaaaaaaaaattttaaagatgtgatgaaaggaaaaaatatataggctaatccctaaaaccaaaacctaaagcaatacaaaatcccagtagtctcaaccccacccctcaactctctggacttgcctaaaaaaaaagagaaaaaatttccccatgtggttgctgaaatcaggaagaaatgctcacaataagctagcaagcatctggaccttagccatgactagcaaagtataatgagtgactcttgatgcaaaataaacagaacacatggtttcaattacccgccaaataactttaaattgtttaaattatgtgagtatggttaaacttcaacaaattatttagattatcttcttaagacccaatcaccgaaaaacagcatgttaatatgcttcaccttaaacatttagagcaagggtgtccaaccttttggcttccctgggccacactggaagaactgtcttgggccatatataaaatacactaacactagcaatagctgatgagctttaaaaaaaaaaaattgcaaaaaaaatttcataatgttttaagaaaatttaccaatttatgttgggccgcatttaaagccatcctgggccacatttggcccgcgggttggaaaagcttgatttagagtaacatgtacttgaaaaaacaaataggtatttcctcactataatttctcagtgtgactcagaacaccaaaagcttattttttagttttttttttttcaggtttttgttttccaccgagttttatccacacggaaaactctcaaaaactataaaccaaaatgttcactcaggaatatgttttaattttgcttttctttttttttgtattttctaaaatgtctataataatgttatttttgtccaaaaagaaaaatgtttatggccgggcgtggtggctcaaacctgtaatctcagcactttgggaggccgaggcaagtggatcacttgaggtcaggagttcaaaagcagcctgacaaacatggtgaaaccccgtctctactaaaaataaaaacattagcagggcgtggtggtgcatgcctgtaatcccagctacttgggaggctgaggcaggagaatcgcttgaacccgggagggggaggttgcagtgagcccagatggcgccactgcactccaggcctgggcgacagagcgagattccgtctaaaaaaagaaaaaaaaaaagacaaatgtttataatcaagatttccaattttgaaacctaaagttgaatattttctaaaaattacattactaggacgctatacccctagtttactttttcatccaaagaacaaggaactgcacatacagcctgctttatcatcacaactcaataattaaacaggtacagcagccctttcacagccagaggaacatcaacttttttcaaggttactgttattaaaacctgagaaatgggaaaccaagatatggcaaatgccccagacgtatctatcaagctaaccgttagttcattagatttctaaataagaaaggtccataaacggtccatataaaactcgcctatatctagtaagtttcagtgaccaagaaagattacgttgttttgtaagactttttttttttttttgcccaccttcctgaatttggaaaactttcttaaaatcaggcctgggcgcggtggctcaagcttgtaatttcagcactttgggaggccgaggcaggcggatcactaggtcaagagatcgagaccatcctggccaacatggtgaaaccccgtctctactaaaggtatgaaaattagctgggcatggcggcgcacgtctgtagtcccggctactcgggaggctgaggcaggaaaatcgcttgaacccgggaggcggagtttgcagtgagtggagatcgcgccactgcactccagcctgggcgacaaactgaggctccgtctcaaaaacaaaacaaaacaaaaacacaaaattagccgggcatggtggcgcatgcctgcctcaggaggctgaggcaggagaatcgcttgaacccgggaggcggagatttcggtaagccgagatcgcggcattgcactccagcctgggcaacaagagcgaaactccgtctccacataaataaataatcatttttgtaggcaaatataacaaatacagcaaaacgtcatagaatctagaaagagtatatatgcatatgtatctatcactttttcaacttttctgtgtgtgaaaattttggacactgaagtgaaaataaacgctttcaaagtcagaatacaaagaattatctattgcaacttcaacccacctgaagctttgaggcctctgatcaactcacaaacctacatttcaagcactcgatgaaaaagccctttcttaagacggcaagactttgagattcatcaactgataaaatataaaagcgatactaaaaataatctctcacctaatgtaagttcacctagaaagtcatttaccaggaggtttcatgagaaacttaacttaactttactcagtaaaagagcttttccctctattaccacttcgcctacgtttttcgtaattcccaacagtaagctttaactgaagaagaagaaaaaaaaaacatccccagcaagcagatccgggcacccctcccaggtcctaaagcctgcaaaaacccaaagagttcgtggcgctggtggctccagctgttagtttcccgggcagtctccgggttggatttgcaccctggggtctacacgggttaaaaacgcggaaaaaaggcgacgaagaaatacaaactgccagggtgtcgaaatgaaaggagcgactgtgaaaggggtaaggaaaaatccaagccatctctacggggaggatccagaaagcaccagccgcgccagggggtcaaccaactccgacaccgctcggcgtcagctgggcgccaccaggcgcggacttcggagcgagggcaggtgcgcgggccggaagcctcgggcgctcacctggcacctacctggagctcacctggcgcccgggccccgcgccgccgccccccgcccagcccgccgcgcccgcacctcgcggtccttgaggcccagcaggagcacttcctccatcagggtcagccgcgtttccttggagtcgcccttgtcgtcgtcgtcctgctcgtcgcggcggctctgcgcgtcgtcctcgctgctgccggcgccgccgcccgccgcccgctccttgtcggcggcgttgcgggaggcctcggtgcgccgctgcaccaggccggagctgcgctgggtcagcgaggtcatggctcccgccgaggcgccgagccgggccgagagggtcgcaggaccgaccgggtcgccctcctcctccccgcgcggcctccgatccgggtttccgtgttaaatccggacgccggggcgacgtccgtcggcagcagggccgggggcagtcatgaggaaacaggtcagggcgaagcgggctggccgggcgtcggcggggcaggagaggagcgccttcctgcctgtggccgcagtccccgaaacaccccgagctccaaggcggaggcggcggcggcgcctttccaatatggcggccccggctgacgtcaccggaggatgtggcagagtcggcgcgggagagctgggccgggaggcgccggaagcggcggccggggatccgctgccactgcagcctacacccttcccggccctcggtgcttgtcttttctttggcgttcctgcgccccctgacccgcggtcctgcagtcctgctcccgtgacgtgccctccctccttccgttccccgtttccccttcactacccagggctggagcctgaacctggcggggccccccgtgaatggaagagcctgggccacgcgaaggtggaccccactcagcctccagccgtgccctccacgccccagacaccgccgtcttcggaggcgactccgcggtcgtgtggacggggtcccatttggactccggggtctgcaggatcggcaggaaggactttgctctctgctgctgggcggggaggggtacgctatctgccgggactccctaaccctttagaaggagcaagtgcgtccaaatggtttgaaagtggacctttattgttttccaggagtaagaagatagaacagttgaccagttttgtttgtaa

SEQ ID NO: 10793 - DNA, 6000 bp, Homo sapiens
tatgggactgtaaattggtatagcctctttgtaagtgtgatttgacaatatcaatcaaaatagaaaattcatgtaccctgttacagttgtctattaccatgtaacaaactacccccaaacttagtagtttgcacttttataattattgtgctcatgtttttgagggtcagaaattcaggaagagctaggctgcggaattcttctctgatcagtatggtgtcagcgggggtggctgacactgcaggattcgcttccaagatggcctggttacttgcctgtgcaatgcctaagtgctccttggcctctcttttccctctccacatgctatctcatactcctgggcttctccatatagcttgtatttctcatagcttagtggtctcagagtagtagcactaccaagaggcaagaagtggaagctaccaggccagttaaaggctatgtccagaactagcccaacataccttctgctacattctgttggtcaaaacagttactgtcacccctaagctcattatccaaggggatggagaaatagacctcacctcttctgggtagagtagtggcaaagtcacattgtagaaaagcttgggaggtggaaaattttttcatgattgtctttgtaaagtacaatctactacctacactttaacccaccaattcatcttttagaaatttatcctgtaagtggacttacaaatgtgaacaaaaataaatgaacaagggtatttgttactaaaatagtaatagcaaaagactggattaatctaaatgtccaataatagggttatttaacccaatttatttgtgcccatgcaatgcatagctatgtgcctgtcttaaaaaacaaacaaacaaacaagaaaacctatgtacttactttgaataaactctaagatatactttcaaatgaaaaaaataaaggtgaaggctgggcacggcggctcatgcctgtaatcccagcactttgggaggccgaggtaggtggatcacctgaggtcgggggttcagaccagcctgggcaacacggtgaaaccccatctctactaaaaatacaaaaattagccagatgtggtggcacacccctgtaattccagctacttggaaggctgagacgtgagactcacttgatcccaggaggcggaagttgcagtgagctgagatcaccccactgcactccagcctgggtgacagagtgagactcttactcaaaaaaaaaaaaaattttgttttggtagagactgggtctcactgcattgctcagtctggtctcgaattcctggcctcaagtgatcttcccacctcagcttcccaaagtgcttggattacaggtgtgagccactacacctagctccatctctattgaaaaaaaaaaaagtacttacagaaagaaatgtttttataagtcctttacaataaacccctggaaatcatatatgaaactaagccctcatatgtgttggactgttggggacacacagagatggggaagtcctgtttggagtctcactgctgctactgtctcatctttcccgctcgcttgcgagttctgctcaatctgaagtccaaatcctgctctcctaggaaggctgcattgatatccacaacatacagttctttacactgctcatgtttacatgacagcatggcctttggaaccagacattagggggttaagtattgcctctactgcttattagctacctgaccttgacaaaataatgtctctaagtcccagctttctcacttgtaaaatggggttatactgatacctacttctgaggagtaagagggctaaaaagatacatagagcacttagcacagtgcttggcactaaagaagtggtctttagtattccactcatagtcacatcacattaaccatatccaacaaagagagtgggcatcaaagcaagaaaccacagggacttgtgaggtgggcagttgctttgctttggtgtcatcagttcagattacaagtgccaaactatgtggagtggaggcccaccacctccccacctatcagctccttgatatagggcctggccaggaacagcaaggtctgtggctctaatcccagctaaacacagccatctaagggtctcttcaaaagaactcccccaggcctgagaaagtattgagatactgaagggtgcagacacctctctttatgtattggaagcatatgtgcatgtttccaccctctccatgcacactcaccccccaaccaccatcactaagggagactccagctttgtggcagtttcttcccccttctcttctccaagattctctgtgcttttgtaataatgagataggaagtatcagtgccccctagccaaagaccaccacgagcacacctgtagttgaacaagttgggttcattgcttgttgaagtgagagaggacacgtagcatgggaaaccacgtggcatctcaggaagagagcattggaaaggacttagaggatctgggtttgggttagtgcttttcaagagggttaaagaagcagaactttcctttgtgctggatgctgtcaagaagcaagagtaattctatgattgggtatattaataaatcttatctagaaagaggaatgattagagtgaggctaaagctgcaattggtaaagaagcagcaggtactcacattagctaggacagcaggcactcattagctaggtcatttttgtgacttggacaatgttcatgcttttgtatgtgttagacatgattagagtgctgttgtttttgtcttgatccatcattgttaaagaacggccctgtctcacattgatgccctgtgaaatggcttatgtccaatgggacaacagtaaggccttgctgtgaatgtcaggtcaaattctggcaacaccaaggtccagctgggcctttcagatgttaggggttacttttctctttctcagaacagaagaggttaagagagacgtgggtaggtgggatttcagttttctggggacttaggcagagagttgcttagtgtgtgcaagaggtgagcggtaggtgggtggagtgggttaataagaatcgctctggactgcatcctcatggtccctagcagagagttgcttagtgtgtgcaagaggtgagtggtaggtgggtggagtgggttaataagaatcgctctggactgcgtcctcatggtccctagcagagaggtgctgtagtgtgtgcaagaggtgagtggtaggtgggtggagtgggttaatagaattgttctggacactgtgtccccatagttttcaagaaatataagtaaaaaacataaccattttttttttttttgagacagaatctcactctgttgcccaggctggaatgaagtagcgtgatctcggcagactgcagcctatgcctcctcggttcaagcgattcttgtgcctaggccttccaagtagctgggactacaggtgcgtgccaccacgtccagctatttttttttgtatttttgtagagacagggcttcgccatgttgccgaggctggtctcgaactcctgagctcaagcaatctgcccaccttggcctcccaaagtgctgggattacaggcatgagccaccgccccagccaacatgagcaattaaaaattttttgttgttgtttgctgggctgtctttcttctattttgatgctgctgtgagactctgtggatcagggtcttaaaaatattaaaagtctttcaggccgggtgcggtagctcatgcctgtaatccagcactttgggaggccaaggtgggtggatcacctgaggtcacgagtttgagaccagcctggccaacatggcgaaccccgtctttactaaaaatacaaaaattagctgggcgtggtgcccggtgcctgtaatcccagctacttgggaggctgaggcagggaaaattgcttgaacctgggaggcgcaggtttcagtgagcagagatccggccactgcactccagcctgggcgacagagggagactctgtctcaaaaaagcaaaacaaacaacaaaagtctttcaaagccgaaaggttcttaggcactgtcttaaagcctagcgctccagctgaagctggtgcctgagtccagatggtgttgaagaaggagcagggcccagcgggcaccactctcagaagtcgggctcaggtgtctcctgcctccgaacccaagaagacccaagaagacagagttcctcaggctcccagtgtccctaggaagtggcaaccttgactcttggccagagttcagagtcctggttattaacaccaataaacctttatttgccagggatactaccatgggaggacacagcccctgagcccagccctgttgatcctgtgggagcgggagggcagcggaggacaaaggcagagacctgagagccggagaggctcatcaaagggtccccagcccctctcaggaacggagcatttcttggcagagtggtattcataggacagagtttgggaagtcggggcaggggagcctgaggacacagcaaggagagctcagtggcaggtgcaggcagagcgttctttggaaaatggagatcctggaaggtgagggcctcgagcgccagtgtccagccttagtgggtatgcatatgtccagctccctaaggacacactcaggacagctaaggtgcacacaagtccaggggcttccccgtgctccgcccccctctcccccaccccggtagcaggctggagggcccagaccatgctgggtagtgggagaaatggaaagaaatgggacagggaacaggagacaagagcccatggtgggagtcaaagagctggaagagttttggaaatgggggtctgggggtagagttgatcaagggccgagttactcagcgggacaggtgggaggcacgaggccctggcagctctgttttcttggccgggcttgggggggaaagcgggtagccgtcaggcgcctaagggcccgccctggacctccccaccgagggaggtgtcaggccccgagggacccggcccccgagcatcacggacgcgctggaggccggtgggcggtcgccgtagtcgccctcccaccacctcgctcaggtttctccggcctggggcaagaggcctgtggcccgcgcgggaacgcactgtccaccctcagacctgggactgggccggcgcgcggacgctaccaagaggctgcggctcccgcccccgcggccggacgtggcgcctcccctgaggccgcggccggagcctggaggtggggtcggagtcagagcccggggctctgatgtcaccgcgcggctgcgacggcccaggagcgcgtctcggcgggagcctcaggtacgcggcgggggcgggggagcgggaagcgggcggctgggtccgcttcccccgggaggccggcggggctgcgggcggacgggggtgaagagcgggcggcgaggcggtggtcgcggggcagcccgggcatcgttcggccgggacgtgtctggctcggcgccgcgtcaggttgcgccagtggagtcggaccccagcgcgcctctcccagctgcagagctgcagggcggagaggcggcccactctaagctggcggcgcggctcaggggcgcggctgggcgcgccgcgtgtggcgccggcgggcagcgcggtctcactccgccaccctccgctcctgccctttgtcgccaagcatctggagaagccgggtccttccctcccgggctcgcgctgtcccctgcgcgcgatccttccccgacggtgaacccaacgggaaaggcccagaactgcgcggggctgcggccatctgctgtcgagccgctccgcgtgtctctgccgccccctgcggccgccggggcctgcgcctctctccctcccgtgcctcggctcccagagattgaaccccaggtaaccgggtctgtccacgcccgcggccgcctctccccgggtgtcgccagcttcctgcatttcctgtgcatggcacggagctcgggtctccagagactctgcatctggggtgcagcgaccgatgagcccg

SEQ ID NO: 10794 - DNA, 6000 bp, Homo sapiens
accaagttatgattcaaaaaaaagaaaaagaaggccggcgcggtggccaaagtgctgggaggccaaggcaggcagattacgaggtcaggagatcgagaccatcctggctaacacggtgaaaccctgtctttactaaaaataaaaaaaaattagccgggcatggtggtgggtgcctgtagtcccagctactcggtaggctgaggtgggagaatggcgtgaacctgggaggtgaaggttgcagtgagccacgatcatgccactgcattccagcgtgggcaacagagcaagactctgtctcaaaaaacaaaaagaaaaagaaaaatcagccaagaacgctggaccagtggtcacagaaaaggaaagggaaagaaagaatttgagattaaagaattgtcttgaaacagaaatgaatgcctaatggatagccagcgaacaggcctgtggcagcctcccagtgtggtatttggtcgagtatctgccactggccctcaggacatcaatattctcatccgattgtggctgtagttgtgggtggctgaaaccgtggtgctaaaatactgaatgccagtcttagtctctctcatggttggagacaactgactagagacaccatgagcagccattttcttctctgatgtctcagtactgcatgcagaacaaaggcacaatcaatgctgctgttctgggaagcaccctgtggcaatgcagagcaccctctctcatctctcagacacagcaacttagcagccagataagctggtcaccattaggaatcatcgatatctaggagtaaggagatgagggagaggaaaagtccctggtgagaaagggttgtatgtatcctacagggaacaaaaagatgaaacactatgttcccctgggactaagtgcactgactaggatcacccatggggaacctaatcatgggccctcatgcattcaaaatacaactaggtaaccctgggctaggtactatgggagatgtacacaggtacaatccaagtctctgtcctcaagctgcttataccttagctggagagagacatgagtaaacagttacatgaccctgttcataatctaagttgcatttagtcttgtcctaactttgccactagttcgttgtcaccctgggcaaactacattacccctgggcttcagttgccccatcctttctagctctaatattgataggccctatatcaaagctctaagatgcttaattaatatcaaaacaaggctgggctgggaacgatggctcatgcctgtaatcccaatactttgagagggtggggtgggaggactgttgaggtcaggatttcaagaccaacttaggcaacatagcgagaccttgtctctacaaaaaatgttttaaaaattagccaggcatggtggcatgtgcctgtagtccaagctacttgggaggctgaggcaggcggatcacttgagcccaggagttggagactgcagtgagctatgatcacaccactgtactcaaggctagatgacagaggaagaccccatctctaaaaacaatgtttttaatttaaaaaataagtctgaaagaacaccacaaacaagtataagtctaggaatgaattctaaatggaaagaaaagacaacagactaatgtctgagactaccaggtctgtataaagcataagatctccacctcctctccaggctgtcctgtgccccacccaccgaaaccaactttgctacggtcactgatgtcctccatgctgcttcctccaatgggcatcccctggtactcatcttacttggtgtctcagcagaattcatacttccctccttttgaaacaccatcttcttttggattctgtgacatgacattgacctgattttcttcccttttttttttttttttttgagacaaggtctcgctctattacccaggttgcagtgcagtagcacaatcatagctcactgcagcctcaaactcctggcctcaagcaattctcccgccttggcctcccaaaatgctgggattacaggcaagagccaacagcctttttccatttatctaacaaatctttcttgtctttgccaactcctcctcttctaactcacccctaaatggaccaagtcctgagccatcctctcttctcacactataatttcttcttgagtcatctcatctattaccttggcttttttccataaatacctatgattctccaattatctccaacccagacctcacctctggctttctaattcagacataaattttctggaagttgacatttggatgtctcacagcactccttaaacagtgtccaaaccagaaatcttgatccctgcatcccaaacccattcctctcccacacttccccagctcagtaaatatcacttccagccacctatttcctcctttcctccaggcccgaaatctgggagtcatgttgcctaggctggagtggcacgatcttggcttactgcaagctctgcctcccgggtttacaccattctcctgcctcagcctcccaagtagctgggactacaggcgcccgccaccacgcctggctaatttttttgtatttttagtagagacggggtttcaccacgttagccaggatggtctcaatctcctgatctcgtgatctgcctgtcttggcctcccaaagtgctaggattacaggcgtgagccaccgcgcccagcctggaagtcattcttaatacccttcactccttttacccttgccatgagccctacaaacaactaacttaccactaatagtcacatcgtccctcttattaatcatcatcctagccctaagtctggcctacgaatgattataaaaagggttagactgagccgaattggtatatagttcaaacaaaacgaatgatttcgactcattaaattatgataatcatatttaccaaatgcctctcatttacataaatattatactagaatttaccatctcacttctaggaatactagtatatcgctcacacctgatatcctccctactatgcctagaaggaataatactatcactattcattatagccactctcataaccctcaacacccactccctcttagccaatattgtacctatcgccatactagtctttgctgcctgcaaggcagcagtaggcctagccctactagtctcaatctccaacacgtatggcctagactacgtacataacctaagcctactccaatgctaaaactaattgtcccaacaattatattactaccactgacatgactctccaaaaaacacataatttgaatcaacacaaccactcacagcctaattattagcaccatccccctactatttttcaaccaaatcaacaacaacctatttagctgctccttatccttctcctccgaccccctaacgacccccctcctaatactaactacctgactcctgcccctcacaatcatggcaagccaacgccacttatccaatgaaccactatcacgaaaaaaactctacctctctatactaatctccctacaaatctccttaattatgacattcacagccatagaactaatcatattttatatcttcttcgaaaccacacttatccccaccctggctatcatcacccgatgaggcaaccaaccagaacgcctgaacgcaggtacatacttcctattctacaccctagtaggctccctccccctactcatcgcactaatctacacccacaacaccctaggctcactgaatattctattactcactcttactgcccaagaactatcaaactcctgagccaataacttaatatggctagcgtacacaatagcttttatagtaaaaatacctctttacggtctccacctatggctccctaaagcccatgtcgaagcccccatcgctgggtcaatagtacttgctgcagtactcttaaaattaggcggctatggtataatacgcctcacactcattctcaaccccctgacaaaacatatagcctaccccttccttgtactatccctgtgaggcataattataacaagctccatctgcctgcgacaaacagacctaaaatcgctcattgcatactcttcaatcagccacatagccctcgtagtaacagccatcctcatccaaaccccctgaagcttcaccggcgcagtcattctcatagtcgcccacggacttacatcctcattactattctgcctagcaaactcaaactacgaacgtacccacagtcgcatcataattctctctcaaggacttcaaaccctactcccactaatagccttttgatgacttctagcaagcctcactaatctcgccttaccccccactattaacctactaggagaactctctgtgctagtaaccacattctcctgatcaaatatcactctcctacttacaggactcaacatactaatcacagccctatactccctctacatatttaccacaacacaatgaggctcgctcagccaccacattaacaacataaaaccctcattcacacgagaaaacactctcatgttcatacacctatcccctatcctcctcctatccctcaaccccgatatcattaccgggttttcctcctgtaaatatagtttaaccaaaacatcagattgtgaatctgacaacagaggctcacgaccccttatttaccgagaaagcgcataagaactgctaactcatatccccatgtctaacaacatggctttctcaacttttaaaggataacagccatccgttggtcttaggccccaaaaattttggtgcaactccaaataaaagtaataaccatgtacgctactatacccaccctagccctaacttccttaattccccctatccttaccaccctcattaaccctaataaaaaaaactcatatccccattaagtaaaatccattatcgcatccacccttgttattagtctcttccccacaacaatattcatatacctagaccaagaagtcattatctcaaactgacactgggcaacaacccaaacaacccaactctccctaagcttcaaactagattatttctccataatatttatccctgtagcactgttcgttacgtgatccatcatagaattctcactatgatatataagctcagacccaaacattaatcaattcttcaaatacctactcatcttcctaatcaccatactaatcctagtcactgctaacaacctattccagctattcatcggctgagaaggcgtaggaattatatcctttttactcattagttgatgatacgcccgagcagatgccaacacagcagctattcaagcaatcctatacaaccgtatcggcgacatcggtttcatccttgccctagcatgatttctcctacactccaactcatgagacccacaacaaataaccctcctaagtgctaatccaagcctcaccccactactaggcttcctcctagcagcagcaggcaaatcagctcaattaggccttcacccctgactcccctcagccatagaaggccccacccctgtctcagccctactccactcaagcactatagttgtagcaggagtcttcctactcatccgcttccaccccctagcagagaataacccactaatccaaactctcacactatgcctaggcgctatcaccactctgttcgcagcagtctgcgcccttacacaaaatgacatcaaaaaaatcgtggccttctccacttcaagccaactaggacttataatagtcacaatcggcatcaaccaaccacacctagcattcctgcacatctgtacccacgccttcttcaaagccatactatttatatgctccggatccatcatccacaacctcaacaatgaacaagatattcgaaaaataggaggactactcaaaaccatacctcttacttcaacctccctcaccattggcaacctagcattggcaggaatacccttcctcacaggtttctactccaaagaccacatcatcgaaaccgcaaacatatcatacacaaacgcctgagccct

SEQ ID NO: 10795 - DNA, 6000 bp, Homo sapiens
aaaaaatagtacctttacagcagagaaattccacagacaccaacttgacaaatgatcaaggttaacatcaccagtaataagacacatcagcatcatgtacccactggtatgatgcccagagaatgcatcacttctaaggtatcattaccaaaaagtgcataacgcaatctaattgtgagaaaaatcatgccaacccaaactgaggagcattcatcaaaatactcataaaaatgtcaagatcatgaaagataaggaaagactaaggaacaatcacagattggagactgagacatgacaactaaatacaacatgggattttggatgggatcctacgatagaaaaagggcagtagtagaaaaactggtgaaatccaaacaaagtctgtagttcagttattactattgtaaccaatgttaatttcctggtttggataaatgcataacgcgtatttaaattgttaacatcagagaaagctagatgaagggtatatgtgaaatctctgtactattttcaaacttctctctaaatcaaaagttatttcaaaataaagttaaaaaataatcgccaggcgcggtggctcacgcctgtaatcccaacactttgggaggccgaggcaggtggatcaccttaggtcaggagttcgagaccagcctggccaacatggtgaaaccctgtctctactaaaaatacaaaaaacaaacaaacaaacaaacaaaaaactagccgggcatggtagcaggcccctgtaatcccagctactcgggaggctgaggcaggagaatcgcttgaaccaaggaggcagaggttgcagtgagccgagatggcaccattgcactcctccaccctgggcaacaagaacgaagaaagaaactccatctcaaaaaaataaaataaaataaaataaaataaaataaaataaaacgaaaaataatttgactcttagtaactgcacaggttgaaaaacttggacctcacaatcaacccctgaagaaggaaactaccttatacacatgtacacacacagacgaatgcactcacgcaaaccccaactcagacaccttattgctacctcctggcatactatgaaaggcatttctacagcacagcatgccatccttggttcctggctaaccctgtcctcctgtgaagaggtgttggggggcagttcaggcagacttgtctgtccccaaagatatgcccattgggagatcctggcacggcagtataaggcaaagacacaatctgaggacagtcccactacctgtgttgtgccaactgggatgcagagaaccttctcaggggccctgggcttggccctgtacactggcactggccaagtcagtatgggtttggacttgtgttctattctctgaggcttggaactgccactgtggggagaggggctcagcctccagcaagtcccatcacctattacacaggccacaacctggactttagaacagctcccaccatgcccactgtccccagccagtggagaaggcaaagaaggtgctgagcttctgcctttaccactcctcaccaccacctaggaagcccatttgctggtgccacactctttgctggtgccacactctgtgctggccaccaccggatggggcatggggcattatctcactgagtcctcccaacaactcagataaggtggcttctcttattatccccattttgaaaactgagataaagtacacataatatacagtttaccatcttagccatttttaagtgtacagttcagaagcgttcacactgttgtgcaatcaatctccaacactactttcatcttacaaaactgaaactctatacccatgaaacaacgactccctactccttccttcttccagtccctggcaaccaccatttactttctgcttctgtgagtgtgactactcctgtagtgaaatcagaaaataatttgtcttgtgactggcttatttcactaagcgtagtctcctcaaggtttatccacgttgtagcatgtccttcctttttaaagctgaataatcgtccattgtacgcatataccacattatgtttatccatttgtctgtggaaggacacttgggttgctttcaccttttgactattgtgaataatgctaccatagacatggtgtacaaatatctctttgaaaccctgtttcaattattttagacatatatccagaattagtattgctggatcatatggtgattctatttttaatttttttagggaccaccacattattttccatagtggctgcaccattttacactcccactaggaatgaacaagggtttcaatttctctacatcctcactaacacttgttattttctgtgtttaaaaacaacaacaacacttttttagaggtggggtcttgccctgtcacccaggctggagtgcagagatatggtcatagctcactgcaacctcaaactcttgggctcaagtgatcctcctgccccagcctcctgagaagctggaactacagtcacatgccctcatgcctggctaattttttatttattttttgtagagatggggtcttactatgttgcccagtgctgtcttgaactcctgccccctagcaatcctcctgcctcggcctcccaaagtggatttctgggtgttttttttttctttttgtagtaactatttttaagggtacaaagtggtacctccttatgattttcatttgcatttccctagtgattagtgatgttgagcctcttttcatcgcttgtacccccaatttatagacaaggaaactgaggctttcatcagtgatgtaacctgcctggagtcagccaggtggttggcagtggagtcaaaactggccctctactgagtctgactccagaactctgtgtgctgccgcccctctgggggagagccatccatccatcctgcttaccctggtacttgcttccttccctcctcctcccaaccaccagagcccagttttttgttgttgttgttgtttgtttgtttgttttgagacacagtctggctctgtcacccaggctggagtgctgtggtgtgatctcagctcactgcaacctccgcctcccaggttgaagtgattctcctgccttagcctcccgagtagctgggactacaggggtgcaccaccactcccagctaatttttgtatttttagtagagacggggtttcaccatgttggccaggctggtctcaaactcctgacctcaagtaatctgcccgcctcagcctctcaaagtactgggattacaggcgtgagccactgtgcccagcccctagttgctttttattttacttccaccactcaaaaaggaagccaggaagggaaaagctgccaaaaaaagcaaatcctggtgcatgtgtgtgaatgtgtgatgatgtacatccttagaggtccctgtgaacagcgtacaacatgagtagctatggacttggaggccagcagctactcacccctcacgccctacagtgaacaaaaccagcgagcaatggaaaagcagacaggtcagcccagctgccagggaaggctgccactcatgggtccagcctccataacaggcactgataacacttccaggaatcgacgcgggatgagctggcccccagtctcagctgctcccaggccatgctgtgggcagggagtgggcaagcactagagcccctgctagggaagcaaatccagagaagcatggccaccttagggcccagggtaggtatggtgccaatgctgggggatccaaaggcagtccctgggctgagcccacttcccacaggtgccacagattcgacaaccaccacgcctggctggccaccattctcttgcagaggagagtttcaaaacttcctcactggtcttcttgtttatcatagcagctagagtgagctctttccaaaagcacgaacctggccttagaatgcttactattttctcactgtcctccgaataaagtcagctcctcagtatacatagaaggccactatgaactagcccttgtggccatttctagtctcatttgtcatatctgtcatcccttgagttccagccactccgatatatgagaattccattacctgaatttcccatactcttgcctagacaggtcttgctcacattttcagaatcagctaaaatcatatcaccccttcttggagtatttcctccacctattgtcccacagagagggtgatttatttatcccaggtcacatagcaagcaaggcaggacttgaatttgggttccagaaccctattgctaaccagggttaatgttagccttctcagtaacacagccagtgtgccccatgggcatctgagggtaggctccacacaccagatgtccacaccttagtgctcagcacaaggccagacacaatgtctgatgaccgctataccgtgctgagggaaagggataagggactagcagaggccactcaggtttttcttgggaggagcatgaggcagaggagggactagcagcagggaaatcctacctgcctgaccaatagcaggcaacagctccatgaggatgctctcctcagaagaaaggtgtatcctgacccaggtccttaccagatgtgaagcagcaaaagcgggagaagtgtgtgtgcatcctcattcctggaacttagaaaacctgccactaaccacgcagggtgctgaggggctacagcccctgcctgccaactcaccctgtgctcagagaggtccctgagggccagggcttccagctggggtttcgccttctgtgcttccttgcacccaatgagcctcaggaggccatctgctgtcttagagaaactggggcctcaggaaaggaccccaaacctcacaagtatatggtacggcagtacacctcctgatgcctccagaagtctgtggccagggaacagacaagatttggccccgccctgcccagtaacaaggtccctcacacccctcctcccatgcctggcaggaaggtgactcaggcagtgcgtctgggtagcctggggctgcgcttcccccaacgcaacatctaggttcttaggaaacttcatttgttgtgaaaatcggaaatgaaaagacagttggtgacaaactcctttctccatcacctccttattggacagaaacgacccaggaatgcgcctcgcgtgagtcctattctttcttggggtgcacacccgctgctggaagtatgaacagcaggtttgagggggaggggagcgctgacccgggcactgcgcagggagtctcaaggggggctgacgcagagggagggtcaggcactcccgggtcaacggtctcggcctggcacccacctcggtcacgacggtggacaggtagacgtcctggctgaactcccagccatccaggcagctctcctgctccagctgccccaggtccacgtcgcgccccggctccagcccgagcgccgagaagttggcgatggtggcgagccggtagcggctgcagctgtggggcacctcgcggccgtcccgcagccgcagcgggacactgttgttgcgccaggcgctgctcaggttcgcggcgtccggcactcgacagcggtgctccggggtccccgccaggaacacgactgacataccattgaagccattggggatgatgctggcgctgagcaggaagaagatgaggcgctggaagggcccccactcgcccaggaaggcgatcacctcgtcgtagtcccgcatgcttcccactgccgctccgaaacttgcaactacgggtgatgacagcgttctcaggacagtgtcttgtagctggggcgctccccaaggatgttagaacgttcccgggggacaggcaggctgttagaaattggggcgcgaagccggggaccgttcctgggaaacaggctgaaggcgttggagcgttcccgggagctcgcgctgagcttgatgccactgtacacttgggaccacacccccatccccggccgggcgcggggaaggggagggcggcccagcccgggaggctgggctcccggctgtc

SEQ ID NO: 10796 - DNA, 6000 bp, Homo sapiens; identical to SEQ ID NO: 3436

SEQ ID NO: 10797 - DNA, 6000 bp, Homo sapiens; identical to SEQ ID NO: 2372

SEQ ID NO: 10798 - DNA, 6000 bp, Homo sapiens
aacattatgcataagagattttgagtatgaaaatcaaactattgaccaagctaccattaatggtaatggtaatgctaatgaagctactgtggatggttaacactcattaagcacgtactgtgtactaggcactgctctaagcactttacaagcattaacttatggaatcccatagcccttcttctctccttatatgagtaaatcgaaaattttcttccaatacatgagtatcagagctggtcatagccacacatcatgatttcactccaaagttgtctgtacccctcctcccaaccctcctccccgactctggccatggtgcctgctactcctggctctggcccttgctgatcgttctaagatgaacccaagcccagggttcatttacttcctccctttgtcttctctgccattggccacatacatgcttcagaaaacacaataacaaagtggcaaggtgacctccacctcttttattattgtttcctatttcacctagcctaaaccaaccgtctaggatcatttagccctcatctcacacttgccctcttccaggaaatgaccgtgtctccttgataagtttcaaattcctgcacagcattcatgatatgaactctgtccaattcataatttggtcttttccacctcatcttccatatgctcacaataccaaacatagctccacatgtagaattacttatagaacatattgttccttcttcctaaaatacccatccctgattcatgcttcaaaatgcaactaaattgtcatcaccactggaagcgttctctgccttgtccttatatgccccaatgtgcatatgccaggttttgtgacctgggatagctgaaactgctgtccccttaactgttctttcttcataatgtgagcatgttgctatgttaaatgtaatggaaaaagcaagtctattccactgctgaaggaatgattcccttacgtaagtaaaaacaccatgaaattatattcttatatataaattttattatatactgtaccttactgtaacacatataaacagtaaaggttttatgccaaaaccacatatattacactttctgggcaattaaagaaatttttaaaagtaaatttcactatacacaattatagactagatcctaaccctcacatagtagatgcaagtcttctatttaacaaatgaaatgagaatgtctaaaaaaatcaaaaaaaattttttttttgagatggagcctagctctgttgcccaggctggagtgcaatggcatgatcttggctcactgtaacctccacctcccgggattacaggtggctgtcaccatgcctggctaatgtttgtattttttagtagagacgaggtttcaccaagttggtcaggctggtcttgaactcctgacctcaggtgatccacccgccttggcctcccaaagtactgggattacaggcatgagccaccgtgcctggccaaaaaaattttttaaaaaattacaagaatagtatcaaactgagaacacaggctctcaaaaacacttactggttggttgtttctaatagtttaaagaaatgacatttatttttattcatttcttcaaaagatattcattgagtgcccactgtgtatgccaagggttcatggactacctaaatctacttcatccacagtcacaagatactttaccttccaaaaatcagttatgctgcgaatggacttaaagttggttctttcttcaccaggcacagaagtgtccaaaaatagagatgacataaccttgtttaagtaatacatatgtgggtttaccatcccaaaagtcactaaggagaataattttttgtttaataatttacatttaaaaactcagcttatcaggattaaaaatgttacatttttttctcaattttgaaaattaaactttattaatctaattataaaagtaataatttaaaaaatctaaactagaaatataaaaagtaggatgtggtttctagaattagtctggcaaatattcttcagacatttctttatgcatacacatttataaagaaaataattttatctttacaaaaatgaggacacattatacacactattctgcaagttgactttttctctacatgagagtaaggcaatatagtatggtgagtggttaaggttacatggactttgaattcagacagataagggtgtgagtcccatcacagggatagtatctcttaccccctagttttgttgtgagaagtgagatgatgcacacagaacattttaaactgtgttttggcacatgatgagtttttaaaaatattaactagtggcggggcgtggtgttgcacccataatcccagaactttgggaggctgaggtgggtggatcacctgagatcaggagttcgagaccagactgaccaacatggtgaaaaccctgtctctactaaaaacatacaaaattagccgggcgtggtggcacaggcctgtaatcccagctactccggaggctgaggcaggagaatcgcttgaactcaggaggtggaggttgcagtgagccactgtactccagcctgggtgacagagcgagactgtctcaaaaaagaaaaaaaaaagaaaaaaaatcacattataaatggagattcaggttgctgtattatattaaaaaaagtgttctttaaaaatctctgaataatgggattataaatgatctttttacttacatttttacattttccaaatgttctgtagtaagcatgtagttttcataaccaagcttttataaagcagtctaagatatcttaatttataaagttgcctacagttatcttttttttttttttccttgggacagggtctcagcctgtcacccaggctgaagtgcagtcgttgcaatcacagttcactgcagcctcgacctcctgtgctcaagcaatcctccacctcagccttctcagtagctaggactacaggggtgtgccaccacacctggctaattttatagttgtcttttcaatcaagagcagactcaaactcacccctacaacaccaattaattacttaattgctatacaattgccagtgtgtagcacataccaacatgagacaatactgccagtgagctttcatctactgttatgttgggtgccatcgacaaatgctctttaatactcctctttgcatattaagccaatgctattgacccacaggtaggaggaatgcaggttgagatgttttcccagtcctccttaattatttgcattgactcagcacaaactatttttttaactgcaataggtcagtgaaaagaaccaagctaatggcagacaccaagatgaactttggcctcatttgtactttgatttatgaaactcagctgatgtgtctatatgactctaaacaaaatcaaattgcagttgccaacccaagggatgaattatgctcaagacagaactgccaaatgaaaggaataattctaattcagtcagtattgactatggaagcttcttacatttgcgatgtaaaattttgccccttaagaactgaaaatagtcaatttctaaatgaaatgaatctaaatgaatttaagattatgtttaaacgtgtcactgtattttgagttttagtagcctgacagcctgtggttttgaagtttgtatgttttatttttcatctccacattttaacttcttagttcaaacaaacagcatctttatatctgtgtacttacatatacataggtttattaaaaaaataaagtagagtaacaattcctgaagtgtggttgtaatttctacttcctttctgtaatgcaacttatgtttcgaagcccctgtgagatataagacaaaatttttctttacattattatgtaatttataagtgacaacaatggaaaaaccacagccacttttagtccttacactgcggggaggaaagctccaatagcttctggctatttttcaattcttagttttacgaggcagggataatttttttactatatactattaataacagattttttttttgagacggagtctagctctgtcgccaggctggagttcagtgacgcgatctcgtctcactgcagcctccgcctccccggttcaagcgattctcctgcctcagcctcccgagtagctgggactacaggcgcgcgccaccacacccagctaattttcgtatttttagtagagatggggtttcaccatgttggccaggatggtctcgatctcttgaccttgtgatccgcccgcctcggcctcccaaagtgttgggattacaggcttgagccactgcgcccggccactaacagattttatatcatgatgtcttctcgccagtcttaagatgaaaaagcaaaatacgaaacaagtaaaacctctcatctgtcctaaccgttttctccaccctcaatacagcttcttgggaaggctggtttctgctggacaggggaaaaacacctcggcttgaattctgtcaaggtcacgactccccagatcaaccaaggactttagagaccggcctagcgacggtcactcgacaggtgacaacgcccagctcgagcctccggcaagaggcgagcgccacctcgctcagggcttcagttttcccgtctgtgcaatgggaccatctgtccctctccgcttccccaggggaggctgtgagggctaaaggtgtcggcagtcacatctctcaaacgaatttggggccgcagagttcctttcagggtgtctggaactgccaaatcgcccctgtccctcccactccttaagaggacccctcaccgcctcggtgccaccgtgacgcctcagccatggcggacctgcactacaccgcccgttcgttcgcctgaggccgcggcgcttgcgcgctagtcttgcggcgcgcgctgcccggctctgacgcctgcgcgagcccccagctcctccagggcggcgagctactcgacaagtcgtcagcgcggctgcgccgcaggagcccgggaggcctttcgcccgaggcgggctgcgggctgctggggtctggtgcggagggccaacttctgggaataacctggctgtgggcttaaaaatcgtagtcattcattatcacgggcttctctctctcgaatacctttaacatttatcgccttgttagtctccacatccacctccgtgaaaggtaggtatttttgtcctcattttaggcctgaagaaaccgagaagctgagaaatgaagtaattcactggaagttggggccaagtcttggatgcccaagcccaaattcctaaccgtgaccctacgctgctgctgctgctgctacttgcagaaactggttattaaccgagagctgttgctggaagtagcttccactcccctgcccccgtgatgtaaaaatagatgaaaaactctgcagtgattatgtgaaaggtcaggccgacacaggagtcctggggcccagacccacatctgacccagaagctttgcaaagatgagaaggttggtaaaccagctatagaaaaggccaaactaatttggctgtaaattaaggcagccaaaagccctccaggatgtaagaccaggacggattctcgtgttgataaaaaggaaaataaaatggaatccagtccaaaggccccagggaaacctgcaaagaaaaccactaaccagttttgaaagtaaaagataaagccacttttgttatttccctgaaagagatgtagactgctgtcgataaatgctgttttatgtgtagataaaaagcaaaacggccacacagtagtgagggtcaaaaactaccatcgatgagaggaacaggagaggcctcgcaaaaggctgacagccagtgaactagaagcccgagaggaaaaaaagctttagaatagttttaacaaaaggatttgggctttcctgtactgggactctcagctgttcacaaaattatgctttctaaagtaacagattatctgaaattgaaattattagaggaaaaacacccatatataggtaatcaaatttacataattttttttttttta

SEQ ID NO: 10799 - DNA, 6000 bp, Homo sapiens
aaggattttgccagttatggtcctttaaggattaaggtggagattcccagccaaagaaggggatttcttacccatcccacagtttaaatcttaattttgtttgtggtttgaaatgatggaaaatactcctctgctgtccttcagggctgatggaatcttgtgtgctcaggacacagttgtgttgtgaccaagctgtctgtcacctgacaaatggcaatggtcatcctgataaatgggttggtaaattttagctcgtggtgctcttatttgtaataggggcttctaattcagcctgtctgtggggaagtagggcgctgtgctctatgctgttaaatcagcttctgtctctgcccagacaagcccagggtctggtttaacaagagacaaaatactcaccactcgagatcaactgaattgaactgggctgagactttgacaaactaatctgcccaccttaaaaaagagcacatttttactgtaatttgtgatcttgtctgctttttaccgagagatgttaggtgaagggtactaaggtacccatctcttagtattaaagaagaaaaattgtgattaaatcttactggctaaactatagccttaacatgttttcagtttgatcctgggaagaaaaaatatgccctgaatgaaggatatcatgttgatgttgatgttggggaaaagataacttgaaaaatggtagtggctttctctaaggttttatgtcttttttctacatacagtaaatggcagttgtaaaaaatgctcattttctaaaatcaagttagtgctataattttacagttttttcaatatgtggaacaatgtttatggaaaagttctgtgtgaatgagtagcttgcatctaaattccaaatatttaataggttttctttagaaatcataatacaagaaactgaatacctgtggttcttttctgcatgaaaaatgtggcatccttatcatttgttaactatggcatgtttatatttacattggaggatctacccctcttcccttttcagcagcaggtcctttccctgtttggtgcagattgtgtataatcattgttggctgccttgtaactccagctaacctgagagtcagatttcaaaatctgcctttccttttaatccctcacctctgtgctgccttcaagttaccactgtgtggctgcataggcatgtcgagttgttctgccatgagattcatctcagtggtgctgttttcttcacctacactgaactacacttacagcgtgaatgcgtatctttattgaaagatcgaaatgtattatataatagttggaaagtgttttttttcatggttcctttgtaatacaataagaatcagtgttaagcctgttgctagccaattatttttaacttggctctttgaggtttgaagatcaggaaaaagcagaagaaagaggtttaaacccctttgtcaaggcatctttgatcatgatagttgagagagagagcgcgagagtgtgtgtgtgtgtgtgtgtgtgtgtgtgtgtgtgtgtgtgcgcttttaaattggagggagcatgtcaggattgttaaattgactcagtttgtcttgtttatctccaaaatatcttctaaatcttttttcacatattaatgtaaacataggatttagtacattaattagtacaatgacagtttaatgctagtttaaaacagttgtctaaatgccacaaaaatcatgtccattataagtcaaacgagaaatgtataagaagttggtgtaattatttaggattggtttcattgtaatgagaccttttcacagtcacttggattcattgtgtaaatatattaaagagtcactcagcttattagaattacattaaagggttctgaattcatgatatggactttgataatatctactaacccaggcagaaactctggaaggagaatgtttaatatttaccagtcttcagcatacatgaaattctacttcccaccctggcaagaaattgaagatttgagtaaataccaaattatcatacaagagaactttactaagtctccttttaagcagcaagatagttgtggtacatgggatggagagcagtgatcaaacaggtattgatctatatctgtttctgcccaatagcttctttctaaattgttttcagtagaaaaaaatagtatatggagaccttagtgtaaaggtttacacacgattgtatataattacatacatttcttattttgaagtaagcattttagactttccaacaggagtgcaaattaatgtgagcattgattcatttaacacttaaaatatggtttcatttaaaaaattaaaaatacttcaacacttcaaaaactaagtctccacttagtttggaaaattaggcttaatgtcaccattggtaaaaattagatatgtatttagcctctactatgtaaaataggttacttatctgatgtgatttttgatgatgggtagatattatacttcacattctttgtatggcagctgctgacacttgcactgtccataaccattaatgatgatgaagggtccttcatgggtgggttcatattcattatacggtccttggtctgacatgtttgacatatggagtcgtgtttgggatcggagctgcctgtggttctgaaccattgagcactgcctaattcttcttaaagtgggagggcagcacttcctggagatgaacactataaaaataataaaaaagaaagaaaacaataaagccattgttcccgtaattacccgctgagtgaagatggcattgtctggttcaggaaagtgttcctcggtagtaactgctatgcctgcagtagttgggatttctttgtctcccacatggtaacttgatgagcttattctttttgtatattcagtggttggatctctataagttgtagccatgacagtgacagtggttgacaaattccagcagagctgaaatccatggactgcatctagaatatcctctccttgggtgtggtcaggactgtggcataggatggagtgttcccaccgaccttggaaactgcccagccaggaggccagagcacatattcgggcgctgcattcccacagattgccagagagaccaacggttgtgagggatctcagggagtttaagatcttggaatcaaggctgtttaacttgttgttatccatgaggagtattttaagattgggcatcgtttcaaacactgtcaagtcgatggctttgatttcatttccagtcaggtctagcttttctaaagtgccccaggtccactccatcccacatgtcaagttgctgattttgttccattgtaagaagagcgtgtgcagactgcttagccgtaggaaatgagcaaaattaatcttcgtcagctggttgtgctctaggtgaagctctctcagtttaattaatcctgcaaatccattgcgagccaaacttcgcaaacgatttgtgctcaaatccagaaactccagactacgacagtcccagaacaggcgtactgggatagtccgcagggagttggaacgtaaatgcaaggtctgcagcttccgaaggccatagaagagctctgggtgcagagatgacagctgattaaaagacaggtccaaattttgcaggttaatcagttgggtaaaagttgtgtttggcaagtaaaatattttgttggaacttaagattaattccttaagtttatatagtccttgaaaagcatcttcttttactgttgaaatttgattgtgatctaagtggagccaagtaagttgactgaagctggcaaattgatctctttcgagctctgtgatgtgattgtgcctcagggacaggcccagagagcccttgtctgtggcgtttggcactgagtggaagccctgagagtcgcagtagaagagcagcttctcgcagcggcatttgggtggacacgccatacccagggcaggcagcatttttaaaaccatactcattgcatatattgctgccagcataggggcccctaatggccacttgaaatgtaagcctgcagaatataatttaaggaaaacaagaagataggatatttttcagcagaacatatgggctatttaaaaaaaacaaccaccaccaacattatagcaaaagatttcactgcatataacttatttttcatttactgcagaaaaattaaccttattggtatgactggaccaaaacttaagccatttaaaaagaagataaaacatgtctctgtcatcatcgatatatgcttttacctaaacctcaaaatccaaaatatgatggtgatttccctcataaaatgtgaattcggtagcttattttaaaagcgtgattccttgttgaatgtacaagacatataaatgcacagacttacccattcttctgagcacattggaggctgcattcagtcgcggttgttagactcaacgcagtgagtctgtaaaaggctctaacatgtaggagcctttgaccagtttcctgttttctgtgtcccaggctttccaagtaaaattgaatccaccaggacgagttgttttttccttaggatatccctctggaaagcattggtttcattttctgtgattgctctgatccctaaatcagttttgaatataagttattaaatttctccacctctaactgctcagctggttaatcaaagcttcagtctcctttccgcagccgttagttctcttggtcttaacttgttgatggcagatgggtggcttgttgcagagaagagctcctggagcagcatgagtgcatttactgaaaagcttttccgagaaacggcacaagaatggatttgcttatgtgctgcgaccacacagaactgtatataggctgacgtcaccggatgacgtgtcttttgtttgggttttccagaagctttactgttataaagcaccatgctttgtaacagcatcggggtcgttgcaggaccccctgattacaataaagcgagaaagaagaactcctgacttaaaaacatgatattccttcagtgtaggaagcagcagtgaggttgtaataaaggctgcattcaagaagacccatctgaacagtgagttgggttagcagagtgatgatttttaatgcttgtgagagccagtgttagactgccgattctgcatagagagatcatctaaatgggcagaagcctgcacaatttatgaagtgctgatttaacaccagcctatgcaaggtagtgtcgctgcactggtagtttggaaagctattcagttgccttgttgtcatgcttggttaaaatcaaagtatgactatgatttgctttagatgtgttgataaactagctaagtgggcttggcttgtttgtcatcaagagcttaacattataaacgaagaataaagggggaggggaagcttgcaaaacaaagcatgtggttatttttttctttgagaatttcaggggaactctaaaaagatttctctttctcctattttataacaatgttttgtcgccatactgattgaaaaaataatgctgagttgatctttaaatgtcctcctgggaggacaaggcaggttgatacagtcattttaatgcacatgccctaacagcaaagcagagatgatttaggacaagtgataccgtgtagctggattctgacatggccccttgtattttacctcagaatctcacctactccataactaaaagcctccgctggtactgaggttggtggttgtgacactgaaataatagagcatttgcaccctagttcccagccaccaagtggctgacttaactgagcctactgctgttgttagaacctgtcttgtgaatacaaaaggtcactcatgctttggactgggatttttgttttgacttgattttgcttgccctaactccagtttctccctgttgaatggtgtcttcacttttcagacctcagttgtggatgtatagctccatgtttagtgttatataaatgcaaaagatgtttctagatgttatattttcaggcctgacaaaggtaagccctt

SEQ ID NO: 10800 - DNA, 6000 bp, Homo sapiens
acactgactgaatgaagccctgggcttggcctgccagagcccatccaaatccacctgtttccccacacactgactgaatgaagccctgggcttggcctgccagagcccatccaaatccacctgtttccccacacactgactgcatgaagccctgggcttggcctgccagagcccatccaaatccacctgtttccccacacactgactgaatgaagccctgggcttggcctgccagagcccatccaaatccacctgtttccccacacactgaatgaatgaagccctgggcttggcctgctagagcccatccaaatccacctgtttccccacacactgactgaatgaagccctgggcttggcctgctagagcccatccaaatccacctgtttccccacacactgactgaatgaagccctgggcttggcctgctagagcccatccaaatccacctgtttccccacacactgactgaatgaagccgtgggcttggcctgctagagcccatcagcaatgcccacggagaagcatcaagcagacaaggagccactcagcaggacagaccaagcaggcatgtgagaagagcacatgggcactctccgttagccaggaactctaaggtacccacccaaaggaacagtatggtcccacactggaaatctctactttcctcttttgtgatatactttccatttcataagagagaaaacatcctaaaatcctacaaaacaaatggacaaacagaaccccccctgtgaactgacatggcatggagtatacaatcctctgacctcagcctccccttcaactcccatcacaccccatacctgcaggtagaacccagtgatttgctgcaattatgttttctgtctcttcctccagattttcactgctggggccatcttcattcagctggaaaatgtgaagtgcaacagtgcatgcactcaaatcgatgggctaaaatgagggaaaagccaatatcgacacacatttccaactctcacttaactgcaaccatacaaattagatgttaaggtctacaaataaaaactgaatgtacagtataatcaaagctagttctcagattagatgagaaggctattattttatttcagattgaggattggctcttttgaaagctaatacccatcccttgctctttgggccctacatttacttacagaatgaaaaagtgccctaaatccagcctccgggacgttattatataaatacactcacacagatgggaccaaaaactgagttttatcatataaggttttttgtttttttttaattaacttattttttgcaacgggatcttgctttgtcgcccaggctagagtgcagcagcacgatcacagctcacagcaacattaaattcctggactcaagtgatcctcccacctccagccttctgagtagctgacactacaagtgtgcgccaccgcactggctaattttttaaaactctttttagagacggggtcttgctatgatccccgggccattctccaattcctggcctcaagtgatccttccatccttctcccacagtgctgggactacaggcatgagccaccttgcccagtcggtttcctaactgtgtctttttacatttgttattaactcagagaaatgtttacattggtagatagaaatctatttcattcttcttaatggctatattgtacatagtgtagatatatggaattcctacatttattaactgacctctggtggacagttaaaatatttcaaattgttggctattattaacagcatctaacaaacatctgttcagaaagatctacaaaattgcatgattatcagctacgataaattcctacaagtgaatctgcagtcagagaacattagaactttccctgggcagcccgtgccctccagttagggtgtccatccctccacaacagtgtgggaagctcttccttccctcagactggccaaaaccacggcattatcagatctcagtgtgcacaaagctctgagcatgcacaaacatgagtcctaacgtatgaatggggaggtccacctcacgagcagaacttagtaccaagcctgtccttcacagctggttcttacaggacaggaattgtactgctgtaagtgataagtcttccttaggaatgtttcaggttgtttttatactggtgccagaatcgccccaatgcctccacgccctcacacaaagctcctctaacccatacgcatcaactcagatggtgggtgaggtggccatgcatgggatgagataaaggaattctataaggcaagcccatcttctcatctctgtggccccacacctcctatggtcctagcacacactgagcactttataaacatttgctgattgaaagaatgagacatggcacacaggccttaccagcgcagcccactattgtacagcactgcattctcattcctggtttccaatctgttactgctatactgagagcaccccgacatcagggctacttcctactcccagcacctggctcctgacagctagtgaaaagaacttgtctagccacccaaaccaacagagaagtgaacctgtttctgacaacaggctatgaaaacggcaagacattcatgatacaaccttttgtattcagctaactgttccttggcccagcaaattagtaacttacctgtgagtctttaacctttaattctgtgtcaataatagacacagactgcacatttctggtcaaaaaaggttcatcaaactcagtccatgtgtaatcaccaaacacaatattatgtctgttgagtagctttctaacactcaggtttatgtcttctttctttgcagtgctaaaaaaagaagccaaaacacacataaatgatcttagttcaaaaacaaaatgttaaaatgaagtgttttgaaaaactcagacaatacataagaaagcccagtagttaacagggtaagttggagttggcctgcctgggaccaaatctagagccaccccttgcctgtgggtcctctaccagctgtgccctgaagaagctgtgcctcagctcccagttagaaaaaggggacaacagtaagagttctcgctatgctgggctactgtgaagtcattaatacactcaaagtgtttaggacgatacctggcacatagtaagcacgcaataatgttggctttcactattactaatgaagttccacagctgtggggtcaggcctggggtctgcattgtaacaagtctccaatagccgtgattcgtgctgagaaaatctaatgctttcagcttggtatccagggcttcccttggtcccccttgctgcagtcctcctaacacctcccctttctacaacagtgacctggtcccggatcacacctctgtgccctgctatgcactgtcccagcttactggcctgatcaactgcagtcaccctctaagtcctattcaatgtctgcctccctctgagccctcctggacaggctcctcagagccaggcaggtgacatgtggcccctttgcaatcgtcccagcaccctacaagcagcgaccaccatgcatagtgcggttgtgtgcaggtgtctatgaactctggtgcagttgtacgtaggtgtctgtcctctaggtgcagctgtgctctggtgtgattatgcctagcgtctctgggcccaggtgtggttgtacatggggtgtctctaggctgcggtggcactgtgtacaggtgtctctgagcgctaaggtgtttacacaggtgtcgccaggctgtgatggggctttgtgcaggtgtctctgggccctggtgcaattatgctgacgtgtctgaactccagcacctagaaaatacccagtcaacagctattctgttaaaggaaaggtctcttcctctgcatcccctctgaggctggtggtctcacctgacctcaatccaccctccgtggacataaggagggtctgtgaaggtctggccccgccgctgagttccccccactccagggagcagcacagcccacaggccccaccataccatgaactgacttggtcacaaatgagtgggatgtgctttgaaccctaaaaatttaacatcgagtccgtgaggaacgggaacaattaaagggtctgagaagcagtggctcaaagaataaccacccagctttcggctgagactagagctctctgtaatgcgcagccatcctattctccaacgtgggactcagggccacatcaatgcactggaggacagccggggcaggggcagggtcagggccaggtccgtgagctgaggtcgggtcggggctcaatctgtgagctggggtcctgcgcgcagggctcgggtcggccgggtcagtgccctgcggtggggtcgcgtcattgcgctaggatccggtcggggcccggcggcctgtgcgcccgggtccagtcgggccggatcagtaccctggggttcggtcgcatcagaatcagtgcgctggggtcggggctcggtgcacgcgctggggtcggggcgggtgggtgcccagaggatgtgtcggacaggtccggctcacctgctgccgcgctgatgcacctccacgtggaccgttggcgactcggccacacagggaagcgcctgcttcaggtcgcccacggcctcgtccatggcgcccccgagagcagtggggacccaaccagggcgcggccgccgccacctcacgcccagcgtcgccgccacagccgctgcctcagcccgcgggccccgccctagcttcgaatctgccgcgcgaggcgcaccacctcctgacccggaagcgctcgggcccggcagggccacttcctgccgcggccccgcctcgccccgtttccggcgcggcccagcgagctcggcaacctcggcgcagcgagcgcgggcggccagccagggccagggggcggtggcggccaaggtccgaccgggtgccagctgttcccagcccccgcctcgggcccgccgccggcgccgccatgggcaagaagcacaagaagcacaaggccgagtggcgctcgtcctacgagggtgaggcggcggcgctttgtgacgcgcggcgggcggggtcccgggcacgggggaggagttccgggcacgcggacgggggtcctgggcaccgggcgaggtcctggccacgagggaggggttctgggcacgcgggagggggtcctgggatttcgggcagggaaccgggcacacgtgaggggtcctgggtaggcgcttacgttcctggtagagggttctgggttcgaggctgcaagcccactcaccccggtcctggagactagggaagcatctgtgctggcttttgtgtggagctcagggagaagctgggctgccctttctcccgcctttccctccctctcccttgctcccgcagcagctccatgggtgtcagcgggcagcacgggcgcctgcaggaagtcaggcgagggtgaaccgaagtgctgggggtttctaggagggagatcgggctccggggttccaggtccctcttaatccatcttcttgaacgagtaatgtgaacaacatcccacagggcctctggtgaggacaccgtggctcgaaagggacctgaagctccctgcggaggggaagggagaacaaggaggcagtgacatgccgccactgtggtcttcccttccgtctttccctgctggttggcagccccgctgtactccttagggaggcctttccctcttagcaccttcacgtctcacctggctgcgtggcgtttgcacctgagcacgcgggtagaactcggtctgtgtctgtgcagattatgccgacaagcccctggagaagcctctaaagctagtcctgaaggtcggaggaagtgaagtgactgaactctcaggatccggccacgactccagttactatgatgacaggtcagaccatgagcgagagaggcacaaagaaaagaaaaagaagaagaagaagaagtccgagaaggagaagcatctggacgatgaggaaagaaggaagcgaaaggtaaaggagcagcggcggtg

SEQ ID NO: 10801 - DNA, 6000 bp, Homo sapiens
aatgccgtgtgttagtatgtgttaacaccctcatactcaggagtgttgataattctatcttgatcacagacataagtttaattatcccatctgccacaacgtcttaatagtcactaaaaaaagacatgagtgaacatggatggatctttttaagggatatttttaaaagaaaaaagaagttatctatactttcaacactttgtatttttatgttaagatttaaaaaaaaaaaaaaaaacgagaaagaagaatcttagagttcctcctaaggcttgcatttggttaacagtttaattaaatacagtttattaaaaaaattgaggcaactcatataggttaatttgaaatttttcctgcttgcacttaatatgtgtgtggtgtgtacacacacatgcatacatacacacagtattttatatctgaagaaacaactaagataattcacacaaaagaaagacatttccactttataaaagtaattcacaggccaggcatggtggctcagatctgtcatcccagcactttgggaagccaaagctggaggagtgtttgaggccaggaggttaagaccagcctgagcaacatagtgagaccttttctctataaaaaaagaaaaattttttaaaagtaattcaccagaggatacactatggaatcacaaccgaagggatttttttgtttgatagctatgtaaaaatatatttagtttataaaatataagtctcattagttatttacagtaatgcacaaatactgtcaggtaagtattaaaagactaaaggttactgttgtcaagtcgctgaagctaagtatcaacttaaaaagacaaaccaagcaaaacatttgaatttgtgcagtcatagaccaaggatatagaaggcaaaaacgaaaagggatgcattttgagtccagacttgaattttttttttttttttttttttttttttttttttttttgagatggagtctcactctgtcacccaggctggaatgcagtggcacgatctcagctcactgcattctccacctccccaggttcaagcaattctcctatctcagcctcgagcgagtagctgcacttataggcgtgcgctaccatgcctggctaatttttgtatttttagtagagatggggtttcaccatgttggccacactggtcttgaactcttgacctcaggtgatccgcctgccttggcctcccaaagtgctgagattacaggcatgagccatggcacccagcccacacttgaattcgtaatgtctgactctagcagaatgaaccaaaacttctgtttagcaaaacaggtgcgcaacttcctatttctcacatataacagcttggagccacaatcgaatctaacaatctattacagcatgaaatggaaatgtgcactgttaaagggcagagatgaatatgtaagttgttatatttgagggagataaatgaggaatgaaaatgaagtgcagtaggataaacttgttggcaaatggttaaacattttttaaactgctcagtgttaaacgattactgttggactcaaacctcagcatcctgccagtatatggaattgttagctcagtcacacctctagatattgtttaataaattaaactcaatatttttattcatattggacatatacttcttagagaccccttaaaacagaaacagctgagtaacacatatgccatcattacttttatgctaaaggcagagattcttaaaacctctagttagtgaaggactacattttaagagatagaaggaaactcagcaagttaactaatcccaactctatcccaagctaggagattctaaataaatgcatttagcaaagagttagagagttttctatgttcaagactcagtgttgactgcttagaatgacaaaaatatacctaaaatctgatacgttccttcaagtattctataggatggctgccacgaggaattataggctgtgaacgagaatactgtgtcataacaaagatgaaaaaaatcctaaaaaccaggaggaggctttgagcaagatcaaaggcttcacggaatgtttaggtgatgtttgtgctgggcctagaacaaggggttgaatttgtacacgtggcaatggaaaggaaggacattccaggcagcaagaatagaatgacgccctacacaaacagacacttccaactaatgttcccttacacagtctgctcctgctatgtacaagttcctggggttcttcaaacaggcgctctcctcagggtttttgcatttgctgctccttctacccgggatgctcttcccccagatatctgcaaggctgcctttcttacctccttcaagtctttgctcaaatgccaccttctcagtgagaacttaccagactaccctattttaaactgtcatcctctcactctctaagactcttacccgctttatttttttttccacagcacgtaatactatctggcatgctataatacagcctactccttaatagtgctatgttcctcacacaagagcgaaagttatctgttcatcttcagattttaaaacagtgcctgcacatggtaggcataaattaaatttatccgttgacaaactgatggaatgaatgactgaaaaaaaataactgccctcaaaaaggttatggtctagtggaggaagcaaatgtataaataaataatcttaaattattcctgaaagacaaaaaaacactcggcaaaacccaacttatagaaacttaaaacacagaaacaacttctcatactccacctataaacggccagtgaccaccagattcttctttttatatcttctagctctgtgccctcagtggcactgtcactcatacaatggccaaaaatgccacctgagctgccactcctgccaaaactgccacttcccacattaaccgtcactgctacctagtaagtgatggtaaacaatacttctgttcccacttttggacaagggaaagacagatttctgagtttctaaattaaatgcatttttcaatagatagttaaattatacactatacgagtagtatacaccgattacatggattagccaggaaacccactatttttaatattgcttaagtttagatatggaaaaataattttttgaattgttttactattgcaacataccttttttacactgcaaatggatgacactggcaaaatggttatgacaaagactccttcaataaaggctggtactatattttaacaaacaggtaaagttaatggcattttttcccattcgggaggatcaactagaatttaatctggattaaagaatgatgtagaatttttaaacagaccattagtattgaagttatactaaattaaaaccacacacgagtagcagaaaatattctttatagctagcaaaagcaaaacaactgaaaaaaatgaagaataagctcaagatttctcacttcaactaacacctccagactgcattatcattttaggcaaactgacattttcacatttactttgtaatggcaagattgatttccatctgggacttatctgcataaaagtgttagccttggcacaatttcaaaattgaattgaaagctcatttcttgctataagcaaagtgccacaataccacacaacagttatacctcacattaatcctaccactgggagtccaattttatgtgtttcagctagcgaattctgccctcaggtaagcacataactctataaaacccttcctcgatcatcaacaaatcacttatctctactaccttaatgcctcctgcacttgtccatactaaacagtatttacacgttaaaagagaagttctacaaatgctactattcttcataaatagaaaaaaactataaatgagggcaaattcccatacgtggaaaaatgccaaaccagaagctgaaatcataacttttaggtatagaaccacagctccaatcagtcaactacaaacgtcgccggttacttcgagggtaaataatttgcagccagctggtaaaaagcctgataaaaatattaggtcctcacatatcttccttttcaataaggagacacctgaaagtcacactgggcagtctgtcacgtatcgaaacatgcagaagagagactgtacagaacgtgcagttatcaaacgcaggaagccaaagttcctgtgctatgagaggaccacagtgaaaaacggtagcccatctgtccaaagaacagaaagaagtccacctggaaaggatgggagtcggcggaggggggcgagaagaacgagttccacgccgtcttcctcctcccgggctaactgcagccgcgggcggcaggaaggcagccgcgcggggtgggctcttggggactgggcgcagggctccgcggcgcggctgggctgcggctgcccgatcggcgagggccgggccccgggaagtctccagggcctcgcccgcgcagccaggaaagcatgcagcccaccgacgggcggaggaaccgcccgggcaaagccacgtcggtggctgaccgcgcggcagggaggtgggcaccctgtccacacccaccaggaggctgacagctggcgagcgccaggcggccgggacgggacaagggccgcagcgcgccggagggggtcgctctgagaaagccgcgctgggcgctgcccgtcgccaacgactccccctcgcccggatcagcggcggctggatactcacgtagggctggtagaacttggagagccgcggcttcccgtggttgttgaagattaggatcgccttgatcatggctgtgccgggccgaccgggtgggcactgggggccagggcgggggcgggcgcgcgagcctcgcctcgtaatctcgcctgcgatccttccccacccgccccctcccgcacgcgaccgcgcgcgctcccgagccgtcgggcggggcccaaggggcggggcctgggcggggcaggcactaaggaaagcggaaacatttctaggtccgagccagcggcctaactggagtgtgcgcattcgaccgagcacagacacgttgcccaccgctcctctcccgaggtctgtagtcgcggagaaacacatgttgcgttactaacgttcagaggtctgcgacagcttcgatttgaatgactagccgggaacaccaagtttcactgtgtaattgcgtccccctactccggcgcctcctttgcgacgctccctggagaaaagcacgcccactgcacgcgctcagtcgctacttccgctctcgagtgtctccaagcaagatggcggaggagccgcagtctgtgttgcagcttcctacttcaattgctgctggaggggaaggacttacggatgtctccccagaaacaaccaccccggagcccccgtcttccgctgcagtttccccgggaacagaggaacctgctggcgacaccaagaaaaaaagtaactgaatttatttccgggcagagaggcgggaggttcagattgcatccgagtaggggtggcggccagtaaagaagcaaaatttagaggagcgcctgtcctagacctgcattttgaccagtcatcagaagaaaagaagtgtactttttgatttttaaggcctttaagttgagtgttaaaataccatctctgtctatcggtgtagggcctgatacttggctgccacacttatttttatactgtatttttttgagttggccagactgcgagctctttgaaggagggagggagctgagtggggcggggggaggggggtctcggtaattccaggtacttaacacaggagctaattatttgagtaatgttttatggtggtaggggtggtcattggcaaagcctggattagaattcatgccttccaacttaactcgcttttgcttttttccccctcccagttggttgtgaattcactccttaaaccaaaaaccaaattcttatgcagaatgaagactgctaagggaaagctaaaggcatagatgttacctttttaagaaacacattttggaacctttgtgagttatttcattgcttgagtc

SEQ ID NO: 10802 - DNA, 6000 bp, Homo sapiens; identical to SEQ ID NO: 3027

SEQ ID NO: 10803 - DNA, 6000 bp, Homo sapiens
gaaatgtaaaaagagccaaaggaaaaaatcactcatagtctcataaatagaaacacaacttaataattatgtttcaatttataagaattgatcaattctggctgggtgcagtggctcacacctgtaatcccagcactttgggaggcggaggccggcagatcacaaggtcaggagtttgagaccagcctggccaacatggtgaaaccccatctctactaaaaatacaaaaattagctgggcatggtgtcgtgtacctgtaatcccagctacttgggaggctgaggcagaattgcttgaaccaggacctgggaggcggaggttgcagtgagccaagatcatgccaccgtactccagcctgggctacagagagagactccatctcaaaaaaaaaaaaaaaaaaaaaaaaaagaattgataaattcccataaatacttcattaatacttaatacatttctttccaatatttgtctctctgtgtatatatatacaaaattcttaaaaatcatagctatgatgttggagcttcttggaattgttttagattagatctaggacacctcatgttttgggatatgcaggagaatattatcaattgtgtttaccttgggatgctttctgtcctgtttccccaagagattactgctgtcactcagaacctggaggcccagctgggtccttccctggatgctgagtgtcagggcacagtgtggggagtgtggcctgagatccttgaccacaaacacgccatcttgattcttcctacccagactctagtctgaggagttcactggaaaatgattggaaagttaggttttatgacaatgcaactttataatccaattaattgatgctggttacaagcagaatatctttctctttaaaaattaatttacataaatgactaccatttctgccttcatgaacttcatcttcaagctctggtacttagcacagacaatgctaagaaaccacatagaaatccagggacatctggctctgaaaagagaagagttgggagtgtttcatcctatgttcttgaaaggggggtggaataggtttatgattctgatcataaattggctgctttccactttgataaatatctacagtagaagccctaaggctgtaagttagagataagacaaaaaccaaaaactccctaaaatgaaatagtcttacattggtaacccattccaatattaacaatgaaagaaaaatctcattttccctggatgttttacattgttcttcttgaatggaggagaggaactgagttagcatctggaagaaaacaatccaaactggactaggcaaaacaggaggccgttggctcaggcagctggtaagtacagggtgtagtctccggcatggctagattcaggacctcatctctgcctttctcttatgggcttacttcattttcagggagtctttattcctgtagccccaggaattctcatctggtctcattggtccatccctgcggggcggggatcgggggcggtgggaggccaggatgtgggggcggagaggcgggggcaggagaggtatacagggctctaattggtcagactgggccatgtggccactcccaggaaggctttggagtcagggatggagtcagctccatgaaagcttgctgaccaaaaggagagggaaacagggtcattcgcccagagaaaaactgaggttaggattgtcctgtccccacaaacctccttctccacccaccaagatttgactgtcttcgccagggacttgctctagctgggtcaagctcaagtggggttattgaagtggaacagggaaacccacgcatggcaagaacaggggggcactcaaggaacaggggcccagagccaccctctgcagcggctgctccattctctgttctgtgaaaagccctcgttaacttcgcaacaccgacagggatgccagacccaggtctccccaagggccttgaaagctcccgcattttcccctctgccatactcatccctgggtttctcagttcaggtttgcaagagaggatctgattgacctggcttgggtcaggggcccaaccctgacccaatcagctgtggcagatggaatggaggtggggctcagggggtttcccctctccctcagggttgtggtgggtcaatggattctagtgattatggcacctgcagatctcagctgattttgttttttaaaaaattactaatactatttcttgagacgggaacttgctctgtggtccaggctggagtgcagtagtgggatgctagctcactgcaccctcgaactcctggcctcaagccatcctacctccttggcctcccaaacagttgggattacccacatgtgcctctgagcctggcccagttactgatgagtgcctactcttttttctttttttttttttttggcagagtttcgctcttgttgcccagactggagtgtgatggtgagatcttagctcaccgcaacctccgcctcctgggttcaagcaattctcctgccttagcttcacgagtagctgggattataggcatgtgccaccatgcccggctaatttttgtatttttagtagagacggggtttctccatgttggtaaggctggtctcgaactcccgacctcaggtgatccagccgcctcagcctcccaaagtgctgggattacaggagtgagccactgcacggggccgagtgcctactctttatgtgtcccattttaaacttacaccaacactctgaagctgaggctcttagaggccagccttcttgcctgggtcacgcagccactaagtgagtggttaatctgaaactagcacctaggggagctggcgaaggggcccagggtagcagaggccatgaagaactctttccaagttgttgtttttttttgttttttttttttgggggggggggacaatgtcactctgtcagtcaggctggagtacagcggctcaatctcagctgactccagcctcctccttccaagttcaagcgattctcgtgcctcagcctcctgagtagctgggactacaggcgcgcgccaccacgcccgtctagtttttgtatttttagtagagacagggttttgccatgttgcccaggctggtctcgaagtcctggcctcaagtgatctgcctgtctcggcctcccaaagtactaggattacaggcttgagccactgcacccggcccagattggttctttaaagcggagttgagaggtggcgctggaggggaggaagcccttcgacatttgctcccagcctcaaaactgggttgcaccggcatctgttcctagccctgtggggttcctggagccccgccttgtcccgcccggcctccctgagttcttgtcctccccctgcccaccagtctcagtgtgcggggtggggaccaccaggctgggaagcccagagttcccaggcaactcgtgcgcctgggagggtcatagaatccgtcctacactcctcaggatcttgaagggggctcttccttacattcccagtcacccctcccccagcccctacacagggcctaggtaacctgtctgcaccccactcccactctgtatcagctgccctcttcctcagcaccctatcccactggagcaccttttccaactccagtcgccacttttaatctgccgccttttcccagcagccagtcctgattgcctcctccgtagccccagttgcccactgctttagatagtgtcgcagctggctgtgaggagtgtcctgattctgtaacccggcacctcctccacagggccctagacgcctcaagccttccaggacgtttgttgatcaaaggcgaaggatgtgtagaatcttcgtccatctacgaattaattctcgaaacctgcttcgagtgggcctcgcgcgtaacacaggggacactcagtggtgaacgagaccactcgcttaggcctagcagcgaggtgaccgttcactcaacacacactaactgggtcccgcaggacacgccccggctggtcgcgggggttacccggggtgccctcagtcggccggccggccataaccggcgtgatctcctcgcgccgagagacccagcagggacctcgcaaaacccaatccacgttttgttttattttgtctttttgcctctcaaatgcatggaaattggctgctagtagctttgctacaggagaaaatcgctaatctgtagtgcaaaatcggcgcacaggggttttctctgagattgtctagacgccgcgcgggcgggtcggaggcgccagacacattgtatccggagcgcggagctcgggagcaacagtcgccgcctctactctgtatctgcgccgccccaggcgcccagtgtccgcgctgggcctgggactgccctcgggggatggggcccacgcgggctttgatggggggccgggggccactttgtccacccaggcgaggcttgggtccagcgccggccacatcaactcccgggggatctagcagcgcggaggccaagcaggaggcccaggagccccgcgcgtcttccattagcgcagggacctccgggccacagctcagagaatcggaaggcctcctcccccttcccgagcgctgccactggggccgaggtttccagcaagaacccgcgtgtccctgcgcacgcacacacggtgcacacgtcagtccggcgcctccccgtgccccgactcacgcaggtcctcccgcgcgcccgcaacacgcccgcaggctcctgtgtctgctgccggggcagcggggcccggaagggtaagaacgcggctcgctagcgggatggggaccctggcccggcctggacgctgtcccgggcggggcctgggggcggagcgcgccgggccgggcgcgcaggaggggaggcgggtccgcgccgccgccgtccgcgccgccccgcccttggcccagccgctcgctcggctccgctccctggctcggctccctgcctccgcgtcgcagcccccgccgtagccgcctccgagcccgccgccacatcctctgaggtaggcgcagcggaaaaggaccccggcttccttgcgccctggacggcgggggccaggcccctggggagctgagagggaggcgctgagggaggagcgggcgaggggccccggcagcccggccgcggggagggatcgcgagcggccggcgcgggcctggctggtgagcgggcgggcagagaaggccgcacaggcgggtgccgaacaggtctgggctggggagcgcgaggccgagggtccagagacgcctgcggctggcggcgagaggcggcccgggcttgcgggcggaagtgcaagggcggccgcgtggaggcccggcgggccgcgcgtctaggtgaccttccccggcggcgccctctggccctggatcccaccagcgtgcatccggcggggacccgttcgccgcccacgctcgccggaccaggccagcgggcgggtgccggccacgctgccgcctcggggatgagctcacgtgacgaccgtggccccgagtccccaggcccacgcgccctggccggcccacgcccgcagaagctggcgcccggcaccgcccgcctgtgccagagccttctagagcggaacgcgccggccgagagtcgacttaggcggtagaggccggagctcgggcctgggctgaaggtttggcctcggaaaaggaggccccacggggaaggatgtggccttcttggtcttaggagtgattactggttcggtcgttcattcattcgccaaatgcggcggtgcattctggaaactgtttcggagcctgactttggattagaggcccgcagtcttagtggtttgtacaaggtcacacagctgggaagtccccataccttcgttttctcatctataggacgggagcaattgtacctctccttcgatgagttttggggaataataaaatgaattaattagcatgaaacctttagaacagtgccggtgtggagaagggctaagtagaaaccctgacacccttggggctttttgggtg

SEQ ID NO: 10804 - DNA, 6000 bp, Homo sapiens
ataggaggggtatcagaccagccagtgatcacagaaacagcacctcttcctagccctgaggaccaggaaaagcaacttccccagcagaaggcaaccctagctctaaaagccaacatgggggcgaacacaatcagcagctcgctcacacacatgcacgcatgcacacacacacactccagcactttctctttcttgccaggaagaaacaacccaggggaacagttcctggttcaagctccaggatgctggcaaaggctgatggccctgtgttctggtagcaggtctgcgtacccaatgcagctgttctctccctccattcttccacaacagtctcgcagtgggcagtagagctttccaggggtagcttctattttgaaacaccctggcagctgggccaccaccagcacagctgagttccatgctgagctcctgggctcaagaggttgctgactcagggcagcctgcccacccacctatcaaggggagatggcctgcgctggcagccagtacactatggtctggatcccaggcatacctggggctcctacctgacctaaggcacctcaagttccctggagcctcactgcttggcttgaccaggtagggttgagacagacagtgcttgggcaggaagcctcgggaatcaaatagacctgagttctaacccaccccaccactttctaggtatgtgactttgggcaagtcgcaacctctctactcctttttcttcagctctaatatggagaaagagagcctggatggcgtcactgtgaggactgaattagctcgttaatatacaacacttggtacagtggctggcgcttggtaagcagggaatacacacagtattttatcacaagttttcattttgtatatttattataataatggctgctaagcatgttcaaaaggtcaccctgaaccacagggtccagagtccttcatgtccacaatgaggcattgtttagctgaacaggtcctgaaagaatgcctcccaccagatcccagggaaaacggacccttataatagacactcagcaccactgtccttgcaagaaatagaggtgactccattgtccactgccagttggcccgcacacagccatgcacaagttcactctgactggtgtggaaaaataatgtctcccatctgaacaccaattttgactttccaaaaggcattcacatctgttagcaccttgcaagggtcccttggagtgcaactgcaatgtgagagcaccaccattcagaccaggccttgaatcccaactccactcctgccaggctgtgttacctcacctctctgtgctcgagtctgctgacctgtgaaatggaaacacactatctctctcccagggtatagggtggtgaactcaacatcacagaacattcgttgagcccccagaaaggtgctgagcaagccctcaatcagcaatcactgtaatgacgacaatcatacttttatagcagacaaactcggccgggctcagtggctcacacctgcaatccccgcactttaggaggccgaggcgggtggatcaggaggtcaggagttcaagaccaacctggccaagatggtgaaaccccatctctactaaaaaatacaaaaaaattagccaggcatggtggcaggcgcctgtaatcccggctactcgagagggtgaggcagagacttgcttgaacccgagaggtagagattgcagggagccgagattgcaccactgcactccagcctgggcaacagagtgagactccatctaaaaaaaaaaaaaaaaaaaagagagagagaaactgaggcacaagacagtgacttgacctgtatgagaccgaccctatggctcaccagacctgtgttatgggcctaagctactctccagtgctctttccagcacagttctgagtaaagaacttaaagtcccactcatcccaaaccccctgagtacgtggtaaaatggagaaatgcgcccagacccagctgaggagcccactggtcaacttttctcagtggctaccacaggactccatggaaaacccaaagccgcagactacagaatctctgagcaccaggaggggctgcctccaagcttcggctggtcctcaaccacacatgcgcctcttccagtcactaccaccgaagacactacaccacgggaaattccatcaaaggcgaagtggacttcagtgcttcaggagcatcttcctggtaagggtagaggttggatgcccttcacctccccagcatggagttcactgtccacacctgcctagtgttcagcaaggccaggggcccacaggcacctcatccctgtatggtcccccactttctgagctacgaataacccctgcctatagccccactctagaatagcaaaaataaaactaaataatcaacaaggagtagtccccactacccacaggcaggcaccctactcaggacaaccccagcacaagctgtccatccacccaccatgagggaaggggtaacaggcccaacaccttctgtagaatcccagtcacccatgtcaccctccctgcaagcccagaaacaccagttcaacaagtttccctcgggacttggaaaaccagagaatgaagacgatgtgtttaaagcacttatttcaagagactatacatactgttacagttctttaaatatttgtgactctctgctaggtgaggctgttttccacaagtgagatgtctgtgtccctcaaaaggatgtccaggaccgggcatggtggctcacgcgtgtaatcccagcactttgggaggcggaggcgggtggattgcttgaggccaggagtttgagatcagcctggcaaacatggtgaaaccccgactctactaaaaatacaaaaattagccaggcgtggtggtgtgtgcctgggatcccagatactctgtgaggctgaggtgggaggattgcctgaacccaggaaacagaagctgccatgagccgttatggtgccaccgcgctccagacctggcaacagagcaagaccctgtctcaaaaaaaaaaaaagtccaggatcaaaggactatggtctgggcctgcagcccttcatatgcccattcaataattccacaaatactcaataagcacctactatgggccatgtactggaatagtaaaactctgtcagtaaagatgggtggattctgacacaagagtgcatttacccccacagacccttctcaagcacctactgtgtgccaggcagcaccaccccaggcactgaagacaaagtagcacagggcctcagtgcctcagtctgacccttaggagctgagttggtccagagctggggtgggcagaatgaaggctggccctcggtagtctgctctggccttctcctgcctcagtggagaagtttaggcaacagaggagccctttcccctatctccccaggagaggggaggctagtcaaggggacagggaccccgggcggaacgggctctaaaccagggtctgctcctgcattcaagatctccacatgcaaacttactgctccagcttgacaatgtccatttgtaaacttacaagatttttcataaattaagctgaaagttactcaatacctggtatacaaatgcttgtcaataatagtgaaagaatgtttaaaaacaggagctacatttattgaaccccttccacaacgccacgtgtagcaaaatggtctgcgggggatgggctggattcacccaaaaagccccaagggtgtcagggtttctacttagcccttctccacaccggcactgttctaaaggtttcatgctaattaattcattttattattccccaaaactcatcgaaggagaggtacaattgctcccgtcctatagatgagaaaacgaaggtatggggacttcccagctgtgtgaccttgtacaaaccactaagactgcgggcctctaatccaaagtcaggctccgaaacagtttccagaatgcaccgccgcatttggcgaatgaatgaacgaccgaaccagtaatcactcctaagaccaagaaggccacatccttccccgtggggcctccttttccgaggccaaaccttcagcccaggcccgagctccggcctctaccgcctaagtcgactctcggccggcgcgttccgctctagaaggctctggcacaggcgggcggtgccgggcgccagcttctgcgggcgtgggccggccagggcgcgtgggcctggggactcggggccacggtcgtcacgtgagctcatccccgaggcggcagcgtggccggcacccgcccgctggcctggtccggcgagcgtgggcggcgaacgggtccccgccggatgcacgctggtgggatccagggccagagggcgccgccggggaaggtcacctagacgcgcggcccgccgggcctccacgcggccgcccttgcacttccgcccgcaagcccgggccgcctctcgccgccagccgcaggcgtctctggaccctcggcctcgcgctccccagcccagacctgttcggcacccgcctgtgcggccttctctgcccgcccgctcaccagccaggcccgcgccggccgctcgcgatccctccccgcggccgggctgccggggcccctcgcccgctcctccctcagcgcctccctctcagctccccaggggcctggcccccgccgtccagggcgcaaggaagccggggtccttttccgctgcgcctacctcagaggatgtggcggcgggctcggaggcggctacggcgggggctgcgacgcggaggcagggagccgagccagggagcggagccgagcgagcggctgggccaagggcggggcggcgcggacggcggcggcgcggacccgcctcccctcctgcgcgcccggcccggcgcgctccgcccccaggccccgcccgggacagcgtccaggccgggccagggtccccatcccgctagcgagccgcgttcttacccttccgggccccgctgccccggcagcagacacaggagcctgcgggcgtgttgcgggcgcgcgggaggacctgcgtgagtcggggcacggggaggcgccggactgacgtgtgcaccgtgtgtgcgtgcgcagggacacgcgggttcttgctggaaacctcggccccagtggcagcgctcgggaagggggaggaggccttccgattctctgagctgtggcccggaggtccctgcgctaatggaagacgcgcggggctcctgggcctcctgcttggcctccgcgctgctagatcccccgggagttgatgtggccggcgctggacccaagcctcgcctgggtggacaaagtggcccccggccccccatcaaagcccgcgtgggccccatcccccgagggcagtcccaggcccagcgcggacactgggcgcctggggcggcgcagatacagagtagaggcggcgactgttgctcccgagctccgcgctccggatacaatgtgtctggcgcctccgacccgcccgcgcggcgtctagacaatctcagagaaaacccctgtgcgccgattttgcactacagattagcgattttctcctgtagcaaagctactagcagccaatttccatgcatttgagaggcaaaaagacaaaataaaacaaaacgtggattgggttttgcgaggtccctgctgggtctctcggcgcgaggagatcacgccggttatggccggccggccgactgagggcaccccgggtaacccccgcgaccagccggggcgtgtcctgcgggacccagttagtgtgtgttgagtgaacggtcacctcgctgctaggcctaagcgagtggtctcgttcaccactgagtgtcccctgtgttacgcgcgaggcccactcgaagcaggtttcgagaattaattcgtagatggacgaagattctacacatccttcgcctttgatcaacaaacgtcctggaaggcttgaggcgtctagggccctgtggaggaggtgccgggttacagaatcaggacactcctcacagccagctgcgacactatctaaagcagtgg

SEQ ID NO: 10805 - DNA, 6000 bp, Homo sapiens
gcacatgaaaggctttgaaagtcttgctgtaaagatcctctttagctgggttttccataggtatttgaccacagtctttctggagaatcctcacacagaacattcaggcaatgctgaactaggtgcttctgttagatggttagtcagtgtcctacttctgccaagtttttggaaatggtgaaatagctaaggtcctgcattaggtcgtcctaggacctccaagggtctttaggtgtcaggaacctcaggttgggaactcccgatggggaagtaatgaacagagggtgcctaggctgggaagactttctgaggaggtgaggcccgcactgagacctgaatgacaagaagcagcaagccaggaacaggtctgggagaagcgtgttccaggaagaggtgatagcaagtgccaaggtcctgaggcaggaccaagctaggcttcctcctgcgccaaggctgccctcctctgaagtcaggggggcacaaggctggggaggacacagtgccccagagtaggctgggcaaagcagccttgctcaagggcaaggctgggggaaagcagactgctataaaagcccgtcctatctccacccgcagggcatccgaggaggctttcgtgaaggaatccaaggaggagaccccaggcacagagtgggagaaggtggcccagctatgtgacttcaaccccaagagcagcaagcagtgcaaagatgtgtcccgcctgcgctcggtgctcatgtccctgaagcagacgccactgtcccgctaggtgcctgctaggtgcatggccacagagcatgggctgggcctgggcacaggaggagcagctgctttggtcggggtggagactcgcagcagctgctacccacagcctattccactcctccccatctccaggcgctgggaggggggccctcaccccatcacgcctcgctccctcctggccctctggtccagcccctcacgcctcctctcagtctactcaattgtgactgtccctcctgatgtattttttttcttggcttaaagggtgtgttgttgactctttttacacttatttattatcattctcacttctctggaagccacaactggtgtcagggctcggtttgtgcttagaactttcccagcttcatgaccttgagagaagggagaatgttcccccatttcccagccaagtgggagccccaagctctccatgtctgttgcctccacctccaggaggaaagacagcctctcgcagaatgcttttgtaacctcgatcctttaacaagtctgtgaggtaaattctgttattctcaccatataaccaaggacaccaaggttcccagaggggaagtggcttgtagtgggagggaaaagcgagaccagaggttcctggtggtagcttcctcctaagcctgggtaagagccctgaagacccatgagactcccctccttagggttggctgggaccttctggatgtggagggtccactgccctgtgtatttcgcttcctccttcaactgggctcatcttggattttggataaacaaccagtgatcacaccttcttccccttcagcagagtttgcaaacaggacgttcatgacctgcatgatgtttaaaaagatttgagtaattgccagtaaatattagcttcctagggcttctgtaagaaggtacatgaactagctggcttagaacagaaatttattgtctcatagttcttgaggccagaaatctgaaatcaagctgtggcagagccatgctccctctgaaggagctggggaagggtctgttccacctgcttctggcttctggtagcctcaggcatcccttagctggcagacgcatcaccccaatcctgcccccatcaggtggctgtttgcacattgccttctaggtatgtctgtctttgtggccaaatcttcgttttctgttttttttctcaaacagggtctcgctttatcactgaggctggagtgcagtggtgcaatctcagctcactgcagcctcaacttccttgggtcaggcaatccttccacctcagcctctcaggtagctgggactacaggcacgtgccaccacatttggctaatctttgtatttttagtagagacggggctttgccatgtcacccaggctgggcaaactcctgggctcaagcaatttatccactttggcctcccaaagtgctgggattacagggatgaaccatagcacccagcctaaggtcaaattctaaggcactagaaggacttcaacatttttggagggggacaccatgacaccaacacttacaaacagtggtcatcactccatgtccttgtcttgtatctggatgccaagggtcaccacagtgcactgctctacatctatcatctctgcctcaaagctgagagaacatggtggaggcaagcaacttagctggccctagtacagccctccactgagatctagactgttggggggttcaagaaggggtgtgtcttcactccctttttccttctgccagcttgaagctggtgttgaaaacagtacaatcactcgggaagagcgcaggtcctcaaatccaacatttgaggagcgctgaccacagaccaggaatacttgtttgaaactacatgaaggaggaactaacaggtcacctctcttctagagtgtgctcaggtcctcagcctcctcttccagaaccctcaaacactatgtacacaaatctctggagagcttcgggactgtgttcttcccactgtaccagactgcttctctgagcctgtttcctcttctatactgtgtcaagaaccagatggtctaggctgggcgtggtggctcacgtctgtaatcccagcactttgggaggccgaggttgggggattacctgaggtcaggagttcaagaccagcctggccaacatggtgaaaccatgttgttttagtattctactaaaaatacgaaatacaaaaattagccgggcgtggtggcacacacctgtaatcccagctactcgggaggctgaggcaggaaaattgcttgagcccgggaggcggaggttgcagtgagccgagattctgccactgcactccagcctggctgacacagtgagactcgtctcaaaaaaagaactagatggtctagatcagtggagccccatagactctagggaggtgggagcagggtgaggaggttatgcggagtggagggcagaaccctctgcctctgacccgactatgggaggcctcatctgaaggaaggttgtcctactgaaagtctgaaaaactgctggctagaccagtatttttcaaatggcattactctaggcccactgaactagaatctcaaggagtgaccttgagattctttttttttttttttttttttgagatggagttttgctcttgttgcccaggctgaagtgcaatggcgcgatctcagctcaccacaacctccgcctcccgggttcaagtgattctcctgcctcagcctcgcgagtagctgggattacaggcacgcaacaccacgcccagctaattttgtatttttagtagagatggggtttctccatgttggtcaggctggtcttgaactcttgacctcaggtgatccgctcgcttcggcctcccagagtgctgggattacaggtgtgagccactgcgcctggccaaatctctgctttcaaagtgccctgggtggctgttactaggaaagttcgggaatcactagactacacgatttctaagcaccactccaaagtccgtttcctccaaaatcaaagaccaaaaaccatggggatgatactgaattaaatacaagtggatttttagagtttattaagcaggggagtggaggggagatgtggcacaaatagaagtatgtaacattcaaacaacagcatctaggatttttgaaaaaactttcggttacagttacacaaagggtcacttcctccccagcgacacatgggcctctcaaaggagaggagggagtaagtcccacggtagggccagtggttgctccctgggttttggaatcatttctgcggagctttcaaggccagaccctgggcttagggtcgagacttcatagcagtgacagccagacccagcaagatggctgcgaccgtgaaaccctgggcggcgatccgggtgcgcatcatgagctgagagcgctggctgttgccccggtggaaggagtagaggccgtaggtgagggcggccgccgtggccaggcaacctgaggaggggacaaagcaactgggaaacagcaggtcgggccccgcaggtcattccccgctttgggtctcgcttccccaaagccaagatctctggatcacagcggagggagggcggcgagggtaggtcgagtcgaggtcttcctagttacagagtcctcccaatcttaggccccaaatcccgccccctaaacccgctgctcccgctccaatcagtttcgcccctcaccgccccgccccctcgtctcttctctagtccgctctccttccgctccccgctagcgctctggtccttctctacttccttccctccgacatcactgtcctctccttgtgcagttcctaccgcacccacttacctatgggtaccaccgggttctcgcgggtcttgcgaacgaacttttccttgaaactctctggattcctgtaaacagtggggctcagcccctcaatgactggaggcttcgatggttcaaaggggacctccggaatcacagggccgggagtcgccatgtccgggccacagcagcaggagaaaatcgggactccgacctcagcctcccggtgaaggtcatgaaaggggcggggaaacgaataaattgagccttgtacgcaggcgcaaatgctcgttgcatcctgggagtcgtagtgctcagcacggtagtgctacaaaaggactacatttccccaaatgcccgcaaagccttgtgcacgccttccggaaggagtttgttacacgaggtctgagagacagaggcagcgtgtttgagctgctggtgcggtggtcagcgcgatgcccaaggccaagggcaaaacccggaggcagaagtttggttacagtgtcaaccgaaagcgtctgaaccggaatgctcgacggaaggcagcgccgcggatcgaatggtgagggggctggggttccgggtggccgtgggcctcggccgggacggtccgcgagatgacggatccgcgatgtctctctttgccggtagctcccacatccgacatgcctgggaccacgctaaatcggtacggcagaacctggccgagatggggttggctgtggaccccaacagggcggtgcccctccgtaagagaaaggtactgacatggcagggtctcggtccttgtcttctttactcttcccccgccatactgacctaggtgtcagaacgtggtactgcccattccttccctcaggcccttccgagttttcgacctccccacagtcagaacgctcaactgacgttgagcaagggtctctttacgaccttcgtcacactccctccccagcacacattccccataccccctctactcagtcttttttctctgaaattaacccattagcatctcaacggtattttccttaatttatctttttctacccttaactttcctaattagtactccctaagagttggagatctttacttacaccttttctttgttattcaatcatccttggtctgaggcttccctaggcttccctgactgcagtctccttcccgggttcaagctatatcccacctcagcgtcccaaatagctgggattataagcgtgtgccaccatacccggctgatttttgtggttttagtagaggcagggtttcgctatgttggccaggctgggcctcaagtgatccgcctggccccctggaggcttcaacaactattaaaagaatccaggttcccaaaagaaaagcaagcaattcatctttctctgcctgcctatctataaaatgggtataacactccttgccttagggactatctaactgtgtggctgtagcctc

SEQ ID NO: 10806 - DNA, 6000 bp, Homo sapiens
attttagacaacgtaagacaaatttgcaattcccatatttcacaaaaggaaaggtaaaggaattggtaaaagtactttaactcgggcatctaagcctctaaatttaccccaactggtaggtgtttctactcttttactgaagagcttttactatatcaggacaaaaggacacaggcttctttactgaagactgaggacctaaagaaccctcctttacatataatttgcacagaacttaagagaaacagttggaaataaaattgtcttaagtagaaactgcttattatgctaagttattaattgattaagataggaaataaaaaagttaaaaaccatcattctggaagatcacaacacttctaatatggaacaggagtccaaaagtcacaggagaaagatgtagattcttattagacatctataacaattgcttggcataaaactcatttcccaagttttcaattaatatttagaatgacagattagaagttgggaaaaggaaatgccacaaattattgatattccctatagggcaggcacacattcctcctgtgagaataaaagtacctacatatattttatctactcattagtctgtcatctggcccaaagaattaaaacattcaatacacacacccacacacaaaaggcatctttgaactcttacacttatacaaatggctattccacggaaataaaagataaaaatgctcacctttctgaaaatctctcataaatcactataatttactgaaaaggtttgtttttaaggttttacacttgaatttcatggaagagcagtcaagtgtaattgacttaaagcaacagtttgacaaaagtgataatttgaaagaaaagtgataacagtataaccgattggctgatgtcaaaggccagagccaagctggaaaactaaaagactcccgaatctaagtattttgaccaaaagcaggtaagattatttcgtaaattctctaattattcatttactcaataactattcatagcccactatgtgatgaaggtggttcctggtgctgcaaatgcaatgggtaacaagcagatgtgttgctagccccctggagcttccagcctatagaggaactccaccactcacatctttcccacgtctgtaaacatttcttgacatgcaacacatatgggcaccaaccccagcccactcttcttctgcctgcagctctctcctttcctttcaccaactccagccacagaggtggtcctctgtccctcaggtatgcaaggctcagtcctgctccagggcctttgcacttgcccttccctctgcctaagccactcttctttcagatctccaaaatcataggcttcttccccctcattcaactctcagctcagacccctccaccccagagaggcttctcaggccacttgatgtaaaacagcagcccacatcctgtcccattctgccatgcaaccctgattgctttctttcacagcacttagcactatctagtcaccatcacttattgtatctttgcttcttatccatctccttcgctgagattatagcagggtctgtctgtcctgtgcagtgccataatttagtccctagaaagttgtctggaatattaacagatgcccaataaacacctatttcagaaaaaatacagacaacgttagcagttttgtatcacaacagtaccaaataaaaggcaagagaatgccttaaattctaagaggagtttggaccatttaaactatatatatatatatatatatatatatatatatatatatatatatatatattatatgtatgtatatattttaaaagattatgatagcttacactagtcctaaaagccctcaaaaataagcataatgaaaatactgaagctcaacattggctaatgttcaagctttataatgtattaggctcaatttctagcattagcattacttttacaatttattctttttcaagagcatgctgacgagaccccaatttttttgttttaaagaaaagcaagagctaagtatgttttaaaagcatccatccccttaaaagttattaaccccatcataaactgtaaaatctgtaaccatattatactaacattaaaatataagatactggtgataatctacagaaggcagggatttgagtgcctaatggcaaccgaattttatgaaacataaactaccctcatcttcaatttaatcaaaggtacaagctgcctctctacgttcaaaaatatttaaacacttaagaatttttcctcagattattctttaaaatgtgtatctgttccttcttttcttttgttaaaacaaagagccaagttgttacccaaggaataatgactttagttactgaccatcatggctcccacttcacagcaaagatgccaaagactcttatggattactgtgaagttatatagaagcaaacagtgtatgctggggagaaggcacacttatttcctggaaggtgatataaagaaacaaatgactactgcctttaggcctttgggaataaccaaatccacttaaaaacctcaaaaactaatgctttacaatttcatagcaaattattagaaacaacctacatatatcacaatgaagagattaaataaattatggtccatccctaatggagtactcagcagctgttagagaatgaggcagattctcttagataccaatggagactgccatgatttagtactctggggagggaagcggggcagggggagctggtgcacagtatacaatgggtcctcatctttaggaatacaaacaaaaagaacacgtacagaatgtttacatgagcataggctatgtctggaaagacatacacaaggagccagtagctgtggaacatgatgggagagaggtatactccgtatcttttatatctattgaatcttctccagtgtgaatagattacctgctgcacaattaatgtaagaaaaatgcacactattaccaacatatttgtcaaggatgaccattcagaagcaaatttttcaaaaatcacaaaagttttgctccttcaacagcagagtccctgattctcattccccagaagagaatacaagtctccactaatcaagaggcttgctagtgatctcactcacctattacaaagcaaagaagtctcaattcaattcttgaagaggaaatagctgctccgatcaccttgggaacacatcatatatttaaattgagcttgcaactaactccctaatgaagtttccaaatgaacagttgcccccgactataaagcataaagtcaacgtagaagacaactaaaagaatggtctcgtgtttttaaaaaacacattatacttaggcttccttttctctgccaggcttagacaagaaactctctggtaacagtgaaatgtaatttcagatctgtgacaaaataatcatgtaaggggaagggcaagtagcattcgcgctgaaaaaactccttggtttttccacttgtgaaaaggaaaggtttgccttaaatttaatttctgtaccatttctggacccctgcctaaacgatactactatatcacattaatcttacttcaagcaaatactttttaaaattaaaaactaatctgaaactgaacaggaatcggaagacaaactttaaactgaaacttttctgttgaaagaatgtatcttttaaagacacataaaaagaaatgcaaagaaccgatttccatataaatgccactcaataacaatacaggttataacaatatttgactgcattaaacattcaaaaaggaacacaaagatacccaactgcaaataaaagacctcatatatttttggtagcggaatgtggggggtggggggcaaaaatcacattaattcagattaatcatgtaaattcagaacacgtgatgtgcagttttgtgtcgctcagaactcctgaatccagctttgtgcttttacacaacataacagaaatggcatctttcacaaagcctaactttgacctccaacactttaactttgggtttaaccagtacaccaccttcggaagttagcacataaaaatacaggtaagtcaaatgcactacggatacagaaaggacgaggaacaggtttaaaggggagttgaagcagaggggcacgaaatcacctggcaggtcacctctccgaaggaaaaacatttcaagctccctcccatcccccaggtaacctctggcctcagaactcactgccctgcgtggggcagaagttctgggcgctggagtccgcgtcccccaggacacgagggtgacccaagggcgcgcggagagcggcgggacccggagcggcgctctccggggtcactcccctaggacgctccgcagagctgggagcgctgccccaccccgcccgggccgcccctggggaccccgctcggggctccgcggctcccctgctccgcgccgcgcccacccgcccccaggactcacggtacgctcccgcgccgctatcttgccatcccctgccgccggctctgtagcctcggccgccgccccggggctgcccagatcccacagccgcccgggggcaggagccgccaaggagggggccgggcacaatgcgccgccgcctccgcagccgccgtctcgcctcccctgtgtcggcgcgaggctgcttgaggcggccacgggcgaagggcggcccgctgcgctccgcgaaccccgcgggccgccgccgccgccagagcctcccagaggcaacggtaacggccaccgccacggccgagtcgctccagccgggactgcggcgcgcgggggcggcgcctgcacgccgctcggctgggggcgcagcgggcccggccccgcccctgacccgcccctgcccccggccccggccccgccccaacccgcgcgcccccgccgatccccggccgcgcgcccgcgcgcgcgggtgctccaaggagtcggaggaacgcggccgcgcgacgggccccggacgccgagggtggtgcttcctccgagcctccggtggtgaggccgctctcagaaggtcatggaagcgcaggggagagcgaggcggccgagcccaggcaaatcctcgagaaaggccgagtgcgcgacggctctgcggggaggaccgcgcctccccgaatgcggccgctgctgccgctgcaaacagtgccttgaggagaggaaagcggggaaccgtgttttcgccgcctctgtaaccactgcacacaagaaaaccagcttctgggagagggggatgattgttgggactttgcgaattacctaaacagcccagggccgaggcgccgccgctcgcgtcctggtcctcctgccgggtgtggggctcccctgcccgagatggccagcgggcgcgccgagagtatcctggagccatctagtcttgcctcggaggcggggtgggcttatttgtgcggagaagaaacggatctcttaatggggtgagatttttcctccgtacattgttcccatttccgcagtttcacttggcctcggttttctagcagagtaatcaccaaatgaaattagctggagagcgtttgatggcgcagaatcacggtctgaagatgtttacgctgtatgccggacgcgtttgatggtgttctcttcggcacaattaattttgcaaagttcagaaatgtgccagacagagcccctggcacgcagtcaggactctacagacacaccttgagtaggaaacaggcttgtttgtttcatctgtgatttatgtgatgcaccagcaccaaggccaacgtgttttttaaagacctttcgatgaaactccaaagcaatttataaattggcaaaatgaagcttgttttgtaaaataactcttccttgttgatcatgtaattaaatgggcaacaaaacacctgaaaggacatttactgaaaagtagactcccaaaacaaaaatatgtatttcacagctagatacggtcgctattagcgtcctaatggccaactccatccatgtgcgtattttgaacactaaaaacgcctcctgttacccctaa

SEQ ID NO: 10807 - DNA, 6000 bp, Homo sapiens
gccttttcagaatatccaagatttaaaaagtttaaatcagtgttctatgaataaaatgctaccattttactccgctgtttgaattgctttcattgagctggtgataagccaaatttcagactttcatcactggaaagaattttgaatgaaaatatctacaactagtcacactttttatagtcagtgtgggagaaggtcaaacttagtacaatctgaagctctagagtaaatttctctgtataaagttaaatgggtcccatgggatgtttcactcatgaccttggtagcattctgtctcagaaaaggctcttccttcccatgaatgcgaagcttgaaggatgttgccacccccctacttgtctctcattccagatcagacatgacttttgaacagctgcactgaaaacatttattgcataggatcatctacaagaagattcaatatgtacttttaaaaggaaaatagcgaaacacatcaacgaaatcactccacataaatcaatataatacaaaggatccctgcttatttggatcaaagaaaaattcactaagatggtcatctatgtgataccagtggcaggaattaatcattttttaggtaacctagtgtctacaaatatttccaggcttcaccacaatttacttcattagttttgcagtacgtaagacatatgattaatttcacttcatggtattaggtctcaaaagccccgtattccaccctactgaaactcttcatgacttggcttttgaatgtatttgttcccttttaactaggttaaacttcctctttaatataaaaatttaaataaagaacttgcatgaaactaagcctgaatacacacagcaggccattttgtattttcattacctaagtgtcaaacaactaaaaataaagatgatagtttctaccttaatttatgagttttagtagaattgtgaaatgtgaaatgtgaagtaaagtgcaaattctagatttctgcactcacgaggttgtgtttcatcctagaacaaactgggactaactttgctgtcaatggtaatactctaagtaaaaatatttatttccactttcaattttatcataggttttagaactaatattgttgattatttagtaatacaacctaaagtacatagtcaaattataagagagatctttggataataagaaaagtaagttagtctcatttgtagtcaaccagaaaaatagtgtgtagcaagatttaaggactaacaaaacaaatatttatatgacattaaagtttatgttacactttcaaatatattatctcattaaatgaggatgcttacatattttacttgtgggagccttacattaacacatttccagttatacccaaaagtgcacaaagagctaattaagtcataagccaactgtgaggtctactaagaaagtaaagttagtcaagaacacaccacttaatgccttcactgctcttcaacttaaactttattaactaataggcttttatggaaggaaatatgaattttagatgttcaataatcattacttgacctatgctggaacaattccttatgtatttaaaaaaacatgtcgcaggtattcctttggagatatgagaatgtggatggttggtgagaaggttgtgctggttttctatttttccatctgcgtggtatgactgctcagtattgtggcatactgtaagagtaactatagatgggacccccatttgcgggggggaagggtcgaagggataaaggaactgccttgtattgcaaaattggtagcagaaaagctaaatatgaatctggggtagtgatgcaagattcaaggactatggaaggcccttctttgaaactgctgccaagccacaaggctcgcagtgccccccaaaggccagagactgccttggttacctcacttgaatactggaccgggatctggagccgaacctccattccagtttactcaaaactcaaaactggcctctccacgtggcttgggtagaaagacagtcaatgagatgatttgatggttttatgagtcaactcctccaccagaagcgctgtttgggagttgaaacgaaataatgagctcgggtcacaagcttttccacgaacctttcatcctggagaaaaaggaaagtgctcagggagcctagctgccctcgcattgttcctggcagctccaactccttgcacagtcttggtctctcaggagaccaaggcagtcaggacgctacagggcacgggtgtaagcgcgacgttcgcggccagccctctgccttgccccactgtaattgcgggttttgattaagaaggaggagccagttgccgactgagctttgaaagtgactttgggtggggggtgggggtggggtgggggtggaaggaggggagggaccaaaagagcctgagtcctgcaataaaggtttccccctatcttctcactcattctttccccctcgccgccggcgctctggcagcaggggataaccccggtgcgcgcctctcttcctgtttggtttactcaagcgcctgccccaacgccttctcagtcaagctgggaggaaactgcttcagcttgaaaaggatgcgggcaaaagcccagcccgactagctcaaccgccgcgccagtgcccgcctcctcttccttaacgcctagggctgcgcccaccagccggcaacgtccaggaaagggccacaggagaaatgacacccgtgcaatgcggagtgtcccggctccgcttccccgcagggactcgaggtgcgctccttttcctggccacggtttagggaggctcggagatggacacctcggcagtatctggcgaccctcttctcactcgctccgcccactcctgctctccagggtcccagccaagggcccgaaccctcggagtcctagtgagccttggccgctttgtctgggatcaggcttatcctcctagcccacggcccgggagggaacaaagagcctcgaccctcaagctctagcctctgcctctcatcggagccccatgcgcccattcatcacctttctaaagacccctttgtctgcctggcaagcacaggtctgcaagggatgcccacgcccctgcccaaagtcctgcttttctaacaactgagctagattggattttcaagccacccagtcttgtgtaaacgacctcataccggtcttttttaccccctcagaatagaccatgtatagattcgttgatgcatgacgaccattccagcccattccttgctagctttttcattctcttccagtccgctttgactgtgctactgttttcctggttttctacagaatagcaagtccttctgtaaggatcaacctgcatcttgctcgcttaaataaatgcttattacctagggagcaggaatattaagaaatggagtgcaggaagtttaagagcatgtgtgtgtgttagcagtcccatctctctctctctcacacacacatacacacacacgcaagggctgttttctttgttttaatcaatgtcagagaaaaatataaactgggcaggcatctctgctggtgtgtagtttctgatagaggacgcctccaaaccggaacagggaggatttccgaaacaggactttgaatagagttgacaatcaggttcacatcctcagaaaaagccttccaagctatgtcagcaacacaaagttgcaccacctcctgggtaaacttcaaagacacagaggccagcgggtggaaggaagtgtgatatttagagaacttagtggggcgggggagagtctgaactcatctagacaaactaaaaaaaatagcagaaatatagtctgtgtgaagctacagtacccagtttctttctaaaactgtaaccatgacgcccatgcgttttagccgtagaagaacaaataaggaagtatccttagtggtactggagtttctaattcaaattataacacattaatctatccaacgtcaaatagaaaaaaaaaaagtagagaaacagagtatacctatttcctgctttctaagctttaacttcagcccttcgagaaaccatctatctccagtatctccttaggtgataggacattgaaaacaggcaaccgtttggtgaataaagacatttctcttgagttctgcccacagattaaaaggacaaggacacacgttctttgttgacacttctgcagtgacttctcctttggcgagagagcacccagggccaacacaactgtcaccacaaccacacagagcaagttgaactcatactgggaacagcttagagaagcacgcacatctcaacaacagcctttgttatttaattcatgacactaaccacgcgcaagctcaaacaaacacacatgctatcctaaccatcactctaccctctatattcacatttcatttatggcttgactttttgtcatatcctgaaatgaagctttgcatttacccgatgagttgcgtctcctggtgctcctcagttcttgctatttcttttgtcttataaaagatcaggagcagacttattgtgcagatcgtccacctcttcctaatggagcgcatcttgggtgcccgagaaagtcctggttgccccagctcccgcaccttctcttgatataaaggctccgttttggggagatagtcgcgggggtgaaatctgtaaaatgcgaggagagcttggagccgggatcccgggatcagatcactggggtcttctgtggccgagctccctctggtcctcgaacgctgcccagcgacctctcgccctgtttgcgccagctctgccagggtcgctccgcgccgcctccctggggctcaggtttcttttcagatgagacaccttgtgcattggaggtggcggcagcttctgcagctgggttcgggggcgtcactggcccttccctcttgctaggagataaacgctgcgcaaagccaatcaccaggctgagggggcggaggctgcttggagagtaacgtccccggctctgcctgctctgtgccgggagaggaagctcacagtgctacgcgcctgcgagctcgcgcacatacacatatacatacatacacacatacatacatatgcacacacacgtacacgcagaatcacacacactctcctgggacatcaaagcatcagctctctggacctgggagctccaagatagtctatccgcatctaggtgagagggcacctcgcctggggacagattacaaaagcgtcccgccagaggaatgcttcaggtagagctaggggtggattgcaagaagagtaccttctttcaatcgcttttgctaaacacacaccctcacacgcaaaaacacgccctccaaggtggagtgaaacggggtgcgggggtggggacggcggtggaaggaagaagacttttattactcaatctggaaagtgcaaatacacacatgaacctgttagccgatgggcccactctgcatgggtggtggacgacgaccctggctcaggattctgcaggaaacaagtgatgatagaggtgtcattaggaactttatggatatttatgcgcctccctttcattgccatttggaaactcctcacgcagaagtcaaggaaactccaatcccacttaaacttcattgcggagaaacagagttctgaaaaaaaagcagctaccatggacctctcttttaaacgcaagtacacccacacacattcggataccaaggaaggaaggaaagaaagaaaggaaagaaaagggaggggaggaaggaagagcaaagtcctctctaaaagtctcaattatatatatagcctctgattgtcacctctcctccgtcccaccatttttcgtacttgtattgggtggcagggacacttttcaagagttctgtgttcgattgttcactctgagtacctctccaccatcctccagtcgttgccctcattgggagagatgcttgctactctgctagtaccacgccttggttccggtctttactgttggctggtaggtcgggaggcacctctagcatgagacagtgtc

SEQ ID NO: 10808 - DNA, 6000 bp, Homo sapiens
tgtcatgtgatgttccttgtagatcatacttacaccttctctgatcattaattatgacccagttcaaagaatgctgcaggttcagcacagttccttatatccacaactaatttcccaacctttctcaaatttccactccaatcttaactctatttatgaaatatgtatattttggatagcaaattaaaatttattttttatactaaactcaataccaacccccctctaagagctgtagctctttcttccctggtgtccaggaggcaaaaccttggctgcttttcagtggctgcttgttttccttaggtattatatcaagctttctgaaattccaagtaaactacatttgctttgttagcctttccaaagcatttaaaatgattccaacgctttgattttccttaaatgggattagcaaccacttgatttgataaaattagatgcttcattagtttctttggaactgaagataagctcaactgctttcaatgtcagagagttctgagctttaatcttaatttacaacatgaatatgaaaacatgaaaaaagaaagttgtaaaaggaagccaaggaagactgtatttgcggaagggtttttgattatttcagtaattgctgaattgtgggggggggggtgggtgggtggcataatgaacccatcatttatcactaatttataattaaactgattctgaaattagactttagtagccaaaactaaaggcgacaaactgatgccactgctattttaggattccttatttctcacaaagctatataaatacttgactaatgggattacttcttaattgagctagtttcaattttcaggtcaagattacttaaaatttactacacgttactaacattatacaggtggacagtatttcttgttagttaaaatgtggttaatctgcaaaccacaaatacagctcctataatttcttgcctctaggtcctcaaataatttcaaggctttgtgtaagggccctgaatcttaggtccaggtctaccacttcagcctatgaggtgaattaagccttgtatgtctctctagatgttggaagaaaataattcatccgtggctgtgcagaaatccatagctttacatgcttacttccaaccaaaacacatttataaagtatgtgcatgttgctaaccttctagctctaattcctctgtccctttaagtggatgttctgaaaataacaaccattcactttgtcatttactgttctgtaaaacacaaggcagaggcccaggaacaggggccccatcaggagcagtgttgtttcttccaaaatctcactttattctaggttgccattacagacagtaaaatatatttatgtggctcaagtgtgacttaactctgtaaattatattgggtcctggaatggcttaaaggctcttatggcctattatatttacttctgtttatacaaattggtaagaacctactgtattctggctctgagccccctctaagttccttccatttacagtcacttttatcaaagatatatttttacaccaaagatccctggacagtatcaataaggaaaaggaaggaataatagcccattacattttatattctcttgttcccaacaagcataagaaaaagcagttatctctttttgagttggtagtttagaatttccaggaatgcagtgttttggaagatggaagaactcataactagttgctttcaagagaaactctagataaagtattgcattattctgcccatctgcttctggtgcattccattttagccacaggcaaagtagaaaactaggtagggtttgagcctttctgtttatcatattttaaaagttaatccaaaggcaattcttaaaagatgaactaaaaatgaagtgtaccaaaactccaacccacgctttacaaacgccaaaatgagaaatgttctacgagggagacgtgatgtaataacacatgagctgggtctggcctcagacggcctaaggtccattacaagctgtagagctttggcttgaagaaacaaagacagccatctctaaacctcggtttctctaaaatggtactgtacctcgcacagttgtcgagaattcaaatcccataccctatgtatatcagcctgtccataattagtcaccctgagaaactttgctttcctggtctagacagaatgaaagaaactgagtctggaccctgccctgtatatgaattagaatttgtgtgctttaagctgccctcccagggcacaccatggtaaagagcagggagcctagcttgactgtgtaggttcggctggattattttaagcgtatcattcactccctcagtgaagtgagggagttagactaaaacacctcttgatatctcttctagctttaaaattctacgcaatccacgggggaagaaattcaagaaaccttgcatacatcaaaacaccaaaaaccccactttccttaaaaatggtttacaacgaacagatcaccatccctgacatttcaggttttgcagttcacagttcacagtacggaggaatgggctaagtcacactacagcaggctcccctccacgtctaacagagggggcggggggttttcttggaagactcggccagtgtcaggcagcaaggggtaagggctgtctcggtggagaaagaaacccaggcttccgggaacataaactgggggatgtaggggcaaagcacctgctaaatctcgttagggttgggacttcaaagagggttgggcctgctctgagaaacagtgtgggaatcccagccccgacctaaaggcgacacgttcactgccaaggactcagagggaaagcagggagcggggaatggacgcgggaggtggatgcgagaaaaaggccgagtagggccccagccccggtcactcaccacgagcgggatggagcagatgagcaccaccagggaggtggcaatgagtaagatgaccatctggatctcggcgcccgcgatgcggcggaagctccggcggcgccgaaagtcgctgaggcgcggcaaggctggggaggcagcggggtggccccgggaggcaaccgaggcggccgcggccgcgtggtgctgctcggtgcccagcgaggtgcggcgcatgaactggcggtgcatgcggagcagcgcgccgcacacaagcacgttgcagaggacggtggcgagaatgaggaaggagctgaagcccgcgtacatgtaggagtaggcggcgtgcgccgtcacgttggtggtccagtcgatgaagcaccaggtgtctgggtactgcagccgcgagctaccgagacccatgttgggcagcgcgcaaaagagcacgttggacgcatagactgcaaagagcgtgaggcccgccaatcgcttgtccacgtagtggctgtagaaataggcatggttgatggccaggtagcgctcgacactcatggcgcagatgatgctgaggccggacaggctgaagaagagcagaatgaaggtgctgtactcgcacagcggctggcccccgggccattggcccttcatgtacgtggcgatggtcaccgggctcaccaacaaagtgcccaacaggtcggtgacagccagcccacataccagcgtgtagaaggtcgtctccttctgctccttgcgcgacttgcacagcaccacgatggccaccaggttgcccaccaccccgaagatgaacatcaccgccgggatggtcactgggctgttcagccggtcggggctcaaggaggcggacgaattgaccccgggagtggacatgatagtggctggcggtgcgcagccttggagtgcaaggctgggtctggggatggtagaagagagacaaagctgccgtgagcggaaattaccacttgtaaggtgttagacccgcgcccgagaaacgatacactgataagacaaggggagcaactcgatcctactttctggattgtagccacttaccaactgcggccaccaaaatctccaggctcgcgatacgtcctgccaacagcacactcttgctgacattaatatttataaactgattttcccattcctcttcctccccacaatccaactcactccattgccaagatgaataagacccatctcaagggaaaagtagctcgctagtgctattctcgatagattctgaatcaataaaatgctcactgaaaacaagttacaaaagcaatttggagagcgcgctcttcccttcttggctctcttcggcgagggccgcatccctgcgttctctacccgttgaccccaacgtcagcccaacgccatctcacctgtagcggcagcagcggtggcagcctcacgagcccccagggtcagccctcagatgtcctggacccgcctccaacctgctttcaccttgtcctgctcagtctggaaactgccaaatcttcggcttctcaaagccggtctcagtggctgtcgatttttggacaccgaggtcagagttgccagctttcaaaaacttgggaaacaagaggtgcagcgggatgggtcagtgaagaatggtgctggatttcttactcgctattttttttccttcaaagacgagtcccagctttgcagtgcccgccggtctcgtctgcgggaggacagcgttcaggtgtgaggctgtgcgcgcaggtggcgcggagccttggtccccagctctggctgccctccgccccagccacgggcagcacgggcggctactggagtttgcggctgccgctgaggccgctcctggctacctgggggcggctcggggtccactctgccagaggctctggcctggggctgttcatcttcctctcgggctgccgggcttggagctccgctctcgcctttccaccctctgtacaaacttttctcctcctccaagtttccctggcggaggcggaggcaaaccgcgcgctgcccgggcgcccattggccggattggaagggggcggagcgcgtcctccctgggcgccgcagggaagactggcggggggcggtgtctgggctggggcggggctgggcgcgcggggtggggcggctcccgtggttttcacgccctcggaggtgcggagtgggaactcggaggggaccctgggaagccccggtgctttccccggcgaccgcttagccgctcctgaactcggcttccagtggggccaccactgaaaccggcgaccgtttccgcctcgctgcctgccgctcggagtgtactatttcttgaacctcctgtccgcgggccgcaacatctagatcgtggaagagagggcagttgttttaggattctacctagggttggccgagaaaggagaagaaatacggtgtctgcgctagcgcgtgcgccccggggttagacttgggtgcgcccagcggacgtggtaggtgggtgggtgggtgggtaccagattgggcggggaaataacgaagaatccatcctctcaccataaaaggagttggagtcagttggcagtgcccagactgcgggctgcgcttggtcgggcaccccaggcaaaaaagaaaaaaaaaaaagagaaagaaagaggaggagacagtgattgcagcctctcccggcgcaggtggcagagccttgcggctttggagagaggtggagccttggtgaggttgggaggactgcctaactgcgatctttttctccattcttcctcctgggaacttctccgccctgaaagggtagcgtgagcttcatgccttcggccggccgtgttatactcgttagacccaattcaccatgaatcctttgaaagactagtggagagtgagaagggggtttcaaagtcactggagtaaaggaattctccaagcaccacctcatgattaattcttggaaaagcctgtttgcgcggcccttagaatcattttgacttcttgtctaatggtgaagtttttctctgtaatccttctactctgttttctaaaaccagaactaaaaacctaaaaaattgtaaaacttcatggtgtaattaaaaccccttcaccattttttttaagtaagatt

SEQ ID NO: 10809 - DNA, 6000 bp, Homo sapiens
gatgcacaggatctgacataagggcctcacatgttatgagccttctggccctttgtataattctggagaggggacggcccactaagaatctctgtacccaaagaaggagaacacatagttcccctgaggacctcctccatgctttcccaactatcatttatggccaagaagcccaaatttctaaatggataaacttactcgctgatcttggggactatatctccttccccctgaaggtgtaggatcctgattgagaagatgctgtgactggaagttaagaaaaacaaaaagtcattgcacattttccatgaccaggcagaggactaatgtttcctggaacacagtgaagagtttattcttacaatctactcacctgcggctggagttctggttgaggtgggtgctggcaaagctctggttcttacgacccacttttaggagcttccaggcctcctcagcatcttgcacatgaatccagttgagatctggggccaaaggagaggggtgtaagatgggaacatccaactcttttgccagtctctccccagttgccctccagggttcatgccagctttccccatgttcctttacctttcacatagggattgccattttgatcctcgcatagccgcaaagtctgcctcttgcgctgttggctaggcggttctaataggtcataaagcagttcgttgtagatctcaaagaatgagatccagatggagaagcgaatgtttgccgggacaggtagtggggcagtgtctggctgtgcccatcgatgacttgtttctggagaagaagccaatgtatagggcatcaacctagagcagttcacctctcttttggcctgcaggggccttggaaggcagaccttagattgcaacctctggtctgtactcctggcagctattaggaacagggagtgagttcctactattttttggcagagcccagtcacggtacataccatccagctggctactgctggtacactgactgatagaagagagcccagcaatgccactgtcgaagctggtgctggtacctatccgactttcgatgtagacactcctcttcaaggaagtggacagctcctcctggaggggcacagggagaaggtaagcacaaaacttccccgagatttgtaccccctacccccactgccatggataccaatgctttacctcttggaggcctccatttagcagggacagcttcttcatttcctcctgtcggatctgcttgctgtctagccagattacctcattggagagcaagggcttcagatcaggtgttggatgaagttggccttggaggctattgaagatcagcgccagggaccgggggagaatccctccatccttgatggtacctggaggcatatgaaagatggacagctgaggcaagtgcccttctccccctaactcagagtctcaaaaggtaaaaacaacaccattaccagccaatcaggaatcccgtgaaggcttactactcaccttgaatcgtgtgggttttccctgagttagtgactccatatgtatagatgagccagttctgccctttgagtacatcctttaccatctccttcacagttaggttgaagaaggatgcctgtcccacttctggcccaaagatctagagagagacccagttttttagaggcctctccttcatctcccacttgcctcctgtgcagagccagcagatatattccttcctgagtggttggctctggagaccactcaagcagcttcttcctgcaatgctgctggctgttccctaaacactgaggactcaagcactctctgctagtccatctttccaccaaatcaacaaacacttaaggaatgctatgccctaggcctgatgctgcacacacaatggggcaatataatggcccacaagtatgggctttggagatacatggatctagactcaggtcctaactctactagtgactagctacatggcttcagcaatattacattcattgagccacactatccttgtgaggaaaataaggaaataatgataataacaatagaatttttcagaactgatatacatatgttacttgacacattgactaacacataactagggccctcaaaattgtaggtgtgcatatacaaggaactcacagtcaggaagagaagctttccctctaaagagggaataaagttgcccttacatgttggtcttttgttcacaaaccagtaccctccatacctgggaaaaggtgaacctgtgtgtggcttggccaattccccgttcattgctcttcagggcaaaagagtccttgggtgcttgtagaacaagggtctccacattctcaatacggacacaaccctgagaagggagaaaatacagttgtcacagaaggcattcctgggaatcttttgtactgcatcatttcaccttgaatcctcccttctcagacacttacctgatcttcctgtcgttccaactctgaaggtaacaagggcctaaccctcaagtatactttcaccttctccatactgtcctcagatggaacctgtggcagaatcccagcccagaaccacagattaatttcagcagttacctctgagcaaatgggcaaacagtagtttctaggaactatgataacactaccccatttcacctcaaatgtctctgtgcagctactctttggttccacaatcattccaacccacatggacatttttactactttgtcacccttccctgtctcgtcattatcctgcaaatgtggcttgccacaccgatgatctgagttcgaatttattgactggtatgaaaattagtatgtgatattaaagcaaagcagaggcaaacacttgaatttgagtcccaattccatgacttagtaactatgagaccttgaattatgagttcttgaaattcttggcctcagtttcctcatctgcagaatggggttaataatagcacctatgtcattcattcaacagatacttagaggctgggtgcaggggctcacgcctataatcccggcactttgggaggccaaagagggtggatcacctgaggtcaggagttccagaccagtctggccaacacagcaaaaccccatctctactaaaaatacaaaaattagctgggcttggtggtaggtgcctgtaattccagctactcaggaggctgaggcagggagaactgcttgaacccgggaggcggaggttgcagtgagcagagattgtgccactgcacaccagcctgggggacagagcgagactccatctcgaaaacaaaaaaacccaaaaaacaaaaaaaacccagatatttagagtgtctactatggcctaggaaccgagaagctctgatagtccatagtgagagacatcatcaaggaccatgctctcatggaactttataagtctctaagagaaactctataagagcacaaaatctgacaatgtatgttaatgtttagcataggacctagtacagtgtttctcaaccagggtcatttccactccaagggccatttagcaatgcctgaagtgcctgaagacattttttgattgtcacaaatgggaaggcactactgacatctagtgggtaaatgccaagaatgctattaaacatcttgaaatgtacaggacagatccctacaagaactgtctagccccaaatgtcaataatgctgtaactgagaaaccctggcctagcaggaaacctacaacaaattgaagctatggtgatactattaaaacctgaacatacattccacttacataatgcctatatgaccttgtgcaaattatttagcacaactgggcctcaaggcaaagagagataactattattccctgaaagattaactaagagcatgcatttgaggctatttcattaatgcaatgcaaattatagttcttctggacacacaactcaattttttttttacttgtcatgcccttaatttttttttctttttttcttttcatagccattttgtcctaaatgcccttaattttgaattgatctcagacctttaggattgctagtctttgacctcatactaccctgtatggacaattattggcctgaggatatcactttccgccccagccactccccagttcctttacctgctgcttgtcctctagggaggtagagacgacagagcagtctgatagcaggttcttgcgtaccacagaccccaaatctgcagctgtggactcaaacatgggagaaactacgacatcgtcatcggacagcaagcccgctggcggagaaaggatcccttgcgacatgacggcaggggcagcctaggtctaaaaagagaccaaaaagtgggcagggagaagaacctttagggacagaaggggccgcgaattttaggtaataagtcccttgccccaggacaccgtgtcccgcttcctacttcttttcccctccaattatcggcaaaggggaagggaatgagagaagttcacttaatgaacaattgagagaagtttgaggcggcatttctgaacgcgaacagaagtccacagacatctggctccaaaagcagaaggctacgcctaaagtagggcacctcgcccgccggtgctgtggaggtggtgtcaggatccctcggctccttctctaacctcaccccaaggaccaccgtgagaacagagatgcagcattaagagaaaaacagatggctgcagctccgatttcttaaagcctattccgcgcgggcaagagctggtaacccgggctccagcacagccgcacactcacccgaagacgtgccacttgctcctcctgggatactggcttactcacacctagtcgccgaagctggactttcgcagccgcagagcacaactccgcccacgaggtgcagctttgttacagatacaatattttaaattacgcgctgcgttcgttcggccaatcagatagggaagcctgcagctaccaatccgcgtaaggaaagggggcgggcctgactggaattccagtcgttcgcttctgcttgacctctgagttctaatgtgggtccgggttaccaactgtcgtggattcgcacttattttgcctgggattcttccaacttaacctttttccttgaaccttagacatttcttacctaagagcctaaaggaaatcttgaggcttcagcagccaactcctgtccttccttagcaacaatcttaacaggagtgcacagggtaactggtttagggtgcttgctttgtcttaaggggaaaaacgacatttcccaggaggcaccgcgaaccaacgccggtacactatttcccagaattccagggtttcggcccttccagaccgtctctcctcagggttggagacttcggggccaagatggcgacgggaacgggcagtgagtatctgagcaggttttgcgtgaaaggcctttgtagatccgaggctaggcaccatatttttgttacacgcttagggagtgggagaagtgggttgcttgagagcccagggttttcagagacctgcgctctacagcatcgtgaagaccaacgtttgggggcccagaaatctggggtcttgtttctcagggagagagcggaggtgtgagagaagcagcttagtgaatcctagtgtgttaggaactctgcgggttaaccgtaaaagcactctagaaacttgggcgtgcagacgaaaagatgttatgagccagacggagtaaccggcacctcaaagagccattcatttttttgtctgacgtttgtgaggcagtggaagtggggtcttttaaccatgagcttttcttgccactcaggaaattgcatctcggggatttcagccatttttctttttttggactgaaaagctcttttacccccgacatttggagtagaggatctgagagaagtaaacaagtttatgctaagagggaggcggggtagtaggaggggctggccgctcgggttcctgggaaataagccctgaataagttcaaactggaataaagtccagtattcttaaaactgggcttttagggagaac

SEQ ID NO: 10810 - DNA, 6000 bp, Homo sapiens
gcccgccaccacgccaagctaattttttgtgtttttggtagagacggggtttcaccatgttggccaggctggtctcgaactcctgacctcgtgattcgcccgcctcagcctcccaaagtgctgggattacaggcgtgagccactgcgcctggccattaaacagaatttcttaaattactattaatactaaatattagtacctaattaaaaccactatacattaagctcttactatatgctaaatgtatgttcatctaatcctatttacaatcctatagagaatgtactattaccctattttacaaaatagtaaactgagtctttcttttttaatacttctagggtacatgtgcacaacgtacaggttacatatgtatacatgtgccatgttggtgtgctgcacccattaactcgtcatttacattaggtatatctcctatccttctcccctccccccaccccatgacagaccccggtgtgtgatgttccccaccctgtgtccaagtgttctcattattcaattcccacctatgagtgagaacacgcgatgagtaaactgagtctgaaagaggttaagtaactttccaaggtctcacaaccagttagtgtcaaagccaggatcaagcccagatcttttcaaattcttgagccaaaattttttaatcctatcctctgctgcctcccctcaactctaacctccaaatacaaaacaagaattttggtatcaaaatgcaaccagggagcacatacagtgtcaccagtaatggactagaaatcaggagacctaagttctaatgccaattctacactacctacacatgggcacaagacaatgagcaagtgtgcctctgtgggctttgttttttaatctatgagatctgactgaatatattttaagaatttgcccccccagctgtgaaattctaattctcttcatattttaaaaattaatttaaatgttatttccataatgaactatcttattcaatcaattatcatgttaatatgcaaaagcataaagcatgaaaattttctgaccacttactaatttcttccttttatgaacaaactgcacttgttccggcacttaaccatacactcttatgctgacttgtaagagcctatattgctgacctctgctggttattaaactctcccctttcattcattttccaagcatatttgtctcactgttagactaatagccataaggacagagacacttcttcagtatttgttgaatgaataaactcaacagaaaacaaaggacatacagcaattcttcaataattacatgttgactatacagaaaatatttttccctctatagctttaaaaccccattttaacagctcaagagtggatcctcagaaacttctatataattaatcacctattttcttttcgatcactacagatttccagttattccaagtttcttgatgcgcaatgaaagccattcaaatttcataaaaccattcactaagcctaggaaaaccactagaatataaagcaggggctcaacaaaaaaaaatgaactgaatccagcaaatagccttacaagaaccaataaaatcaagtaaaccactatggttatattatataaggagaatagactcaaactactttcatgatacggcacaaacgaagatgcttgcagaagtattcctaacataaaagtgaaggaaaagaaatgctaaaaaatgaaaaaggcaatggaaaacaaataggatttaatgaaaaagaaattagcatagttaccaaatgcgaaatatcatatacttgaaaataagagctttatcttcaaatactgcaaataaaaacagatttgaaaaatgggtcgggcccagtggttcacgcctgtaatcccagcactttgggaggccaaggcgggtagatcacgaggtcaggagatcgagaccatcctggctaacacggtgaaaccccgtctctactaaaaatacaaaaaatcagccggtggtggcgggcgcctgtagtcccagctacttgggagtctgaggcaggagaatggtgtgaacccaggaggcagcgcttgcagtgagcagagatcgcgccactgcactccaacctgggcgacagagggagactccgtctcaaaaaaaaaaagaaagaaagaaagaaagaaaaacgatctgcttgaacgcagtggctcccgcccgtaatcccagcactttgggagactgaggcaggtggatcacgaggtcaggagttcaagaccagcctggccaatacaatgaaaccctgtctctactaaaaatacaaagaattagccgggtgtggtggcgggcacctgtaataccagctactagggaggttgaggcaggagaatcacttgaacacgggaggcagaggttgtggtgagttgagatcacgccattgcactccagccggggcaacagtgcaagactccgtctcaaaaaaaaaaaaaaagtaaaaaaagaaaaatgatcataaagtaactcaaatgattctagaaacatttcagatttaagtagagtatcagaaatgttatttcaaaaatcacttttacataaatataagcagaagtaaaaagacaaaatatagatataaaactatactttgtgaggaggaggggcaggtgaacataaatggaaaaataaagggtcagatacactgacagtgctataacagtcaccaaaaacagagaaagatcataagcagaaatatgtgtacaaccaagtctactttagacctaaatgatctgtccctgatgcattttacaaacttgaataatcattgtcctggatacatccacttataaaagaacaaaaaagatttataacgttatgccacaatgaatatttaaaacaactcctgggtttagaattactacagcaactttatgaatgtcagaagaggaaaagtgtcatggcaatatcagatgtcacaaaaggacagtctgggctaagatgaagacaatgttttgccctaacaagagagccagttaatatgaaatgaaccatgaaatggaatgaccaagtagaaaatacactgccaaatcgtcagatgctgaataaacagcgtcagtgaattatctgaattaggaaaggctaaaaggttcttgatgttttatcttcaaaatattttaaaataacacccatttaacaatttatgaacggtctctttagaaagtctaccatttaagaactacctgattttccacaacatggaagcaagtccaatactaattgaaacaaaactgccaggaaaaaaaaaaaagtcttaaaatgcaaccatgtcactgaaaggtacaggccagttgtactgaattttaagtgacattagggacaatgaaacagtgactgagtctaattctacactgctacaaagtgagtcgagttgtcaataataatcagggtcatttcattaaaataatcctccttggaattatcaggcatttaataatcagagcagaaatagttttcctcttccaggattcttaatgaaagataaaaccaggagtaaaaagatgtaaactcaacaagccagaagtgacacttgtgtgaccacaaattagagttcctgttttattctgtgtgactgcaaattaaagttactactgcacatggccggggggattgagaaacaacttcaaccaacagttggaaacaaattacacgtgctaacagttacactcattaggaaattcagaatactttcaaagagagagttatttagatgttgcattcatttaaacgcagacgatgaatatctcagccgccttcctttgcaggattctgtgccaagcccttccgaagccggggttgataaggtcgactccaagaagaaaagcagctcaagtaggaaatggtatcctcacatagcccagagaaccggtgacgcactaggagcttggaaaatatcccatcgtttaccttgctagaagcagctgggtagggaagaggtcgtccacgtgcactattgttttccagatatgtttatttttaagttttgctttggtatcaataacctcaacctcaacctaacagaaagaggggggatggcagcgccactggtggtatttgggtgcaacacaagtttaaaaaataaaaacataacctttttttttttaattgcagcatactcggtgccctcacctctctcctcctccacacctctgccatcaccccacgcagctctccgccgccgccacctcgggtccccatgacaaccccaccccagggcgggcccccctccgccgactcccggccctgccagccacacttgcttggcaaggggcgactctacctgccctcggctttctctcctgagaggcgggccaggacccctccgggcgcgcgggcccagtcccggctgcagacacgaccctcaccagtcggggacgtgtggaagggcgaccgggcacgagctgaggaggttccacccccaagccccaaaacccaaaggagtgacacggggccggggcgcgaccccaaatggaggacggcggccccgcgcccctctctgggctgctaaggggagccgaggggcagacgcagtgggcgcgaaggaactcgtccgttttcacaaacaacgacgcgtcgcggcggcaggagatgctggggccgaagctcaccttgaagggattgttgagatccgggtcggcaaacgggttactgtcgaaatccgacatctctctggctctcggcgtcacccacccgacccaggcgcagagagagagacgaggcgaggccgccgcccccctgcgcgctcacgtcgccgccgccgagcagatccgggtgcagctcgcgggccacccagccggccgcgccactgagcatgcccggtgcggcgggctcctggccgcggcgcagctcgcgttcgccatcccgttcctccgggcccggatcccacgctccgggctttagctgcgaccgagtaggcagtcggggcgaaggaaacgggaactgaaagcgatgaaaagcgttccacacgccacgagcccgcgggatcctcggagagtatggaacccttcccctccgctctcagccggaggccagctgcgtccagccgggctcggtcttctgaacaccgatttcaaatcaggtcctcggggcccagcgtcacttagggaagtggtggcattttgtggtaaggacgcacacttgtcaggttgggggaggcagcctgagtcgtgggccgcgcaccccgggagcagtgccgttagaccgtgggacgcgggcactggagaggctactgcaccgccctccgcaaattacctccccggggcgggggcgcggccgctgctaaggatttttgcatacccctgaccccacctgagaatcccggcctcccatcttccggtctctctgactctaggttgctgctaaatcacggagagcagccttggcgctgccggtcccaacttgatccaaggagccttgagaaggagatgagattcagtaccaggggccggccgtggctcccatcctccggaatctgcaaaatggctacttcttcagaaataatggggagagggatggcaagaggccagagatcaaggccctcgagtattaacttgagcatttgggcacaaaatagacacttttggattttcccgtcttttccaacaccaaggatgagattatcaaaagatgtgttaaattaatttgtaccggccgggcgcggtggcttacgcctgtaatcccaacactttgggaggccgaggcgggcgaatcacaaggtcatgagttcgaaaccagcctggccaatatggtgaaacccccgtctctactaaaaatacagaaattagccgggagtggtggcgtacgcctgtagtcccagctactctggaggctaaggcaggagaatcgcttgaatccgggaggtggaggtcgcagtgagccgagaccgggccactgcactccagcctgggagacagagcgagactctgtctcaagaaaaaaaaaaaatcaatttgtaccattccttgccccaccctgccgaacttattgaaag

SEQ ID NO: 10811 - DNA, 6000 bp, Homo sapiens; identical to SEQ ID NO: 1186

SEQ ID NO: 10812 - DNA, 6000 bp, Homo sapiens
gtactttaaattatctctagattacttagaataattataacataaatgttatgtagtcatcatactgtattgtttgaggaataatgacaagaaaaaaaggctgtacatgttcagtacagaggtaatcatctatttttttccaagtattttccatctgacattggatgaatccacagatgcgaaacccacaaatacagaaagctggctgcatatcaagacaatttatgtctcacgtcagctcaaaaccctcccatagctccctatctcactataaaagtcaatgaagtcctacatgctctctccccattggctccatatctttctgacctcatattatacttactcttctccaactcttttactccgttacagctacactgctctcctggtgatttattgaacactctaggcatgctcccatcttagacacttcacataggctatgttccctctgcctggaatgctctgcccagagtatctgcatggctaactccttctcctttgctccttctcagtgaggccttcctttactgctatatttaaaactgcgacccctagtgagccaagatcgcgccactgcactccagcctgggtgacagagcaagactccgtctcaaaaaaaaaaaaaaaaaaagcaacccatgccctcatatcctggcacttcttattccctcccaattcactgttctccacagcgtttataaccttctagttatgccatataatttacatgtttattttgtcttaagctaataactataatgtaagctctatgaaagaaaggattttctctatattgttccttgcctagcccaaatgcatagaatagtgcctggctcataacaggtcctcagtaaacatttaacgaataaatgcatgtacacttggtcacaagcatgccaaaacagtgaaaggtaatgcgtggtaagaaacatgcagcagacatctctggaaacaaagaagactgtgtgggtctagaaagagaggaactagctgtctgattctgacaactttctatccttttaactcatttcttccaaatttaagttacctcaaatttttgccatagtgatatagaacatgatcaaccataatactctttagcttcacacttttcgaatgaatatgttccgtaaagcataaagaacagctgctttggtattctgtaataaaattactaagactttgtattatgttgtgctaatacaagcagtaatttagcaaaatggaaaagaaaaaaaaaaaaacctcagctttatatcactgagccgaaatgtgggcattctatgacaaaatgtttaatattatctttgagaactgcacatcaacacttgcaacatctattccaatattgtactgcttttcctttaaaaaaaaaaaaaaaaaagtatatccttgaccaaaggatagacttttctctgaaactgagaaatctcagtgcattacaggatcggactcctaacccataaaatgaggagggcaaatgtctaaggtctcctatagctctgaagtttaaaaatgtcaggatggatagcagttgacataacacatctgcactcatacaaataacatatacacagtaagaatgatttatccatccctgtattatgagaatggattataaacctgttgattttacaaaaattaatttaatactgaagaaactttagagatctttaaaatctagcaaacaattagtatgaaacagccatgtcggaactaagtattactacaaatgcataacattctgagcatcagactatcatatatggtaccatcagaggcaagcaatgtgctatttttaaaaggaagggaagacttactatacgcacggttgatgtgtttgtaacattcttaatctctttgctcagaatattaaaatatatttttaaaggacagagaaccggccaggaacggtagctcacgctcgtaatcccagcattttgggaggttgaggcggacagatcacctgaggtcaggagtttgagaccagtctggccaacatggcgaaaccccatctctactaaaaacacaaaaattagcagagggaggtggcgcgctcctgtaatcccagctactcaggaggctgagacaggagaatcgcttgaacctgggaggtggaggttgcagtgagcagagatcatgccactgcacttcagcctgggcaacagggcaagactccatctcggaaaataaaataaaataaaataaaataaaataaaataaaataaaataaaataaaataaaataaaataaataaaaaacagaaccacaacagtataagtgttttcaaaagtaggtgatactgatttttttttaatttagttttatgtttggccatactttgaatatctcctaccaaaaaatttctaagcagatttaaaaaacctaagtcgcattttttaaagaaataacctataataactgatttcacaaatagaacattttttattagttttttggcatctttgctatatcatttttaatcctctataaccctcccttttcctttaagtgttatttcaacttaaatttaattgtaaaaatgtcagaagacttccaaactggaattttgcaaaagcaggcatgagaatacggcactaaaattcacttgcatttcatgactaataatttcataaaacaaaataaagcaaaataaagtttccaccaaattatataaatgattcatcctatagagggagtgacaaaaataaatttcaacattggacttgtagtatacactcataaataaataatctaatttaagtgcgactctgacagacatgagtctgaatcttgcctctgccatttactacctgtattatcctggacaagttacttaatcatactaaccatcagtttcctcatctgtaaaatgaaaatgccgactacctaacgatgtgagagaattaaatgaaatgtatataaagtgtttagtaaagcacatactacacgttgagtcttcagcacatgttattttaacaggcaacagtgttcaataaataaatgttatgtataccttatcctgattataattttacaagagaaaaaatatatttaagcactagaagtacagtgaaaatatttcatgattccatacgtgcttcgagcgcaattcctgaattaccacagattactgtcacaccataaaagtatgcaagtagcaatgcccaggccaaaagaatgagaattgaatgtaatacgtccgtacctatcctgtgataaatacatgccttactagatttactcattaaaacctgaatctaaaaggatgtgaaacctatgtagatggaaatttacacgcaaggaccacctgtcaaaaagaaatagttcgcaaccttcagcagtttcgctttactattttttccaaaggcgtctccagtggcgattagctacactcagtgtatataataaacacactgtggcataatgaaagggaaattacttgcaatcagaatgcctaggttcaaatctgcctcttactacctgtgtaaagcttcgacaagctattaaaataacgaagcctacatttccacatctataaaagataatacctacctattccacaggctttttacgaagatggaacgcgaatgtacatcaagtgccacatgttatagttgaggtatttattaaaggcaagacttctttaaaaaaaaataagtcgttatcaactcattacatagataatatcaaacttttttcactcattattgcactccatgacggcgtttgataattcattttcgtttaaaatcgccaaaatcgcaacccataaggttgaaagacgctcatacccccataaatatacctaaagtagaaaagcatttgcacgataaccggaacatcaaaaaaagcaaaatttagtaatttcctctataaactcaccactcatttaaaaacacagctggttaaaaataatctactaccttcagtgggtaagaaaatgcgtttgaagagacataaggtgtggacgtttatatcttaagtattcattttacaagggtcagtttgttcaatgtaaccgtatccaaaacacaagcaatcgcaaaacaaaacaaacagaaccctgcttataggtgtcaaggatttaaaaccaaatggatcgcaacaaaagagcctccccgtttagtaaacagattctcgagcggcaggcaagccgaggaccaggcttttcaacaggggtcagctcactccactcggccgtcatctggcggggtatttttcgcgaagtttcaaagtcaacaaagaagttctgtcgcgagggggtagggcctggcgagcaataggcagaaggacgtaaagaaagacaaaacccagtgggggaagggtgcggaaaacgcccccggacggcagcgacagaggcccccttttctgggccagcgcgcgacggcggggacaagggaggccacgccggcctgcagtagccccgaggccccgaccccggccccggcccctgcccggcagggtccccgcccccctcggcggcgcgggcgggaaacggcggggggcgcgcagagggtcaccttccgctccccggcccagaggcccagcgggtggacaaacggcccaggcgtccgccccgccgcgatccagcagcccacctcgagcgccgcggacctggccggggtacgaacccgggcgccgacgcaagggctcgggcgccgcgcgtcgccgacttaccttcctccgcggtgtccatcttgtctgggggggcggcggtgacgcagccacgaggctcccgcggccgggcggggaaagagggaggggagaggaggagggagccgggcccgggcaggtgcgtacgctcaggtgcgagagaggaagcgagaggaaggagaggggagagggagagggagagaggctgacagaaagcgagcgacacgggagggggaggggcgggaacacctaggggcgaggcctgggcggggcgccgaggcggaaggggcgggagctccccaacgacaggcgctgtcacttccggcggccgcggcgtgcactgtcggtcggcggctaaggaggggaggcacctgcatctggggcgcggcgaatcctcgcgtgcgccaggccgcctggggtagtcgccgagactgcgccggccagcggggccgaaacctaatcaggagctgagctttgatggcggcttctggagggacaaagaaggcgcagagcggtgggaggaggctgcgagaacctagctcccgccccagccgacgtgcgagacaaaggccccggcgcggggctcttcggaaggccgggaggttcctgtgacaatgcgagtctgcgccccacgctcccgcaccgtgatgccgaggccaaatggctagagtgggcccaggcatcagcatttctgtttggcagccgggcagttgtggtgcacgttttgaggaactactaaagcctgcctgtgatgaaaaaggcaaaagctgacttcaccaaaattactcccagggagacttctgcatttggctggaaggacatttgagtaaaccgctgaggctggtggttgaaacataatcctctaagggagatcggttccgataccctgagttagggacgcttgcctgggcagagctaaggggagaatgatcaaaagccaagctctgtccccgtcagcacgtcaccctccctcactgtaatccctgactgttttctctaaatgaagaattatttagagaatataaattagaagggccgccacgtcagaattgcctgagtgggagcagtctttccagcctcgaaaaatgtttaaacaatatgcagatgacctagcacaaataaagaatgctagcaaccgctgttatgtgtgagcggtggaattgggagggctcttcccccaatcttcatcaaacagagtaaggtttagaataaaaataatgaaatacagtctttcaaaaagagcagcgcttgactaatgttactgatgtcactcatgttactcaagggaggaaagaactcaaactctacataataatacccactgatttcaagggctggcac

SEQ ID NO: 10813 - DNA, 6000 bp, Homo sapiens
tttggtaagaaccactggcatcttcgtggttcctacttacagccctgcttctgccagcagctccatcttggcctccactctccctcagcacatgctacaaatgttgcaacctggcccaaagctcaaccctggggtcgctgtggagtttgcctggtgccttcattacatcatctgcaggtaacagggcaattgggaaagtaccacagatcttccctggggctcccttccatgacattcaactctttgaacttgtgtctggaattgctatagtgagttttcctccctccactgtcttctctttttggagcccaggagacccacagaccttagctgtttctctttttttttgagacagtctcactctgtcacccaggctggatggagtacagtggtgcgatctcagctcactgcaacctctgcctcccgggttcaagcgattctcctgcctcagcctcctgagtagctgagactacagatgcgtgccactatgcccggctaatttttgtatttctaatagagacggagtttcgccatgttggccaggctggtctcaaactcctgacctcaggtgatccacccacctcagcctcccaaagtgctgggattacaggcataagccaccacgcctaggcaactgcttctcttcttaaaggtggaattgactatatacctagggactgcttgcttcctgttgcccagccaggtcagcaatcctctgctcattggccatggggctctgtctactctggggttgctgctgttggacttggctggggctgtccagaaaaccgaggatgcaggactggagctggtaggtgaagatgtcaggtgaaattctgggagatgtttcttgatactctggaatgcaggtaacctcttccttcttacacctgaccccccaatttgtctttgcagctggcatgccccgtgcttcgatgtctaagcaacctgctaactgaggcagcagtggagactgtgggagggcaaatgcagctcagagatgagcgtgttgtggcagccttatttatccttctgcagttctttttccagaaacagcccagtctgctccctgagggcctttggctcctcaacaacctcactggtacgcaccataatctgcccaggcctggacatttggataatggggatatttcctcatggcctaggctgaggtgggtagtattgacaggggtggtgggggaaagcagtttttcaccctggtacttctcttccagcaaacagtcctagtttctgtacctccttgctctccctggatctgattgagcctctcttacagctgttgccagtatctaacgtggtgagcgtaatggtatgtattggggttacttgaatccaagatctggtagtcggattgtatgggacagcagtcctgagccctcagatgtacccttagttgagagccagcaggtggtggtgtgtggcctcagggcccaaccaatctaggtgtgtgtcccttaaactggattatttatccttggacaaatcaactaaccaccttaagcttcagtctcctcacttataactgaggataatcttgcatcatagggtagttgtaggagtatgagaacatgtatgtagaagagcttggcatggtgcctgggcatgtggtcaccatgtcatatattttagctattgttatgatctttgtgtttcattctttgtagactatatatgtgtctatctgcaggtgctcacagttctgtgcaatgttgcagaaaagggtcctgcttactgccagcggctgtggccagggcccctgcttcccgccttgctgcacacactagccttttctgacactgaagtagtaggccagagtttggagctgctgcatctgctgttcctgtatcagccagaggtataggtttctggcccacatcctcagtcacccctgttctgaagccacacagtggctcccttcccatccagtcctaactatagttgtttctctgggcctggctaacctatataggttccatgtcagaaacttcatcctcttgttggggaatgcaccctctggagtaggctgacccatgaggctgtgggaattgagtcttaggacacagagaccaggtgtgttgaattttcttccctgcccctaggctgttcaggtcttcctgcagcagtcagggctgcaagccctggaaaggcatcaggaagaggcccagctccaggatcgtgtgtatgctctccagcagacagctcttcaagggtgatcttgtttctcaatgtcactcattcccctctctcttaacatcaagcttgtttgtccagtagagcctttggagatttaggaccataatgaggtctcatgttctctgctcccacacctaagccaagacctttgggtcccagctcctccccttccactcagcactatccaggcaggaggaccaaaagggactcagtgtggtctacttactctggggccctagaatccctgcccccccgccacccttcatgtttgcttcagcagctggtagcttttgatgagacagaataaagttttatttttatattaagctactttgcctcagtggttgcacagtaaggggtagagggtagatgaggacaagaacaccctgagaaagtattttacagcacaagctttatgaggaataggagaacacatttttttcacattatactaagtccagcagagcccaggctctggggctgttgctcttaatcctcagtggaggcttcaggctttaccacttagaacgttctccagggctctggttacctgatcagcactgaagttgttcaaagggacattcgtctcttggccaaatgctgaagagagagagggaggtgtctttaactattctgcaccctggaggctaccaaagtaaaataaaagatctttgtctttatcttagtcttgttaagacaggaagagtattaaagagatatgatcaaaatacatttggtatgcctagaattaatacaataggtctcaaacacatctaggaagcccaagtccaaatagaattttggctgattctggatggccgcaatgggttgtttcagggaagctttcgggggcactgtaggcatttattattaactacggtgagcaatgtattgcatgggtccagcctcagctgggagcccattctctctctttttttttttttttttttgagacggagtctcgctctgtcacccaggctggagtgtggtggcacgatctccactcactgcaacctccacctcctgggttcaagcaattctcctgcctcagcctcctgagtagctgggattacaggtgcccgccaccacacccggctaatttttgtatgtttagtagagacggggttttaccatgttggccaggctggtcttgaactcctgacctcaggtgatccacctgcttcagcctcccaaagtgctgggattacaggcgtgaaccaccgcacccagctgggtacccattctctaggctcccataggctatctaacataatacccagcacaatacactaaagttactcgtgtctatctcctcctgtagtctactggcttttggaaggagaagcttttttccttctccaattattagtgcatgtctaatgtctactgtgtctcacagatatctactctgagaaccaatctgcttaaggtggtcactctcctccacctcctcccgtcattcccagggcaccatatagttaaaagctgtgattaaaatcctgttattcagtatgtataaacatttattgcatacctacaatgtgttaggcaacatgataggaaaatttcattttgcaatacattgccatgccagtcttagaggggtaagtgcattctaggaaggggaataaatgtaaaggctcaatcctgttaaactctagctgcatctaaagttgcagctagagtttaacaatagtgcaaaacaaagttttgattccgttttctaatctctacagtgagaaaagaagaacacgcttcctcctaactaatgaagattaaatgagttaggcagggaagcactcagcacagggcccagctctatgtgcaaaattactgagattctcacacactacctggactgacactggctacacgttatttggagaaactatattgactaacttctctcctgtctgaagcccattcttaactacaaaaacgtcagctcctggtccctacgcaggattcggtcagcctgcatacttatgttgcccggaatacaacgcatcatataaccctgcgaatataaatttcttcatggaaacaagatcaacagcaaggctaaagtccgagttctagtttctccacgggtttctgcacgaccttgggcggtcccttctcttctcaaacccttgttcccctaccggagccccagacccctggcgtcccgcactcaccgtagcgggcccagagcttgggctgcacatcggagcattcgcggattaggatgggtaggtcgggattcgccttcttcagctccacgtagcgtttctcaatgaagtccctgcggggccggagagagcgccgcgcgtgctgtgggcgggggcttccctcaacttcagggaggtcgaggtcgtgaccctggcgtcccgaagcccgcccgcctcaccacgccgcgcctcacctgacgccctggctgccgggcgagcgctgacataagtggatgcgaatctcacgcaggcccagctttgccccgactcctcgacttgctgcggccgccgccatccttgttaatatcgaagtcgccaattccaggtcttcaggccaagtgctccggtctgaccaaccgcggaccctaaagcctagcccataggctgcatgaggcaggggcggggtaaagcttggccaatgatataaaagtattgtaggaccgctgcgaggtcaatttctttgcgctcggggttggtcggagggaaaaacaggaagcggaaaggctgcgaacgcaaagcagtgtgggttgattctgaggtgcactgtgggaaagagcttgtcgctgcggtgttgctgttggagactcgattgttggtgacagcgaaagaacgataacaaaatgccggagcgagatagtaaggctcaggccatccgttatttcttccccatggcacttggggcacttggcgcattattgtagcttctgagcttaagccgggtgtgtgtgtgtgtgtgtgtgtgtgtgtgtgtgtgtgtatgtatgtatgtgtgacgcttgagcccggagaagccacagggtcctaagtgaggccgacagctccaaactccgtccccagtcctcactcctactccaagtgatgatgggcggcttttgtgcgtggatcgctttcccccagtcctgtccccatacttaatcctgggttgcgcgtatttatcttttacgtagtattttagacgtgatcttccggaagtcttctctgatcctccagcgcaggattagggtcctctgctttgtgctcccacagcttcttgtagtttcctatttcagcacttattacattgtgttgacactgtcgctgttctaacttttgttctgtattgttcactactatatctcaaatttttgcataggatctgacacgtaagagactgattaaattaacgtcaattttttttgtcaggtgagccgttctccaaccctttggcccccgatggccacgatgtggatgatcctcactccttccaccagtgagtattttgtgctaggaccatggaaatgagttgggcaatgaatagaaaagtggtggtgatggtgaaagaattctgaatgtcttgtcatcaaggatggtaaaaaattatacccgctggccctttatctctgtgagccttaactggatcaggccaagtgcataagggtattagaagggaaattcctgcaggaaaggtgttaagtttttttttttttttatacgtgttgtgtaattacacattatataggaattacttcttccaatagcaaattaaaacataggaaataagggtaaaatcatctttttattttttttgagactgagt

SEQ ID NO: 10814 - DNA, 6000 bp, Homo sapiens
aaaaaaaaaagaatagaaagcagccaaggacttagaattttatcagccaaactcagctaacactgctaactctgcctgtaagttctgctgtatcatgtggaccctcacgggactgagcatctgatcctagcaggctccgtaaatgttcttccagactccagagggagaaagacttagctcatttttaatttcagaactgctgccactggccaggcttggtggctcatgcctgtaatcctagcactttgggaggcgttgcctgagttcagcagttcaagaccagcctgggcaacatggcaaaacctcgtctctactaaaaatacaaaaaattagccgggcgttgttatgcacgtccgtgtgaagagaccaccaaacaggctttgtgtgagcaacaaggctgtttattttcacttgggtgcaagtgggctgagtccgaaaagagagtcagcaaagacagataggggtggggcagttttataggatttgggtaggtggtggaaaattacagttaagggaggttttctcttgcagacagtggtgggggtcacaaggtgctcagtggggagctcctgagactcattgtccaggagaaggaatgtcacaaggtcaattgatcagttagggttgggcacaaacaaatcacaatggtggaatgtcatcagttaaggcaggaactggccattttcacttcttttgtggttcttcagttgcttcaggccatctggatgtatacgtgcagatcacaggggttatgatggcttagcttgggctcagagtcctgacaggagtgatggtgcgcacctgtagtcccagctactcatgaagctgaggcaccagaatcgcttgaacttgggaggcaaaggttgcagtgagccgagatcatgccactacactccagcctgccagcctgccagcctgggcgagagagcaagactctgtctcaaaaaaaaaacaaaaaaacaaaaaacaaaaaaaacctgctgccacaactccttgaagaaacatctttaaaataccagaaagcagcattggtaatggaaatttttaatccagggagcatatttattcataagatgccccttaattcaacaaatatataccaagggcagagttttgccattaagaagcacttgtagaatcaaactggaattttcctggagataagaagtcaacaaataataacactacaaagtagagtaacagagtaacacaagctcagagtcctttgaaggatcaaagaatgagattgtgtcctcttttagagctcagaaaaggaagggaaagccgtttgagatgaagagaatcaaatgaaaaatagctaaggaagaaagaatgcaagatgtgttttggcatgcaattaaaaatatgtatgaataattatttgcatttggacagacagctttacatgttcaaagtgtttccacatatcatgtcatttcatttcagtcctaaagtattctcaagtctcataaataccctactcattcattcatgggtcacatctagagttatcatggctgagaataaagagaaaattagttcgaaattcagctacacattcaaaacccctaccgaatctatgccaagaactaagggagttgcaaagatgtgtaaaagattattcttgtcttgagtgagattttttttccccaccattactgagtgacctactcctatcccaacctccccacttacccaagtttctcttcttggatcatcccaactccccaacaaccaccatttttatggggctgacaaagagttcccagacctcatcagcaaaagagtgaactgagctttaatagagtcctgtattgtccaaatctgccactcacttactgttcgacctgaacctccccctgcctcagttagctcaactataaaaaaagcacaggtttcaaaggccattttagtctctagaaattttatgattagatgagactttgtaatgctataaaactgaagtcctatttcatggcctgaaatctggaaaatttgttccttctacttggaaaatggtaatttgatgttcagcagatccttggcaggggcatcagacatcagtagggccaaagccttcataggcccatttctgtgaaaaatttcacttgattcaactgtgaacatacagggcagagatcaggaggtcatttcttggcaaaagcaatacatatcactaagtctaaaccaaatacaaatggccctgaaagatagagaatatttaaactatcttatcattgacctgtacaggtttatacaaaagataatactccatcctaatcatcacattttcctccatcttcactgtaaagctctcatttatccatgtgttcctgtggctttgaagcaataagaaaaaaactttataactcaaaattaggggaaaaaagcacaactttttttttttttttttttttttttttttgagacggagtctcgctctgtcgcccaggccggactgcggactgcagtggcgcaatctcggctcactgcaagctccgcttcccgggttcacgccattctcctgcctcagcctcccgagtagctgggactacaggcgcccgccaccgcgcccggctaattttttgtatttttagtagagacggggtttcaccttgttagccaggatggtctcgatctcctgacctcatgatccacccgcctcggcctcccaaagtgctgggattacaggcgtgagccaccgcgcccggcccaaaagcacaactttttaagcattgctttcatatgtatgtttaatgtaacttatatgggttatttcccctattagatattaaaatccttgagggaaagcacccaacctaaagagggaggataccacagatatttaagagagtcagctctggatctgcggattggaagccccactctgcaacttattggctgtgtgaccttgggaagtcacttaacttccctgtacttaatttcctcatctttaaaatggggaataatagcacccacccagggtggtggctcacgcctataatgccatctctttgggaggctagtggggaggactgcttgaggccaagaattcaagactagcctggccaacacagtgagacccccattgctaaaaaaaaaaaattaattagcagggcatggtggtgcaagcctgaagtcccagctacttgggagtctgaggtgggagaatcacttgagcccaggagttccaggctgcagtaagccgtgattgtgccactgtactccagcttggacaacagagcgagacttgaaaaaataaaataacagcacctacctctcagggttgttgccaggactgagaatatccttatcagctgttatattcactttggtattactctcccccagtgctttgcacaacacagaggaagtcagtatttttgactgaatgaatagggctaggtgaccttaagcctaagtacctattgagcacattttccaaggattttcggaaaatttcctttgaaaaggaaatgtttgtgtagccttgtggaaaactgattctatcaccaaggtaagcagcctaagcgcacctgctggaaagaaggcaatcctaaactgtctgttaataaaaagtcaaggtttacaaataaaaggggtgcaatgaagaaaaggggcacactttaaataagaagagtaggtaggcacctaagccccacgcgcttctccgaataagtctgtcctacaagactcctgacaaacagaccacctaaggactggccggcgccacagggtgaataaaggacaccggcaaccataaacaagtcacgcttttaaaagcgagacataccagcaaggacacaataccctactgagccagcttcggctggcaggcgccgtgacctcacccaaagccactggtgtcacggctactgccaccggtgccgtcccttgctcggcaactaactgccacccgctggcatctgcacgagaccgctatttataacctccctaggaagccgattggccacggctgcaaatagtcattccggctgttgagtttgaactagctctgcccaggtcgccctctccgctgtctcttcctcctcaccagcctaggccccagaaacttgtacccaccaccgccagaccgccccaactcacactcacaatttgtgctcgcaatctcctatgtccccagccggacaccctctccgaactccctcaagggtcaagcatacctcaagggcatccagctgccacctctctggatgaaccgcccatcgaaagtcctctatgacctccctctccaccacccccgatcttgagggccgaaatgaccccgtacgactctcgctgtcccccaaagctgcaaatatctgcacctgcacagctgccgcctcattccctgccctcttcggggacccagttcccaaatccaccagcccactcccttcgacatcgccccagcaggagacgagaaagggacaccaagaggcacggtgcttcttccccacctaagcctgcggcctgcggacaccccaatgcaccctgcgcccgggacaccgccgaccccgccccgctttgctctttgacaggtctctctcccggcgagggccgtggtcttcaggaaaggcccgagcccctttcccagctgcgccctaggcgcgcgccccggctgcccgcacccgccagtgccgtcgcgctcacctgggccgggaggctgacagccttgggctgtgccctgagggccgcgagaggacgtcgcgctggcagacccgggcttgggccccgcggcgctgcgcctccaacccggaagaacagccccaactccgcggcggcgggcggccacgtgactgcagctccgctcccacctcggcccgcgccccttccccgccccagctttcttcccgccaggccccctccacccgatcgccgcgcgctctccgaaccaaaaggcgacctcacgaaatgcccctttgagctcaaaggctagttacccccaggggcccttccactctcggggacaggcgaaacctctttgtctctgcctcggcctgcggcccccagcccagcctccgcgctttccctccgccagtccttgtcaatcaaacctggtgccaaacgcggcagctgaagttttcagggacacatttgcttctccccttgaagaaccagttacaaagcgtgatgtcctctctggggtcccatcagaacaaagaaacaggtaatataactccactccgggtacctgcctttcctccagctcgctaggaaaaatcagaacttctgtaacagagaggacccaagggaaaggggcaggcggagaggggttggtgaagggcgggaatggggggcgttgattttccattctggcaggagaggtggagttaaattcctcagaaacgatgtccaggcttgaaaagtaacacacatctgcgtgcttgtcttccaacatcagagccagcctagaggaagctggctagtgtcactgctagtacgaatatccccgaggctggaaagcatctgggtggaggttgtgagctttccagaccaggcctcggctgtttttctaaaactattaaccgtaatgacctagtcgttcttttcacacagttctgttacttattctgcaggtgtattctgactaaaagtgggaggaataaaaaatagagtgtaaaatggttcacttgcccaaaacttaatcatcatgaagtgtcagtaacgtcatttatttctattaattgaaattttgatacaagaaaaataattatgaatctaaaaggtataagcagaacaggtattccataactttaaaaagaaatgagccgcagggaaacccttagtttgagaacttgtcttgtgattaacctacacagaaggtcattcaactaatggattcccactgcagtccaaactcacagacaggaaatgacacagccccatgttttaaaataataatgagccgtggtaagtgtgaccatagggacggtttccagatactgaaggtacaatgaagtgagattagtaatgatcccacttagtaaggattttaaa

SEQ ID NO: 10815 - DNA, 6000 bp, Homo sapiens
tacatgactaatgtaacataaacttaaacataaggtttaaatattatttgcccaatgagaagattacagaaaatatttttatcaacttgaatatatatacatgtggagacacagatgcaattatcaaatgtctagttgcaattttaatttatatggatttcagtaatcgcattttagataaattagtatattaatcagaattattgacttttcttcattcacatttcataacacaataacaatacagcctactgctttagcataaggactcaggaacaagttcaaaatgtctagtctactattttctaccataataatgtttaacaaattacttactctgtttcaatttcctcatgtgtcaaatgggcattacatggcacctacctcattgggttgtcaggaggaggagtaattgagttaaaaagtgcaaagtgcttaaagaaatgcttggcacacaaattcttgaagtataaataggtgttagctgtcatatttttcaaatgcttcatttttacctttggcatgagtggctttgccatcattagagcccactttgagttctcccgtgctgtttttcatattatctcccctactacccaaattatttgaaatacagacttcagtgcttcagtgctttcactgaaattcatattccaagccacaatagccattcacctgacattagaaaggtttgttactgaagagggtatttttgatctctacaatgaaaatatttacagtatttacaatattgcttatatgttatctttaaaagacttatttttaacaacatgcagcacttgcaatactgaagtcaagcttccaggaatagttataaaattggggttaaatttctttgccttttaaaaaccagttctgtacaaaagcatccaatgccattacgggcaaacctgtcttcccaaaactattcatcgttcaaagtaaaataattgaaacaaaagaagcagaatttgaataacctagtacaggagacttgatgaggaaactctttggtaggggaaaaaagataatttggaggaaatataattgtcatatttgggaaaagaggttacatagttaatatatagggagagtaaaaacaaacactggcacttacattggtttttaccattattgtcaggtttcattgtggaacttgactgaaatacacagagctgccagatctccacttcatgtgatgcttgtggatatagctgacggtaggagaaaactgcccatgttcaaaccataattttctggcacaacttttcatgacatatgaactgaaaaacagaagggaaagaaagtaactctaaaatatcttagtttcagagccatactaagaaaatggagttgttttgcgtgtgtttgtgaagcatgtaaaagtgttagtgtgtatactaacatgactgtctaactaaatgatattactcattattaggatgtcctttccctttttgttttggtgatggatacattaggtcccagggaaggactgcgcagctattacaagtctagctcatgttgcctcatctcttgacctagggtgaggctttctactcctaataaagccagctgggtgactttaacagaggacggcacatttaccaagtactccagtctcctttaatataactttctggagcctatcccagagtgagggagcaatgccaaaaaaaaaaaaaaaatccaaaaagaaattcctacgtgactagccatgaaattagtggatgttctcaaaatttctaaggggcatcagcaggataccttggcttacatttcaaagtcaaataaacaatatgcaaaacttaatcaggtaactcaatgttcttgcttggcttctcaattggagcagaaattcaaaggggaaaatttaaataaatacgttaattgctttcagagacagaagtagaatttgaataatatctatatctaataattcattcctaaacaggcaaattttttaaattttaagttcaggggtacaggtgcaggtttgttacatagataaacttgtatcatgggggtttgttgtacagattatttcatcacccaggtattaagcctagtatctattagttatttttcctgattctctccctcctccctccaatatgccccactgtgtgttgctcccctctatgtgtccatgtgttctcattatttagctcatacttataaggagaatatgtggtatctggttttctgttcctgcattagtttgctaaggataatgtcctgcagctccatctatgtccctgcaaaggacattacctcattctactttttatggctgtataatatttcatggtgtatatgtgtcacattttctttatccagtctatgatggatggacatttaagttgcttccatgtctttgctactgtgaatagtgctgcaatgaacatacacatgcatgcgtagttatgatagactgatttatatccttttgggtgtattcccagtaatgggattgctgggtcgaatggtatttctgtctttaggtctttgaggattcgccacactgtcctccataatggctgaactaatttacactctcactaacagtgtatacgcattcctttttctctaaaacctcgccagcatctaaatcagcaatttttaatgctcatattcttgtagctcattcaaatttgaaagggatatcctttttgattcagaagaaatagaaacatcagaaaaaaacaaaagagactagaatttttttaaccataagattaattaaatagataatgatggattattgcatcttattgatgactcgaaacacagcttcatggataatgtagcttaaagaaagtacaatcacaaagtttatcaactgaattaggatatttttgagagtaaaagggagcaacattaataattatgctgagggtaagtaaaaataggcagaaaatgggacaatggaattgtctccagcaaatcataatatgtggtcattctacctgaagttgtgcagatgatacctaaaccaataaatgctaaaatgattgatgaaaggtggtgaacacttgaatgagcaatttcagaaattcaaaaatatagttagaaagcacaaaaatctagtgttcagtggcaaaatagggtagctatagttaacaataatttattgtatagttcaaaataactaggagtagatttataattttctctacacaaagcaatgacaaatgtctgaggcgacagatatatctcaattacccagatttcattattacacattgtatgcttgtatcaaaatgtcacatttatctcataaatatgtacaactatgatgtatccacaaaaataaaacaaataaattcgctaatgggtaaaaacctcaaagggcagctgcctgttggtctctagagtacaatcctagttttttggttgggtcttacatccttttgttgttgctatttttgtttggaggggagtgcgttttctgtttgttttattggggtggggggtgttgagagaaaagttttaagtgaaattttattgttcctttggaaactagtccccaacaatggtctggcttcttttgtgagggcctcaggattttgatcccagaatataatgcagtggctcatgataaattttattgctataaaccctgaagaaagttctgctcattagttaatagcatcttatttcgagtcacaatattcgggattccaccatcttgggaaagtgatttaacacaggagccaaagcaatcattttcaaaagaaaacaatttaaacatcactcatcagttcacaatcttcacttcttttagaaccaacacacaaatcccacaggatatttcctggccccttcctgttattccagcctcaactcctatgtggctcccctcacttgctgttccagtcactcaggttccacttagaagagtggttgacaaattcagctaatgttgcccccaccgcccccaaggacatttggatttggcaatgtctggagagatttttagctgtcacaacttggtggtgatggtggtggtggttggttggggggagtactggcatctaatggctagagattagggatgctactgctaagcatcatgcacagggcagcccccaataaagaaacatcctgactcaaaatgttaataatgctgaagttcagagctcgattttcatctttcctcagaccatgcttcccagatcttgcacacattgttctctttgcctaaaatattcaggctattttcccttatcctcctttcccgttgccctttcttctcttttctggtcttctctaactcccactcaccctttgataaccctcttatagtggctttacagactcttcttcccagatgaatgttactctttcaaagaattatggaacactaaagaatattagtagcaatttcacatgcatttgtatgtgttcgattacccctctccaccaccaactccaggtgggtagatgtcacctagcttatatttaccacagtatccccagcagctagcacagaatgaatgaatacttaatagcttcacttacaaaagggaaatagggtaaccatctcattaggttgtaaagattaaataatacatacaaacactttagcacagtgcttgaatcacagtaaatgctgacaccgaggcattgtaggcattgtagtttgtggacaggagaggggactccgtctgtctcattttagcgcctcccagtcttcctccatcacctaggtctgagaaactcctcctcctacctacgagtaagcagcaattgctacgcctgcgctttcctggttccacccctaaccaggctgccggaagcactttcctctttggcacgggccagccgcaggttgggtagatactgcgcaagctccatactcgtgtctcctcctcccgcccaccggtgcccaacctgctaacacgcctgcgcgagcgggcgtgccccggaagccgttctttggccctgtgacacgtagcaacggggctggttcagggtctgaaacagagtttgggggttgtttgggattagtgaagctactgcctttgccgccagcgcagcctcagagtttggtgagtgacccaggcccgtggcacagtgttcagcttctctccacacccgtgcaaatgggcttgttgccgtctttcggcgccgcgccctggtcctttcgctcagaccctcgctctcattcaagcccttgccctgacgcggtcccctgcacctcaggcgcgaccttccagattctgcactttttcctggcaggccgcaggccttattttgcaaggaagcagtcgccttgtcagctgtaaagcccagtcctaaggtgaaaaatcatctttgttgttattgatattttagaccgcttatggaaccacaactcccacgacctcgcccctaatggaaggcatatcagctctttaaggtggagttgtcttactgggccgcaacttaaaagaatatacattttcttactctctctccgctaccgtcgttcaaatgctgcgtactttccgcccccatcccctctccgaattactgaaaaaatatttgttgtgtttctatttgcttaagcagactgccaggaacgaattcagtagaaccttgggcataaggaatatttgccatttctcttttattacagattatttgcaatgtcaggctttgaaaacttaaacacggatttctaccagacaagttacagcatcgatgatcagtcacagcagtcctatgattatggaggaagtggaggaccctatagcaagtaacttttcatctttggcaattaatttagtctacattgcagtgaaaacacatatttagaatatttggttctgcctaaaacaatatgtgaacatgtcctttatcaggagtatgatctttcatgcataatcttcttcctctagagagatatgtgacactggcttggcttcgaaggtattgttctatttaagagttgagtgtcttctgcaaactcttcaggtgtaccatgaatggaaaagtagcttgtttgaagaactg

SEQ ID NO: 10816 - DNA, 6000 bp, Homo sapiens
atcctatagggaattttgtaacagaaaacatagggaagggattgaacaaatttgtatatgaaggataaaggcagcaaaatctaaattttttaaattagtgacaatacttctaaaacaatagataacacataacttttatctagctaacactaaatagtcaacttaattcaatactttccgagtaaatatttattaagtatgtaccatgtataggtgatacagaaatagtggggaacaaactgagggggatgggaagatgctgctacccaaataaagaatgtttacataaatctttatcctttttgcttcagtggaaacagttttttttttacatttcactttaaaaccaatgaaccacttttgtttccatgtacctgaccctaccactcctaaagcaaatttaccctttccacactctcatccaattactgtgttctcctttagagactacacccagaagccacactctattcttggatgccttaccaaaccagttcaccaagctttcttccttagagccagatcctgaaatcccatctctcaggaagccttaacttgaaagtcaggttaatctgtttagcctcacccacagacagcttataactaccataactctctctgcactcaccaccttataataggcacctattactataattctgctcagaagttaatttattcatgtgcttattcagtacattactcattgcccttatgggtctgtatcaggtcttaaataaaagctaccagataaaaggacatgtactgtacttgggtttagcactgaaaaatgacaatgcttaatgctttttgaaactgatttcaaatacattaaatttaacctgatttgtgaaatttataaaatctcccaacatagatgaatctcaaaaacattatgttaagtgaaaagtgccagacacaaatgacctcatatcgtatgattccatttatatgaaattctaggaaaaactatagtaatggaaagcaaatcaggggtgaggggccttattttcccacatagtaggttttttttttaaaggcaagaatgatttaaaaacttcaaatctatatcatctcagatttaatcttcacctcataagataaatttgcaactttcttccaaatgatttacttgctcatttacaaccaatagcacattttatcactcaattctccattaaaactgtaaatcagcattggaactttgtttttttttttgttgtgtttttttgtgtttttttgagatggcgtctcgctctgtcaccaggctggagtgcagtggcgccatctcagcttactgcaacctccgactcccgggttcaagctattctcctgcttcagcctcccgagtagctgggattacaggcacgtgccaccatgctcagctaatttttgtatttttagtagagacgaggtttcaccacgttggccaggctggtgttgaactcctgacttaaagtaacctgcctgccttggcctcccaaagtgcttggattacaggcgtgagccaccacgcctggctggaactctttttaaggacagttttatttgagttgtttccatgtaaagactatgcaacccagtccttaattcaagacatgaaaaatacaaactggaatagaaaaaggggctaacaggctgggcccggtggctcacgcctataatcccagcactttgggaggctgaggcaggtggatcacctgaggtcaggaggtggagaccagcctggccaacacggcaaaacctcagctctactaaaaatacaaaaattagccaggcgtagtagtgcagctctgcaattccagctacttgggaggctgaggcaggaggatcacttgaacctgggaggcggaggctgcagttagccaaggttgcgccactgcactctagcctgggcaacagagtaaggctccgtttcaaaagaaaaaaaagccgggcacagtggctcatgcctgtaatcccagcactttgggaggccgaggcaggcagatcacctgaggtcaggagttcgagcccagcctggccaacgtggtgaaactaaaatacaaaaattagctaggcgtggtggcgggcgcctgtaatcccagctactcaggaggctgaggcacgagaatcacttgaacccgggaggcagaggttgcagtgagccaagatcgtgccattcattgcactccagcctggaccacaagagcgaaaactccgtcttaaagaagaggctccagtaaacagtaagtaccattcttacctattctgaataattttgcaaatgttattttagattattgctggaaaatagctgggctttaaactatattttagtctccattccatgaagaggatctttaatcccaaaagttaaaacattaaaaccctccaaagtaaagttaaccatttgacagaacaatgtctatctcgtcatcttttatcctcgttactgctatttgcactcaccaatattccacaccaacaaaggccccaatttctctgatgtgaagatttactgacaaactcaacaggttaaaattacttatcaaagtgtggctaagtgattaagatttttttaaatacaactgatatgagtaaattttaacatagttggtgctgctcaaactgcctttgccactacctatacaaatttagtcccgactgaaacgtgccaaatatgaccattcacgaaaagaaagagtaattaacacttttaaaagaactacgaaggattttacatagtgtaattcaacaatttcgtgtcacatctgctgcagagatcacaaacactgtcactatgccatctccttcctcgaacctccacaccgcctcctgcagctttattcttggcttttcaaaggtttaatccactcggggctgctaaaggaggaatcaaggaagcataatttgtgaactcaagctgagaaaagggcaggaatatggggttgagtcacgtcgttccgccattttctaagcggaggaggaagacatgttggaacaaaaacacaacaaaagagcagccatttcccaagccagctccaatagcaactcgaactgacactgccgggtcgcttcggcaccttcaaatccacttcactggacaaacctaagtacatcagaagtgccgccgtaaaaaaggcagcagccaacccttccgcgtagggatcaaagatgacctgcacgcataactgcaaatgaaagcctcgggaagagtgagaatgacggaagcgaaatggagcagtgtaatacaatgaaataagttggcaaactgaaatttactcagtaattgagatgactgacttacaggaaaccaccagctatagggaacccaggtaactaaaacaccaagacccggattcagctggtctcattacctgcctctacccacttccccattccgtgcttccctcagcggatcgcctatatgcaccgggttcttaccgtatgtgggggatgccaaccccaccttgaagaatcttatagagcttgctctcgtacagcaactggggatgcctggccttctgagattctagcttcactgccacttcctgcaggggaaagaggggatgatggcatcaacatccctacggattcaatgtcacttaggaaaggagggagacattagcaaaactccaagtcgcgactacaagaagaagtgaaaagctggaaagagaaagctctcggtaattataaaacgaggcaaccagcctcaaaggcctcttcagggggtagtgacgaaatccgtacgtcctctaaagtgcaggaaaatgattcatccagaaaaaagaggcaacctctgaacgtagtgagaggtttttaaggaactaggcgatcggaaactgttctaattggaacaagaggcccagtagaattaagaattaaaaaaaaaaaaacatgggaatcactgaaagaggattttgccgtttccaccttaaaagacggttaaaaaaaaaaaaagctcgactaagggacatttatgggacgtgtttaacaaggtgggaaactagttcccccaacctttctatcgggttcttgacccttttagggagacagcggacgaggttcgtaagccaggaaaactagctccctggactccctggcgagtgcgtgcgatgaggagaggcccgagcactttgggggtgcacggtggtggtggggggaatgagtaaaagcgcagcgttatcgtgaaccccaccccagatgattacctcgccgttggtgatgttgatcgccaaatagatgtccccgaaggagccagacccgatcttccgtaccagtttatatttccctccgacaatgaattcagccttggagccgctgctactcgccatcctgagagacgaagatggaggctggggccaagccccgacacctctgggaagaggacggaggcctcggggctcctacactaggcaaggctacggaggagggcggcaggaaacggaacacggaggcctttaccggggttcggggcccagaatcagcagaggggaacctgatcaccgccgctcagtcaggtttctttttgccaggccgcagtttgtgaagggcttctcggcggttaccaggctgggccacttgtttctcggcggccgccgctgcctcgcttgcgcggcgacgtcgcgggctggaaaaggggcgcggtgagctagggcggcgataccgctgccaccactgccgccggctccggcccagagggacccctgtcactccgcggacgacgccatcttgttactccagctccagccaacacaaaatgcccccagtccccgggagccgcttcttcacggcgcagagcactctgggaaagggatctcgggcgctcgctccgaaggatcggcagcgagagggcggaaccggatccgtgagagtcgcggcccacgctccgagcgtcaccctgtcaccgcccagctgcgcatgagcgctgcaactcctgctgactgcgcaggcgtgccgcggcctgtcctcacccccgtcccgggctctcttccacttccggtcggcggcggctcagcaggtgttacctgttactcgcctcggacccgccgggtctctggaaggctgagtggccccccggccttgatattgggaggagtcaccttcatgtttcgtggcagatgaaagcttaaggcctccttaggagttgggtattgacctgtgctctttgaggcggtttttaacctttgatctttcttctggccgttcccccggaccggcctattccaacccagtttctgtttggaaagaggctgtcgcctctggtggagaggaagagaaaagcagccagcgtcgaggaatctctcagggctctcggttgtagcagagcctagctaattacccttcataattagaattgtcctatctactacggagtgttatagaccctctttccacaggaggggaagaaagaaagaagccggaatccccctgccatcctatgtctttgcattattgcctcactaccacatatgatcttcagaagaaaacctggtatgttgctcataatgaagattaaggatagatggaatcaacagaaaattaatttaacaagagtgaaaaaactgttatgtcccctcaaccccaccaaaaaaaaaaaaaaaaaaaaaaaaaagaatcgtatgttggtcttgttgaaaacctcagtattaacctgaacagagtagaggtaactattacaaaatttaattgacaacatttaaaactacacggtaatttttttcttttttacaaaaaatcgatcagagaatcaaattttgaccacgttttgttttacaaaatttgacctgggaaaattgggcttagtaataataatgttcacgaaagaaaactccatggttgatgctatcatcttaagtcagacctcagtcgtaaaaatttaagctaagcctatcctaaataaaatttaattaaaatagaaatggggggcgggcgcagtggctcacgcctgtaatcccagcacttcgggaggccggggcgggcagatcacttgaggtcagttgttcgagaccagcctgg

SEQ ID NO: 10817 - DNA, 6000 bp, Homo sapiens; identical to SEQ ID NO: 3425

SEQ ID NO: 10818 - DNA, 6000 bp, Homo sapiens
ttgtctatgaatctttcttccttcccccacctccctacccccagcaccagcactaagaagctcacctctggccacaatctgtcagagatcacaaaaaaaaaacggttgtttttcatcacttcatcccaccacattaccgattcccaaccctcttctcttctctctttcacagccaatcagctgagctccaaagccccagcacacggaagggtgggaatcttgctggactttgggctttgggctatttaatcagcttcgagtttctgcttcactgtattaccgccttaattgtctgctcagattcccataaagaaggattagaagccaagagtcagtaaagaaggagtcagaaggagcctgttaaccactggcatagtttgggaactactggccaagtccaggtctgggtgggaccagaaccctagactcctagggcagggcttcctcccacagacactaagatcttattatttgtcttcttaccctccaccaagaaatgaacttacaataatagattttagcttactcctgggacaggagcaggaaatgacttccccttcccccaaccaaaaaaagactactgacaagggaaaccactcttctgcaagtggccacctgccccgaagggccccttcccttctccgccagatccagcacatctgtgctccctcccctgtgcccttgcttccttcactgactggggcctgtccttggaaagaacaatcatgatcacagctgaactgtggagcctcttaagcccagccacatgtcccggatacattccccagccttgtcagctgtccggatctgcagggtggccccagaccccgagagccaagaataccctccctcttacatcacgcaacaccccacacctcctgtgcaggaaaggggcacccttaaaactaggccctcctcctaggagcccaataataaccatgagcatggccctagtcctggccgctcactagcagctctgctggcctctgtccccttgggaagagtttattttctctactgtgcagatggggaagctaaggccatgcttagcaggtttgcctagtcacacatctgctctgttctagcccctggcttggtctggaagggacaatacagctttctgaaagttgttcacctacccctggctcttttgaaagagcaaaaacatattctaatgagtcactgctttctcctttcagggagataaggtcggccctgagatagaaccttctccactctagccatttcccttccttaaaaactctgtcatgtctacattcaaaaccccaaattttcaactttgtctccaaattcagaggcctgggcgagaatccttagccaggttgtcatcacaagggaactgccacctaagtagaggccagatgacaaacactgtggatttagaaccaaatggaacactatgattctccaagaaacactggacttttctgaataaagagggagggctccttcctaggcctcctttgcaccaacacccaggccctcatcaacaggatagcccaaggacagaaaaacacactgtgggggcacaaatcttggagctagaagatgtcaaacaacaagacattcagccctgtaaactggaatccccacatatggtcccaaagtattaaatcccagagcaacacagctcaagggtcacttctgtaagtattaatgggttttattcctctcttaacttttatatcactgattttcaaatttggcactgaaaggctgctttcatttattattcacgaaagtcagccaaacctctggtttaccaaagttggggctggggtcatgggtgggtgcgaactgggcaggacagatttccaaagagccacatctctccgccaattctgggaggatgcagataaaaatgacatatgaggccgggcgtggtggctcacgcctgtaatcccaggggaggcagaggccggcggatcatgagcttaggagttcgagaccagcctagccaacatggtgaaaccctgtctctactaaaaatacaaaaattagctgggtgtggtggcacacacctgtaattccagctacttgggaggctgaggcaggagcatcatttgaacctgggaggcggaggttgcagtgagccaagatcgcgcaactgcactccagcctgggtcacagagcaagactcgtctcaagaaaaaaaaaaaatatatatatatatatataaatgaaaacgacatccgtaagctccaaatgtccacctgtccacagcctctgccctactatgtgttctgtctcctcccaccagcccccaactaaagcttcagtgagatgaggccatttcagagggtgatctggaaaaggtcatggagctgggcaggagggctaagggcaagagggcatttacactccactgaaagggagtgactcctgataaccaacagatgcctttaaagtctgctcactgtaactgaccaatatttgtccatgaagatttcagaaatctgctactaaaatccccaccctacacccgtactggccacatggcgtggttggtaagtgtgtgtgctgttcaccacattaggatttgctggagcctcgcagcacgtgagaaccctcccaagagatgggaaagaggaaatgtgatttcacactggacatctccactagttctttcccacccttctgggagacagagagggagagagaaagagaaatctttaactgcagccctgcctctcctagctctcctgacacccgccctaaaaaaaaaaaaaaaaaggctgaaaatttcagagatgtttatgctccatttgtgtgaagatctggagaactccaaacattgtgaaatccaccagtgcaatattgggtagggcctcaggccagactgagctcattaagagattgataaacccgcagttcccaacttctctgagccttataccttccagctttgaatcccgagagacttgtcagggaggttagtgcctcggtcagctacagacacagacgagtgcttgctcccgcccctctgcaagttctttggcctccagtgtgtctggcctctcccaaaactggagagaatcacgccactgatttggaggcaggaaagaaggggatgccactaggtttgggcaccccactgtacactcttctttccagcactaaccgcgctggggggtacggaagccttgctgcgccagaaggcggcctcctgccctcacagaggccttggcaatatggatgcccctccagcagctggtgaaagaggcagccagcagctccctactctgcctaccatctagcccctccagcccatttcgcctctcttgcccatccttcagccctataagccacgcaaccattttctgtctcccctgcctctcctgcccacaaccccctgcccccaatcaaggagaattgagaaaccgtcttcttgcacaagagcagctactgtctaaatgctttttgatcgtctgcatggagggggaactgggcacagccctggacccagtgatggagccaagctctagctgccctggctagccaaacccgccctcacccagctcactgtccccggggtcttggcgattcagaatttgtcagaacataccgtctctatcctcttctctgtgatgtcaagcctggtaccaccaagaaggaaggagggaaagcaggagccttatctctcctacattcgcaacctcttcctccagctcccacacgcctggtgttatgtaaacgcaccttcaacccccaccgcagccctagcgcggcctgggggctccggggcctggcacagctcggtgcccgaggatagggaggtacagggtggccgaggagcctcaggccttacagaggccaggcaagaaaaagtcaactgcaaggcagttgcatagcataaaatgcggcagcggagcaaaggtcagacggcgaggaaccgcctcgccaaggagagggagtaggaatgcccagtcctgagccagcccctcgctgaccatcgagggagaggcagaaggggagggaattcagtccgtcacggctccgaagagaaagaaaaaatctacgtcgagcataggccgctacggcgggctgggagatacacggcaaagctggcaccgtgggcaccgagctgggaggtgggcgagccgcccagagcgagggcgccccccgacccaaacggtggctcctgaccaagcccagagacgcccgttccagcgttcgaggcggatggtggcaggagaaggaaagaggccaggccagaggcaaactcccgggacacgcacggggcttcccgagtctcagagggcggggaagccgggcttggcaatgcccaggggtcggaaacggcggtgccaggctgtgaacacccccggcgccgtgccggccgggccgagggcgtcagggagctgcggcgcaccgcagcgactcaaggaggcgcaggctgagggaaggaacactgaggcgcgcctagaaatagcgcaccatttgccccagcccaaggggggagtcgcgtcgcggctcagagaggggcagtttcagatctccaaaccagccatggacttactttgaggagctgcagggtcacaagcatcgccccacgtctgtgtaaatcctgaagccggggcaggttagccgccgctgtactcgcagacgccggtcggaggaaccggcaaggctccctgcgctccacagcgccagctccgcgctgtcagctcagctcgctacctccgcggcgatgttgcaaccactgcctgggaaaatggcttttttatgaatgggagggaagggagcgccagtgcgcacgcgtgccgttcgcgattctatgaatgggtgggcacaacagaccctgagcgcgcatgcgctccgctcctttttttatgaatggggggcgggaaaagatcttaacccgtgattgctgggactggctcaagctccaccaggagccgtcgttcttttacaaagaggggtggaggttccagtggaggctgttgttgcctttttttttttttttttaatgaatggagggcggcggcgactgctgcagctgggccagctgcgcgggctgcaccccctcccagcctgcgagaggaggtaaaggccaccttcacgccactgcgggcctgggcaggaaccgtcagtgtcgctggggggtgggggacgctgcggcctccggatcccgggttgagagcagggtggtggagggcacacctagatctggggatctctgccccccgcaggcagtcaaaagggggggcgggaggacccctactgggggccttctcttgctctagaccagagacgccaggcgggaggggtcttgaagctgcgtttaccaaaaattaggaaaatgtccatcattcatatcaaagggtggggtgaggattggtgagtgaatctggttctttttcctgaggctgaatctctcgtgagtgctggccgcccctccccccatttcttgggtgtagacagtgactgggcccaggcctcttccggctccagtaccccccggggcgattctggcaactcagccagaggaagcctggccctcgcctcccagcgttccccccgccccccgccccagtgcaatgtccgcagtgcccgggcgtctgcccgctctctgtcgccctagctaggtgtcctttctctgtcccagtcggtttcccagccctcacaggacgctggcctgaggagcctcggtccaccgaaggcccacggcccttcgctgttgtaggcgcctttccccaatatcccccacctctcaccggcctcccctccggggaagtgggagcggccgagaactggccaggtggatgggtggagccggctgcgccgaggatgctgccggggtggcctcaggattaaataacaacggggctcttgagccgcagaggaaatggaaatggctggggatcctttcttcgctgttaatgatggtggcgttggggggcgggggtgaggatcagctcaagccggtgaaaagaaaagcccccgccattaggcctgactccaggaaggcggggagcc

SEQ ID NO: 10819 - DNA, 6000 bp, Homo sapiens; identical to SEQ ID NO: 3431

SEQ ID NO: 10820 - DNA, 6000 bp, Homo sapiens
agagggcaccagagtgggattctctgcttccacactgagtcccacgtgtctttgccagctactgaagcttgtggggcttgaagtgtgggtaacaccatgctggcctcagtgggctgcacagaggaggcagaaggtggatgagaggggcctgccactggggagggagagcactcttgttgggcagctgagaatgacctccggcaccaccatggaacccgctgaagatgttgctgcctcactgagcctgtgtctgcagagaggatgttctgcaactgaagctgaccttgcactatgaaccgttcatattaaccattttggatggaaaccttaaaaaacagatgatgcctttctggctttcttaaaaagagatcctcaactcttaaaaagagatctaaactcacttctgtgcggaacggtgatttggcgatgtttctgggtctgttcaggtgaatatagttcttggctcctgcaccgataaaccccaaactcccaggcttttggaattcatcagtttgaatttttgtttattcttttgtttctccttaatttttcactgtgaaacatgtaagcatattttactataaaataggcaagtgtctcactttcttatatattccatctgagctgcttctaatattctcggactgggaaaggaaatgattggccttataagaattgtgaatgaagtaagagtcagtagacttaagagttaggaaggcctgaggagctctcctctgagttaagtgattgaactctgtgatattttgagtgttcagaggccttctatgttttcttttggtctttgatttgatcctgcctagacaaattgacccctagagagaggacgacagcatgcataatttatgcataaggtctttgccaagggcaataaatcagaaggaaataatattggtacttagataattttagttcaaagatggccaaacatacacatatacctagccactaacatgcacacacacacacacacacatacacacgaatagcaatgacagacaaagccacaaaaccaactaacccagtttttcacttttatatctccgctccctaaaaagttgtctgggaacaaatgattaaaatcttaacattttcaaatgggaaagagctttcacagtcctttcattttgcttccctctttttagttcaggaatctcttctattatctcctggatagacaggcactttaacccccttcttgcatggatccagtaatgggaagctcagtactttctgaagtctgatttcatcaatggaaatctgtgacaggaagtaacaaaactacaccctgccacatctgaaatgcattttgtatgcagatattaggctttctgtagtgttgtaatgtggatgtcgtttgggggttaagggaggagatcacatctgtgagaatggggggacagatctttcctgtgtggggtggacattcctcttgtcaattgtcttggaaacagctgagttctgagacagaaactgaaaaggctagtttagcttgctggagagggaatgtctgtgtctctaagtcttaattcttgggcctgaacttgagacatgttggagttttgagagtctgtgtaggttggggtagggctgatggacattgtcccagggaagacggcaggtaagcaccttgtcttgtagagaacacaaagggaagataagtgagccaatcttgaaagctatatgaccacgattcacattacactttgtgtttattccctccttgtcatccttgagcctttggaaatgtctggtttaaatgttgcagcctggcctagctgtgtaatggcatcactggaattgctgagggtcagtgtttatttccttagaatgatagagggaggatagtgctctctgaggcctctgtggattttggtgattatggagactcttaagaaaaaagtgagtattggggaacaagagttgggccctaagtccacccactcccctccacatggtgattcaccaatcactgtcatccttttattaagcaggtggccggatttcttacaaaagcaatcccttaaattggtccgaaatctgttttcctgtaactttcacccacaggacttagtccttcctctcaaaagcacagagaacaatcatcgtaaccattcacattcaccaagtgcttactgtgtgctgggcactttactgagcattgtagtagatcttatatatactattatcccattttacagatgaagaaattgaggctaagggaggtgaaataacttgtgcaaggccagaccccaaatgagtggcaggatttgaactcaaatagtctgatagcagagcccactgtcttgaattctgaaatactacttgtctcagtgacagccccacagaggtctgccgcctgtgacctttcctccctgggccttttttgatccaggtggaacccccaccccatccccttgctgcttctctttgtgcttggagtagaagggaggcagccctgcccagttccttttgccctggggcaatagaaagaatgcaaaaccctagtccacctgacctctggtgacttgttccacttcgaccccccaggacagacagccttgtggaagcctctggaagcaccattttagcagccttcccctcaggaggctgtatttttcctgtctgtcctcaacatgtcttctgccagaacaacaagctcagttttcccttctgataaatctggtcaccctaaatatggggctttgagcaaatgggagcggctggccccacgcagccctcatttcaaaatgcagattcacacgggctgctattttggaggtctggtttctttccccacacgcagtggttttaagtaagagggaagggatcatgacagaatcttggcaggggaaagatgctaggagagaagatgcacctgggcagtctttgcttcccaaagtccccaaacactggcccttcaagaagctggttggggggtggggggagcaggaaagagggtccatggtaacataacactgggaaatacagcctaaccagcccctcctgcagatcagcagtgtgcatgttaaacatttgaaatcctagaagtaaagaagcctaactggttttgtttagcccagtttttccatttaaaaatgtagcctagtaaaattttgcaaaacaatgatgcagagcagagcttgcaaaccggcaccgatggtctgatatattcctgggagaggtctgatttggcctacaaagtgcttaaattttgctttcaattagtcactaacatttcacaattggaatagttctcctaatagataaagagggtattcctcttgaaaaatcagaagatctggaaacactggtccgtattcttgcctgactgtagtcagctggaagccaggctgtggtttttaacttgctgcagcccctgtgtctccttagggcaagacaactatctcttgctctactcatttatgatgctcatcgggttccagagtcccccaagcttgccttctctggtgtggaggtttccttgggtaggctggcctaggtgaccattggggcccattcatccattcactcatgcaacatatactgattgagcttatactgtgtgctgcaccctgtggatacgagatggataaaacagcccctgccctctggattccagcgctggcattctaagattctagttgggaactgcagaacgaggaggagggaggggttgaggagaggggagctggcaaggctacaaccaagcttcctgacttgcagccgcgggggcttgccaaagtgcttgccattctccatcgctttctctaccggctcaccgaagggagccgccactccaacagccacggtgagccttagagacatagccactgacttgttctgtgacttagacgcgttgaggctcatctccgggcctcagtttctccatctgtagaatgacccggttggactaggaaatgatgggctttccttccagggctggcactcagagaggctaagactccatgatcgaggaatgtctgacccagccattctggagctgttccatcgaattccaagcagccccactccctcctttccccatcccggtcaggggcgggcgctggagccagcaggccgagagggccggggcttcccgcccgggaggtggagccgctgctctgcgtcccgcccctccacctggggctcggcccggcccggcagatgttacaactttttcgaattctctcccgccgtgtcccctcgacccgcccaacttgtgcctccctccccttcccctctggggtcctgcccacctccctgcagggagctgggctgttttaaggactccgggtggggcgagaggccgggaaagcagaggagagagaaattaggaggcgggagaaatccagggcaagaaggaagaggggagtcagaggatggtagagagcactttttggaagctgccacgccgcgtctcaggctggccgggctgagctggggaagagggagcaaaggcggcgcagggcctgcgcttaggcagcgggaggcagctcggcgcgggcctgacctccccagagcgccccgctgcggccgagcagatccggcccagccgtccggcagccagtcccggaccagacactggaccgtccccggggggcgctgaactccctcgcagcatccgagccggcgggccggtggtgcgccctgggcgcgcgaggtggtgaggccccaggagcccggcgcgccgggacgcgcgggccggcttggcgatgcacaccctcactggcttctccctggtcagcctgctcagcttcggctacctgtcctgggactgggccaagccgagcttcgtggccgacgggcccggggaggctggcgagcagccctcggccgctccgccccagcctccccacatcatcttcatcctcacggacgaccaaggctaccacgacgtgggctaccatggttcagatatcgagacccctacgctggacaggctggcggccaagggggtcaagttggagaattattacatccagcccatctgcacgccttcgcggagccagctcctcactggcaggtaggcgtggctcaaggccccggggctgggcatctaaaccccaaatcaacccagttgatagatttctcctgccagtaccaccccatgctgggatctgggaaatctcctgttggctgtgtaatcattagtaagtccctcgccctctctaggcctcaattacccttcctttacactgaatgggcttcatcatctttgaggtcttcttgctttgatgttccaggacactcacattccacacaacgtggagacatctggtcatccctttgttagaggaacatggcagcctctgacatttactgctgcttctatttatggaccccgagaccctgagcaagtcatttaatttctctaagcctcagttttcttgtccataaaatggagcaaagaacagttttcatcttgaaaaggagtggcaaagttggaatgagttgtgtgtaacctgcttggctgtcaatatatggcagcctctatgtctcctgagggattcaggtccccatactgcttgatgaatacattgggagaagaccaaggaattgataggtggaagagaaagacacataggataccatgacctgtgtagccttagggtggttacttcatttctctgagcctctgttttttcatctgcaaaatcctcccaagttggctgggagccccaagtagacatgctgcttcctccacaaggaaatgtccacaggcgaggcagcaggattacaggattaaaagagcagggaaacaggaggtgggggtatggaaggcaaactctggccacttaggagaaaatcctttggcagtgctgaagctaattctccttggatggggtccaaggcatgctttctcccaagttccacccaagagccactaatgtgatctcaggaaccagaagccttagtctccctgtttcttagtctcactatttcttggatgggagaaattgaggcaaggactcagggagg

SEQ ID NO: 10821 - DNA, 6000 bp, Homo sapiens
gagaagcctgagtctgacaggttgaagctaagtgagtcgttgggcagggtggggtggctcacgcctgtaatcctagcacgttgggaggctggtagactgcctgagctcaggagaccagccagggaaacatgatgaaactccgtttctactaaaatacaaaaaattagccgagtgtggtggcgcacacctgtagccgcagctactcaggaggctgagggaggagaatcgcttgaacctgggaggcggaggatgcagtgacccgagatggcgccactgcactccagcctgggccacagagactccacctcaaaaaaaaaaaaaagactccaccactccaccaggcgcggtggctcacgccaataatcccagcacattgggagtccaaggcaggcagatcatctgaggtcaggaattcgagaccagcctggccaacatggcaaaaccctgtctctactaaaaatacaaaaattagctgggcaggctgggcgtggtggctcacacctgtaatcacagcactttgggaggccgaggcaggtggatcacctgagttcgggagttcaagaccagcctgaccaccacggagaaaccctgtctctactaaaaacacaaaattagctgggtgtggtggcagatgcctgtaatcccagttactcaggaggctgaggcaggagaatagcttgaacccgggaagtggagtttgcagtgtgagttgaaatcacgccactgcactgcagcctggccaacaagagtgagactgtctcaaaaaaataaaaaataaagtgagctgtaatggcaccactgcattcaagcctgggcaacagagtaagactgccttaaacaaacaaacaaacaaacagaaaaagaaggcagagtttcagagatatttgcagacccgtgttcatagcagtactactcacaacagccaacagtcagaagcaacccaagtgtccatcaatggatgaatgattaaaccatatgtggcataggcatacaatggaatactattcaatctcaaaaaggaaggaaatcccatcaccggctataacatggatgaactttgaagacaatatggtaagtaaaataagcaattcacaaacagataccacaaagttttaaaaaagaaggaaggaaggaaaggagggagggagggagggaagaagggagagaaagaaagctgagcttaatttctggtctcctggttggcatcgtggctcgcgcgtgtaatcccagaactctgggagttggaggaagcaggatgatcgcttgagctcaggagttcgagaccagcctgggcaacaaagcgaagtatctatgaaaaattaggaaaaaaaaaaaaattagctgagtgtagcgtcatccgcctgtggatccagctactcaggagactgaggcaggaagatcacttgaaccaataacagcaggagtttgagactgcagtgagcaataaccacgccactgcactccagcctgatgaagagcaagaccctgtctctaaaaaaataagtaaggctgagcgcggtggctcacacctgtaatcccagcactttgggaggccgaggtgggcggactgcctgagctcaggagttcgcaaccagcctggacaacccggtgaaaccccgtctctactaaaatacaaaaaaccgggccgggtgtggtggtgggcacctgtagtcccagctacttgggaggctgaggcaggagaattgcttgaacccaggaggcggaggttgcagtgagccaagatcacaccactgtactccagcctgagagggagactccgtctcaaaaaaaaaaaaaaaaaaaaaaaaaaagtacatctgttggagtaacaaagaattcaaccaggactttcctgaaaagttttaccaaaagctgtataggttttaactgtttaggtacttttattatttcctaggagttattataaacggcgtattctatttgcacagttcattacacttttttttttgtttttcctgagatggagtctcactctgtcacccaggctggagtgcaatggaaccatctccgctcactgcaacctccgccttccaggtttagtgattctcctgcctcagcctcccgagtagctggaggttaattttctgtatttttagtagagacagggtttcaccattttggcgaggctggttaccaactcctggcctcaagtaatccgcccacctcagcctcccaaagtgctcgaactacaggcgtgagagccaccgtgcccagccaattcattacactttttaaagtagtttcatgttcaccattttatctgcccctcccaattgccccctaaaggtgaggaacccaggagacttctcattcctattttgaagttacggaaaccaaagtgggacaaaagctaccacactgggccgggcgcagtggctcacgcctgtaatcccagcattttgggaggccgaggtgggcggatcacgaggtcaggagattgagaccatcctggctaacacggtgaaaccccgtctctactaaaaatacaaaaacaaaattagccgggcgtggtggcgggcacctgtagtcccagctacaagggaggctgaggcaggagaatggcgtgaacccgggaggcggagcttgcagtgagccgagatcgcgccactgcactccagcctgagtgacagagcgagactccgtctaaaaaaaaaaaaaaaaggttaccacactgggcacacaattcaagtttcatgagcctgcaattcatgctcaccaactgccacttcatccccttaagctgtcttccagggcaaagagaactctaactaaaaggatgcaatagtgtgattgccaaaacggcagcaacgacttctgtcaaaacacttatcccttgtggccctgagaagataatgcgctaaatgaactggggagtaaggatagtaaggtgtcggggaatgctgacagccatttgcagataagtcagaaaatttctgttgtgcaacactgacccccacacacagttcactcgagcattctcatgatccagttacctggcttgtgtgtgcaccctggctgatgcacaggagaactcccacatagtcctttacctctgctctaagtataattataccaaatgtacaacagttgatccatatggcagttgcttctattcatgaccctcaaacaatgttgggaaaagactgagatacagaatgattttaaagatcaataaaattcttcccccttaaaaaaatctacttattaaaaaattaagcaaaatcttccatttcctaaatcagaggtaaaaagacttaactatggttaatcttgtcctctcaatcttttaatattaagctcagtttaacttccctcaaccagcaatcacttgtgtcatgcccagcggtaatacacaatgcccggtttcttctatcaccataactgtgacctcaggtcctgcgaaacaggactgaaccagttcactaggatggcagtgtattggtccaaaggcattcagattataataacgtaccgcaatgatcatcgagcagttactaaatgtcggacttccctgtcttattgtatacatatcttaatttaatcctcacaaatccatcgggtattattatatccattacttgacaagaacgggggcacaaagggtaagaaaactgccgaagttcacagagcaaccaatgaccaatcaaagactcgagccagggccttagcgttaaccactgcacggtctatccctgaactataatcccagcaccatcagtacactaatcgcatgaccttgggccagtcatttcatacctccaggcctccggtgtggaaagagatgcacttagatgagctttcgggggctttcctgcttttaacgccctgtccctctccaactggattactcgcctccagaataggtgctgtaactgctaagtttctcaaccactgcgtgttctccttctggtacattcccctttctcttcagggaactagggtccagtctccgctttggattttcaaatattaaactgtaacgctagttgtaaacattccctctcggtctaataccacccttccctactactaggggtacctagtaggcccgattccaccctatacttttacccagttactccagcccacctcgcggctgcccaggcagccggcaaagaggcctaagaaagccctagaagcaaagccataggaataagtcagctttcccagaggtcaaagaaggctgtcgggccacctgccacgcctcccgaccccggcggcgcggcctgggcccgcaacccaaccaaagacgcccggattcgggcctcctcgctcacggcgggcgcgtcggccagggcctgggccctcaagagccagcccgacccctcagtcgccggccacgcccgacccctcagccgcagaggcgctcccagccccccgaggtcctcacaggcccgaggacgcgctcaggtctcccctctcacctctagcctcccggggaccgcgggggtgcccgtgccccttcccgcccgcacaccttgccccgcgccgcagtaaagagagaggcggaggcggcccgaccgtcacgtgccgcagaaccaagaggcctcggccaccgctgccgcgcgagcgagccccaccgcacgaagcccggccctgtgcccgcccctggcccctgagtagccacagccggcgccaagtcccgccctcccgcgcaagccccgacatccggttggccggcgtgggcatcgctctacgcaccgtcccatacgccccctacggctattcttcgtggagtgtgaagattggccgggagtgaggcaggaagtggctgttggttgggcgggaggtgaggggcgggccacgctggatcgagaccgccgggcgcgcgcgtctcggggcggggctggtttaacaggcgttcccgcgtcggttgctgtggtgccttcggggcgttccaacccaacccccagtagccctcacccgtctggttcctggagccgagacttgggacgcatcgcgcgcccttcgctgacggggcaaacggcagccggcaaaaggggtaggagtccgacgatcggccatcaggaagggcccgttgcagcgaacgcgggcccctacgggcgtgagcagaacccagcgcgagcgcctggccggattggcgtgcactgctccgcgctgtgtgagccggcgccgcagttcctgcagagtcatggctcggcccaggagcctgcgcagcctcgtcgcccagcataacacacagtccagaataatataatccgaggttatttgaactttcaatttatgtttcctgaagtgagattaggtgtcagggcagagagatacagggatgacaggacgagagaaaggatggtgccatggaaagatttaagatacgccaccattttagtaacccactcttagtacatcttcagttttcagtatgctgagaacctcacaaaatggaagtggcccagggtttttctagacctttagagatcctgatctcttgttctctatttgtttggacacccaaaggcttgactactagggtggaaaacactagaatcagcgaatgtatcactgatctgaaaagccctcttgccaccgggaaggggaagaaaggcagggtttggtgtttgcatgagttagtatcatccaaccctcaacccccaaattttttttatttttatttttttgagacgaagtcttgctctgtcgctcaggctggagtctagtggtgcgatcttagctcactacaacctccgcctcccgggttcaagcgattctccctcagcctcccgagtagctgggattacaggcgcccgccaccacgcccggctaatttttgtattttagtagagacaggtttcaccatgttggccaggctgacctcaggtgatcgacctgcctctgcctcccacagtgctgggattacaggcgtgagccacggcgccccaacttcagccccaaaatttgtgtaggagaattttggtttcctgtctacctggggaagcagctattcaaagcagaataaaa

SEQ ID NO: 10822 - DNA, 6000 bp, Homo sapiens
ctccccacaggagcccattaataggattacacgagagatacaaggaatcaaagtaggtgcaatgttttgaggcaccatcgtcagagataaagacagaagcaaagtcccacaaggtcatggacctggctgagtacaaacctgggacaggtgtcagaaagaggaggcctctgggcatctgactgtgcactctgggcaccatttggccaccagtcctaacaaaggcagtcactgaggactcccgtggcaagcggcacctcctgctcaggctcctcggagttatttgttaaatgaatgtgcaatgcagagacaatcccctgactaattcactgctgatagtggggaaggaaaatccatgagcaaagcagcctgggttcagggaatactgaacaaagctgcgtgggtggagagaaagagcatgaggtcaggcacagtctgcaaagccccccagcgactccgacacagttcagagctaatgcccttgactccgggagacttttgctgtgtctagcaaagcaggatttacaaacgagggtagagaaagaccagtggggaagagtgaagaagcccagcaagaaccaacacagatgatgaggacctgggttacagcaccagcccagggagacaaaatagagggccagggaacagggtaaatgcagcggggcgtcactgtaatcacagagcagagggcaaaggtgataggagtaggcacaggcttcggaaggccctagggaggcctgccaggaggctggggaaggcacctgcctccaggggctgccaccatgccagacgccactccatgctctacatgactagggccccagtgagacgctgccgcccctgcacccaagaacccaagcgccctgggatcagaaggaggcttcagcacagataggaggcaggcaatccttgtcgctaccgtgagccctaaagatgttcctgaaaatgtcctttgccctcctgggggaactggtcaggaccacagctcgtcctgcgtcatggctatccccccaccccagccctgtccccttccaggcagcctgtccttccctccctggtgtttgtgtccaaaagaccccatagattctccataacctgtcttttactcctcaactcaaagggaatgtcttgtcactatatccccagcacaacgccaggtccagaaatcctcactggcacgtaagtcttccttaagtgtttgctgaataaatacatgaaagcgcaccattccctctatcccttccttcacctttcctccctccttgacctgactgtcctgtactcattgttcccagaacagtcagttgctctgggaagagctgtagctctgctgctgccttcaggcctcatggactgtggaaagtccctggacctggctctggtccttgccactcccaaaagaggctctagttccccaaggcagggcccaacctcactccagcgaaacctcacaggtcagcacagggcctgtgtgcacacctgtcaggttgtgtaaggtggtactggctctgcctggccagcgcctcctcaggctcacttttctcctgcctttcataagagtcatccttgtacccacagcctcctctcaccgggtgtggtgttctccgttctctgcagggccctgtgcaaataaagggctccaggacgcttccaggggctgctgggatggtttgtgttcagtgctaaatgctgtttccactctggttctcttccaagtgctcatgacttagatcaagtgactgtttaataaattagttgcttgggtagaatggaaaatgtttatcttttctatttggaaaatgtaaatgtccccaaaccacatagactatgtacacaataacatgtacaactcaaaaaaaaaatagcctagcaatttaaaaaaaaaactatacctgacccagccaatcctcttggagcagcttttaaactattagtataggaagtgggctttcatcccagcagctccttatccaacagcctcagggaagacagcagcatgctgtgcctccgtgttctactctgtatgaatgagctgttcaagttctatcattcaaggtgactctggccctttgggaggctgcattcatttttctgcttgagtgaatgtaggtacaatgaaacatgatgtctcaagttaaaaagcttccacttgggatgtcaggcaaaactttgtcaagtgttcccttgatttccaacaccacagttttgctggcacatgaggctggcagcagtgcacatgaatgacacacagagtacatgtctggatgtgcattcacagcaatgcaaaatagtgctaggtattgtgtactgagcacgcagatgcgccagcaccatgcaagcattttagggagttgcctttgctctaaattcatgtgatcccacaggggggttccatcaccatgcccattctacaggtggggaaaccttgctgcggggcagcttagtaactcatccagggtcatgactgatgggactaggatagcaccgaatactctgacctgagattgcttttagccataaagaaacagacatacagcttctggtatatttatggaaaagtatatacaaacagcaaagtctgactaatattcaaattgtagcaatggttgatcccattccaaaaaaaaaataaagcaatggtaaagagtttcaggcacacagtactcactaagcctctgatgaatgttgacttgcccttgtttaaagtgcaagtcatcaaagcacactgaggacacagactgcaccagttacagggtaaggtgctggttttcagggaactcaggtaccaaaaactgtgctgggtacaacactggttccaagtagtggagctgtgtactttctcttcgctggaatgcatgacaccaggagaaagaagagaggcttataaacacacactgagttcttcctgtctctctgggaagtgagtgttttaaggtgggaccccaaatcagaaaggttgggtaaactgcccatagtcacacagccagtgagttcaacttccttgggtgtagagacatcctttttaactgtgaagctttccagagcctgaatgaaaacgtttaaaatttaattttgaactttcgacctgtcgtttgctttggctgtgtaaaagccaaaagatacgacctggagagaaccccaacttattagaaggcttgaagatttcagacacagccagttttcaaatattcaaaaaaacaaaaaccttgaaagatttagaagtcatctttaagacttcgtttgtttaaggtttaaggttgctggctttccacccccacaatcctggggtcccttgcataaggtggacatgaaagtctctgaaagtgatcaagcctataaggagaaactgctaggcagttttaggacagcaggtttccagttgcagctgatcacttggctgggagaaaacagctccaccatcaccaaagataccaaaaggggaaccggcagaaaggagtagaaaccagtggccctcaagaccgaccatcagcattagactctaggccaaccccctcccccccgcccccacagtcgtgatctaagggaacaaaatctagtcttcatttttattttacatttttactttttaactctttatttttatatatttaattttgagacagagtctcgctctgtcacccaggctggagggcagtggcgagatctcggctcactgtaacctccgcctctcgggttcaagcgattcttccatctcagactcccgagtaactgggatcacagacaggcgccaccgcgcccggctaaggaaaccaaacctaggaccactgagtggctctttccagatcagtttcatcatgtttttttccatcactcccttccagtcctttgtttcccgccctttccagacgaatcccttctggtttccaaactcccggggccgggggactcggggaagggcacccgtgcagatgggggacgccccgggggatctggcagggagagggcatctgggtgggggaggcttcggggagagggcaccgggcagtgaggggagggtcggagaggacgccgggccgggagtagggtagggggccgggggccggggacgttaccgatgcccgtagtggacgaggaacatggccaggaggatgcagttgggcgcgctgcggagacgcggggcggactcgctggcgtactggtagagcggcagggccagcgagggcagctcctgcaccacccaggcggcccgcgccggcactcggagcctgtggctgggcagcgcgtggcggccgtacactgagttcgtctgacgattgcgcgcgaagaccgcgcagcccacggcgcactgcaggtaggcgagcgcggccagcaggcgctcctccgccacccccgtcgccgttgccatcgccagggctgggcagcgtgctccatgccccagaggccgcggcgggcaacatatagggcggcggcgcgggggcaggaggggcggctaccggaggggcggctaccggagtcccgcactgccgggactctgcagaaagggttctcaagtcaggcttctccggggtagccggggctgtgggtgcggccccgggggcggggcgagcacttgcgcggggagggacctgcaagcgccccacccacgccggggccgcagtaaccccgcgccgctctgcgcacgcgcggcttcaggctgtccgcggagctccttgagcccgcgtgggaaacctgggcgcttcgcgcggagacgcctttgtggctgcttcctggagcatttttttccccttagagctgttcgctgttttccctgtcacgccgcttttctgaaagacgggttgtgcgctttgggcttattcctggacggtccccaaaggtccccgaaaggaccaggcccggacacgtggggccttggtttccggccggaagtcccgggaggtgtagggctagagttctggccgtggcgggccggtttctgcgtgctgcgtgcgcggccgcgtgggctatggggcggcggtcgcggggtcggcggctccagcaacagcagcggccggaggacgcggaggatggcgccgagggtggtggaaagcgcggcgaggcggtaggagccgggacccggcgggcgggccaggggctcctcctgggcttcccggaccccgaggcctgcgaggcggcggcgagggggcggctccttgggcctcggggtagacgtctctttccttcctcagggctgggaaggaggctaccccgagatcgtcaaggagaacaagctgttcgagcactactaccaggagctcaagatcgtgcccgagggcgagtggggccagttcatggacgctctcagggagccgctcccggccactttaagaattactggttacaaaaggtagggaggcagtgcctgattttttgggagttggggccaggatgctggaggttaaaggcgacggtgttttcttcgacaagtgttacagtgccagagaaccgtggcgtttcagcggtttggattcaggaagcattgaggtggggagcacagggtccaatgaaatggtcacggaggtattgcaggcgcaaggttagaagacgaaatgaaaatgagatctgaggaagattcggctcctggggaatcttccaggagggaagctgagggtcttaccttttggaacgtaagagaatttatagagaatgcataaaaccccttggttctcccctcctccgcgccccccctccatctttgtagttacatctttctaaatgagtcgcaagtaaaacttaacggtaggatatgcttaggagagaaggaatgcagtgttgctcttagggctcaaacagtgtggattgcttaaattttgaaggcatacagtgtaaaagtagtgactaaagaatgtttactctccatgcaaaagttggttttagttttaaaacacttgcagtcttaaatttaagaagatacaatgtattaacttagttttttagatcagtttgaaacttccttatttttcaatagccacgcaaaagagattctccattgcttaaagaacaaat

SEQ ID NO: 10823 - DNA, 6000 bp, Homo sapiens
cgtggacttcctgcgtggacctcctgcgtggacccataccacgggtcctgcaatccattctccacaatgcagccgtatggcttccttaaacacctgtggcctttccattaatcagtaattaattataatgaatgatgctgaagcagagagtgtgggagttacggtaagagccagtggtcactaaactaggtgaccaagggaacatgtagagttttctcttccaaatagaaagacctgctcattagagggatatggcctggctgtcagagagggcaccagagtgggattctctgcttccacactgagtcccacgtgtctttgccagctactgaagcttgtggggcttgaagtgtgggtaacaccatgctggcctcagtgggctgcacagaggaggcagaaggtggatgagaggggcctgccactggggagggagagcactcttgttgggcagctgagaatgacctccggcaccaccatggaacccgctgaagatgttgctgcctcactgagcctgtgtctgcagagaggatgttctgcaactgaagctgaccttgcactatgaaccgttcatattaaccattttggatggaaaccttaaaaaacagatgatgcctttctggctttcttaaaaagagatcctcaactcttaaaaagagatctaaactcacttctgtgcggaacggtgatttggcgatgtttctgggtctgttcaggtgaatatagttcttggctcctgcaccgataaaccccaaactcccaggcttttggaattcatcagtttgaatttttgtttattcttttgtttctccttaatttttcactgtgaaacatgtaagcatattttactataaaataggcaagtgtctcactttcttatatattccatctgagctgcttctaatattctcggactgggaaaggaaatgattggccttataagaattgtgaatgaagtaagagtcagtagacttaagagttaggaaggcctgaggagctctcctctgagttaagtgattgaactctgtgatattttgagtgttcagaggccttctatgttttcttttggtctttgatttgatcctgcctagacaaattgacccctagagagaggacgacagcatgcataatttatgcataaggtctttgccaagggcaataaatcagaaggaaataatattggtacttagataattttagttcaaagatggccaaacatacacatatacctagccactaacatgcacacacacacacacacacatacacacgaatagcaatgacagacaaagccacaaaaccaactaacccagtttttcacttttatatctccgctccctaaaaagttgtctgggaacaaatgattaaaatcttaacattttcaaatgggaaagagctttcacagtcctttcattttgcttccctctttttagttcaggaatctcttctattatctcctggatagacaggcactttaacccccttcttgcatggatccagtaatgggaagctcagtactttctgaagtctgatttcatcaatggaaatctgtgacaggaagtaacaaaactacaccctgccacatctgaaatgcattttgtatgcagatattaggctttctgtagtgttgtaatgtggatgtcgtttgggggttaagggaggagatcacatctgtgagaatggggggacagatctttcctgtgtggggtggacattcctcttgtcaattgtcttggaaacagctgagttctgagacagaaactgaaaaggctagtttagcttgctggagagggaatgtctgtgtctctaagtcttaattcttgggcctgaacttgagacatgttggagttttgagagtctgtgtaggttggggtagggctgatggacattgtcccagggaagacggcaggtaagcaccttgtcttgtagagaacacaaagggaagataagtgagccaatcttgaaagctatatgaccacgattcacattacactttgtgtttattccctccttgtcatccttgagcctttggaaatgtctggtttaaatgttgcagcctggcctagctgtgtaatggcatcactggaattgctgagggtcagtgtttatttccttagaatgatagagggaggatagtgctctctgaggcctctgtggattttggtgattatggagactcttaagaaaaaagtgagtattggggaacaagagttgggccctaagtccacccactcccctccacatggtgattcaccaatcactgtcatccttttattaagcaggtggccggatttcttacaaaagcaatcccttaaattggtccgaaatctgttttcctgtaactttcacccacaggacttagtccttcctctcaaaagcacagagaacaatcatcgtaaccattcacattcaccaagtgcttactgtgtgctgggcactttactgagcattgtagtagatcttatatatactattatcccattttacagatgaagaaattgaggctaagggaggtgaaataacttgtgcaaggccagaccccaaatgagtggcaggatttgaactcaaatagtctgatagcagagcccactgtcttgaattctgaaatactacttgtctcagtgacagccccacagaggtctgccgcctgtgacctttcctccctgggccttttttgatccaggtggaacccccaccccatccccttgctgcttctctttgtgcttggagtagaagggaggcagccctgcccagttccttttgccctggggcaatagaaagaatgcaaaaccctagtccacctgacctctggtgacttgttccacttcgaccccccaggacagacagccttgtggaagcctctggaagcaccattttagcagccttcccctcaggaggctgtatttttcctgtctgtcctcaacatgtcttctgccagaacaacaagctcagttttcccttctgataaatctggtcaccctaaatatggggctttgagcaaatgggagcggctggccccacgcagccctcatttcaaaatgcagattcacacgggctgctattttggaggtctggtttctttccccacacgcagtggttttaagtaagagggaagggatcatgacagaatcttggcaggggaaagatgctaggagagaagatgcacctgggcagtctttgcttcccaaagtccccaaacactggcccttcaagaagctggttggggggtggggggagcaggaaagagggtccatggtaacataacactgggaaatacagcctaaccagcccctcctgcagatcagcagtgtgcatgttaaacatttgaaatcctagaagtaaagaagcctaactggttttgtttagcccagtttttccatttaaaaatgtagcctagtaaaattttgcaaaacaatgatgcagagcagagcttgcaaaccggcaccgatggtctgatatattcctgggagaggtctgatttggcctacaaagtgcttaaattttgctttcaattagtcactaacatttcacaattggaatagttctcctaatagataaagagggtattcctcttgaaaaatcagaagatctggaaacactggtccgtattcttgcctgactgtagtcagctggaagccaggctgtggtttttaacttgctgcagcccctgtgtctccttagggcaagacaactatctcttgctctactcatttatgatgctcatcgggttccagagtcccccaagcttgccttctctggtgtggaggtttccttgggtaggctggcctaggtgaccattggggcccattcatccattcactcatgcaacatatactgattgagcttatactgtgtgctgcaccctgtggatacgagatggataaaacagcccctgccctctggattccagcgctggcattctaagattctagttgggaactgcagaacgaggaggagggaggggttgaggagaggggagctggcaaggctacaaccaagcttcctgacttgcagccgcgggggcttgccaaagtgcttgccattctccatcgctttctctaccggctcaccgaagggagccgccactccaacagccacggtgagccttagagacatagccactgacttgttctgtgacttagacgcgttgaggctcatctccgggcctcagtttctccatctgtagaatgacccggttggactaggaaatgatgggctttccttccagggctggcactcagagaggctaagactccatgatcgaggaatgtctgacccagccattctggagctgttccatcgaattccaagcagccccactccctcctttccccatcccggtcaggggcgggcgctggagccagcaggccgagagggccggggcttcccgcccgggaggtggagccgctgctctgcgtcccgcccctccacctggggctcggcccggcccggcagatgttacaactttttcgaattctctcccgccgtgtcccctcgacccgcccaacttgtgcctccctccccttcccctctggggtcctgcccacctccctgcagggagctgggctgttttaaggactccgggtggggcgagaggccgggaaagcagaggagagagaaattaggaggcgggagaaatccagggcaagaaggaagaggggagtcagaggatggtagagagcactttttggaagctgccacgccgcgtctcaggctggccgggctgagctggggaagagggagcaaaggcggcgcagggcctgcgcttaggcagcgggaggcagctcggcgcgggcctgacctccccagagcgccccgctgcggccgagcagatccggcccagccgtccggcagccagtcccggaccagacactggaccgtccccggggggcgctgaactccctcgcagcatccgagccggcgggccggtggtgcgccctgggcgcgcgaggtggtgaggccccaggagcccggcgcgccgggacgcgcgggccggcttggcgatgcacaccctcactggcttctccctggtcagcctgctcagcttcggctacctgtcctgggactgggccaagccgagcttcgtggccgacgggcccggggaggctggcgagcagccctcggccgctccgccccagcctccccacatcatcttcatcctcacggacgaccaaggctaccacgacgtgggctaccatggttcagatatcgagacccctacgctggacaggctggcggccaagggggtcaagttggagaattattacatccagcccatctgcacgccttcgcggagccagctcctcactggcaggtaggcgtggctcaaggccccggggctgggcatctaaaccccaaatcaacccagttgatagatttctcctgccagtaccaccccatgctgggatctgggaaatctcctgttggctgtgtaatcattagtaagtccctcgccctctctaggcctcaattacccttcctttacactgaatgggcttcatcatctttgaggtcttcttgctttgatgttccaggacactcacattccacacaacgtggagacatctggtcatccctttgttagaggaacatggcagcctctgacatttactgctgcttctatttatggaccccgagaccctgagcaagtcatttaatttctctaagcctcagttttcttgtccataaaatggagcaaagaacagttttcatcttgaaaaggagtggcaaagttggaatgagttgtgtgtaacctgcttggctgtcaatatatggcagcctctatgtctcctgagggattcaggtccccatactgcttgatgaatacattgggagaagaccaaggaattgataggtggaagagaaagacacataggataccatgacctgtgtagccttagggtggttacttcatttctctgagcctctgttttttcatctgcaaaatcctcccaagttggctgggagccccaagtagacatgctgcttcctccacaaggaaat

SEQ ID NO: 10824 - DNA, 6000 bp, Homo sapiens; identical to SEQ ID NO: 1155

SEQ ID NO: 10825 - DNA, 6000 bp, Homo sapiens
aacacaaaaggcaactgggagcagtgaatcacacctataatcccagcactttggaaggctgaggcaggagaatagcttaaggccaagaatttgaaaccagttggtcaacatagtaagaccccgtctccacaaaataaaaattttaaaactggctgggcacagtggcatacacacctgtagtcccagctactcagaaggctgaggtgggagaatggcttgggcccaagaattcaaggccactgcagtaagctgtgattccatcactgcactccagcctggatgacagagcaaaaccctatcccaaagaaaaaaaaaaaaaggtatacaagttctcaccttctaatggctttcaatcaaatgcttatttaaaggcattctcactttctcacttgataaatgttacataggcaaaaagataaagttttaacttcactttcacattttccatcggagtctcaatttccatattttaagagttaatattaatctctacggtcatatgctacactaattacttaaaaagtgatcatttgttatacaaaacctgactcattaatttacttctccagatccaaacatcagactaattaataagacaaccctattatacacaccatagatagtaagcaccttgtgaaatctgcttgtaagaagtgatgactaatttcagggagaccttaacaaagtttctcctttccatctgctcaaattcttccaagttatcataaagcattttcaagacattagtctctgaccaacctctcattcacagtggaatttttattaattttcttagctgagatttattaaccctgaaatatacacacaagtttcaacagattaggccccctgttgcctctagtcctccaaggaattcctcccagaagcagaagcaaggcttcggagtgcttcaggatagacttccaaagaatatcttagaggcaggcagctgttccggggtgagagaaactggagcaccctcggccagcccactcttgccccagagtccagccaaatggtggaaaacaccagagttgtgagagaagagaaaaagaacaaacccccgctctccaaaaaaacaacaaatagattgctctcaatctaggatggtctttaaaaatatcttgtttacaagatagacctaaagcctagtgaaggttccgtatcaactgaaaccaactaaatgggcaatttagaggaacccaatacctatctaaataaaccgttctactagataccaaaaaatgacacatagtgaccgacctgcttggctctactaaaactcaagaattcaatacccaaacttgccaaacaaatgtattgcaacctccttttgctatgtttggtattattaagaataagttagaagcagtgaaaaaaaaaagaatcaactcaagttctggatgctggactacacaatggttttcattataatgtttagctctgaaatgagctcaaagacattctgggaagggtataaatctctagcagtaaatgtttcagaaaaaggaccatattcattatggcttcaaaataaaagttcctttagtcataagctaaggtaccagagagcaacatgctctatacagggggcaaccaaccccagggccatggacctgttaggaaccaggccacacagcaggaggtgagtggcatagcaggtcagcaagcattaccgcctgagctccacctcctgtcagatcagcagcagcattagattctcataggagcacgaaccttattgtgaactgcgcatgccagggatctaggctgcatggtccttatgagaatctaacgcctgatgatctgaggtggaacagcttcatccccaaaccatcccccgaaacccccgactccccccatccccacccctgtctgtggaaaaactgtcttccaggaaaccagtccctggtaccaaaaaggttgaggatcactgctctatattttacatcagatctttccataagcaaatggcagcctaaacagtaggcaacagattcctaagaggcaagacaactcagtggctgggagcctgggctacaaaggctacctgttcaaatctcagcttgcagctgtgtgatcttgggcaagctaattaatctctccgtgcctcagtgcctcagtcccctcgccacttaagttttaccctgtaagatacgaaggctaatgtcacacacataacggttaagcttacagaggggtcttagaatgtctatctgcttgaggattcagtggccgtccaagcacttaaagaataccttctttctgcagtgaaaatccagtacagaaaatctgagaaaggcaatcttaaatgcaaaatgttccacctcccagttgagtaccaacagccttcccctccagcagccactttgacctttcatcaaatgctttacgcttaaagcagaacttcagcctctcattgaggactaaggatagatattacaatactggaattagctttgcctaagatttctcagtaactgaatgagtcactcatgtctttagattctgaacagagaaaatgtcaaggttgccagaaaacccaggtccagatgtttgcataaaccattttcaagtgatcatcaagccaaagccaaaggacattattttagaaaacactttaagtaaaaatatcactttttatgattttcctgtaatggaggaaaatctgaaaatgaggttactggagggaaaaaaattacagtaatttcaaccccaaaattacacaacatatcaagctaagcttaaaactccttacctttttccaactgttttcttcaacctcatcaagaagcactggacaagctctgagctcaagatttaaagatgccctcagtgcttgtttctattttctctgtcatactacctaggggaagcagaggcttttaaaattttgatacatctctctgcagcaagatttttaaaacctctcaccgacaaaacatgttgagtgctctgtattgatgacagcatccataaaagggtcttttttcactttcacaataattccagtaaagtttttactttaatctcaattaaattcaagccatttgctctagcataacacaaaaaaaatggcaaggatattctttggtcatttaagttatcacaaaagagaaaaaaatatatatcaacttcacgtctaggcttctctttctcgtaagtcaagtaggaatagttagattgccctgtcagggtttgagttcttcaggttcattcgttacagagcacactacacactacacaatacccagtttcaccgcaatttctgaagtgcacgggttatattggcaagtaacttgaaactgaactcgcacatgccgcgcggtggatacccttccaaagggaacagactgtgtccgctttgcttatttttggtaactttaaataagactttggatgggtcgtcttcccaactcatttaccaatttaaccactggacgcaggactgagcgccccacagctttcggccggagtataacacgcgcttccccactcggttccccctgtctgccacaaacaaaccagatgtaatagctgaagaatgacgacactaaaatcaacctagagattcacatctaaaagggccgcaacacgaaataaacttctctctcttcagaggcagcggggaagaaaaagaaaaaaaagcctaggtgggttcggtttgatccatttccgcgactccgtgcgctcaggggctctgggctggtgcgggcggcttaaccctgtgagagccgagaacgaccccaccgggatacgcgggccccgggctggcggggggtgcctcacgccgcgcccgttcccccgccagcaggtgcccgaagccaccccaacaggccgggtgcgaatgccggaacatggccactttcctgagcgggatgatgccgccgccgccgccgcacgccgcccagcactttgttaacttggcgcgcccgggcgaggtggctcccaggaggtgatcattgccgtccgagagctacagagcccctggcctcgcccagcacgggtgtggggccgcggcgggaggaagaggttgggtagcagccgctaaccaggggcccgcacgcctggcccctcggagccccgcgcccccttcccaggtgcttacctgagggaaggagccctcgcggcgcgggttcctggggtagtctaagtgaccccggtccagcatcaggtagagcgagaaaatcaccacacagaagatcgcactgccgaacacggtgaactggcggcttaacttcattttcctcgatagactcggggccaggacactctcctcagccaaaggagacagcgcactgtggactctaggaagcagccgccggaggctcccttctcccgggctgcgcgacctccgcgctctcggatgcgggtgcgagtccccgccttgctccgcacctagtctccggcgccaccacacgcccttggccttcgccctggcctgccgccctccccggggtcgggcgcccctctcgaggcgagactcgccggcaactgggaaggggggcccccacaaacttgatcgcaagctcagcgccgacctccggcagggcgcgcggggcaggcggaggagaggtcgctgcccgcacttcctgccaccgccgccccaactgagtcggcaggaaaagttttctcgacgagggcaggcgtgtcctcctcacccaggggaggcgcgggttcggcagctcccgggccggggccgcgcagctaggtcagagaagcggaggggaaaggaacaagatcgcgaggagccaagccctacaacttctgggcgggacggtcgggcccgcccccgcggcaccggcaccgcccccgcctaccccgactgagccccttcgtgctgctgccgccgccgccgccgacgctgcggctgggccgatgtgcaccccggactccggggctcacggattgatgagtttcctcagagctagcgtccgctcgccagactctcccgccccccgccgcccctaccttccccctcccggacccaggctccgcggggaggcgcagggggcgggcggcggcaacgcggaaagaaggaaaaggagagcagggaggaaaggaccgtccccggagagaagcccgctccagctgcagccgctagccccctccctctttcccgccccacaaacgcggagatggcggcggaagcggcgaaaggaagcgccggttctccagcgccacttggcgctccagcaccgcccgccacgagcaggaggagacagcggcggcgcagcagccgctgggtcaataggcgcccgcagcgcctgagccgagcgggcggctggccccgccccctcccgacgctccgagatgagggggcgggccccacggcgcccaatcacagcgcgtcgcccggcggacccgccccgcgcctgcctcccagtgtcccggcgataggaagacctcacagggctcttgtgacctggcaggcagctttctgggagttgaggccttcgggggcgttcaggcgccagcacccccacgtccaacaggggttgagcttacaccccacttccctttgttgctcaggtttcctatcctaggacactcgggcctggcgtgcctggaagagtacttggtgacgggctggaggaaatgcaagagaagagggcttgcacattctcttcgggctcactatttcctcctttggtgacagcctgttaaaacctgggggaaaggagactgacaaagggccgtccaggcacatgtagaaacatctgactacgaaatccatgagtgtaatctgagaagtgatgcttctgccagttattgatttattgcctctcagctccaaattcgccctttttgactgcactgtaaaaacggatctgagccttttaaacagtttttcgtttgccttctgggactgaagctttatcagcagagggcgctgaagagacattacagaaaaaaaggattttgcttcctgatttctgtgtattgataagcttttgcagcatacctggctttctccactgccaaggtcctatagtgctc

SEQ ID NO: 10826 - DNA, 6000 bp, Homo sapiens; identical to SEQ ID NO: 3051

SEQ ID NO: 10827 - DNA, 6000 bp, Homo sapiens
atattttttctttacccattcatctgttaatggatactataataattaccttaattgtggatagtttcacaaatgtatatatatttcaaaaataccatgtcttatgctctaaatgtgtgcactggccgggtgtcgtagctcatgcctgtaatcccggcactttgggaggccgaggcaggtggatcatctgaggtcaggagttcaagaccagcctggccaacatggtaaaaccctatctctaccaaaaaatacaaaaattagccaggcatggtggcaaaggcctgtagtcccagctacacgggaggctgaggtgggagaatcacttgaacctgggaagcagaggttccagtgagccaagattgcaccactgcactccagcctgcgcaacagagactccatctcaaaaaaaaaaaaaaggtgcagtttactgcacatcaattatatcacaaaaaagttgttaaaagggaagagatgtgacttttcttaccaacccccttccttcttgttgcatggaacaaggatgtgatagctgaaggtcaagcagccaccgtgaaccataagataaccagaagataaactatgcactgaggaaggtggaacagaaagagaatatcctgagcctctaatgtcactgtgaagttgctatgagagctgtggactgcctagacttcctgtatgtgtgacaaaaaataaactcaagttttttttttttttttttgagatggcgtcttgctctgttgcccaggctggagtgcagtggcacgatctcaaatcactgcaagccccgcctcctgggttcacaccattctcctgcctcagcctcctgagtagctgggactacaggcgcacgccgccacacctgatttttgtatttttagtagagacggggtttcaccgtgttagccaggatggtctcaatctcctgaccttgtgatccgcccacctcggcctcccaaagtgctgggattacaggcgtgagccactgcgcccggccttaaacttaagtttttaacccatttctttgttgctattgctttctatatagtgtttttgtttttatggtggccacatattacttcaaaaattagatttaaaaaacaaacaaaaaaaatgctaggaagcatgacaatcagcaaagtactgaattgtttataaatgtggcaagagagttaaattcataatggatgattcaaaagaaagggggtgaggggctgataccgagaaaggtaaaatgatgatagttctaggctgggagtgatggctcacgcctataatcctagcactttaggaggctaaggtgggaggatcacttgagcccaggagttcaagaccagcctgggcaacaagtgacaaaaaacacaaaaaattagtcaagcatggtggcaagggtctgtattcccaactactcaggatgctaaactgggaggatcacttgaggccaagagttggagaccagcctggggaacatagtgggacctcgtctctacaaaaacataaatatttaaattaaaaaaaaaaaaaaagttcagcctgggcaacatggcaaaaccccatccctaccaaaaaatacaaaaattagccaggggtgatggcatgtgcctgtagtcccggctactcaggaggctgaggccggaggatcacttgagcccaggaggcagaggttgcagtgaaccacgatcgcactactgcactccagcctgggtgacagtgagaccctgtctgcaaaaaaaaaaaaaaaaaaaaaaaaaagtcaaacataataaagttactacataacccagcaatttcactccttgaataaaaaactcaagagaattaaaaacattgtccacaaccttgtacacgaatgtgcacatcatcagcattattcataatggccaaaaagtggaaacaacccaattgtctatcaagtgatggataaataaaacttggtatattcatacaacagattattattcagctaaaaaaggaattaagtattgatacatgctacataagaatgaaccttaaaaagtgttatgtcaagtgattaaaaaaaacaaaaaaaagtccagaagagcacgtatcattccatttgtatgaaatatccagaataggcaaatctacagagacaagagagttggctgggtatggtggctcacacttgtaatcccagcacttttggaggccaggactggtgcattacttcaagaccagcctggacaaaacctcatctctactaaaaatacaaaaattagccaggccactcgtggcgcatggctgtaatcccagctacttgggaggctaaggcacgataatcgcttgaacctgggaggcggaggttgcagtgagccaagatctaactactacactccagcctgtgtgacagtgagactctgtctcaaattaattaattaattaatagaaagtagatgagtgcttgcttgggggtggtgaggaggggacaacatggactgacagttaaggagtaaggggtttttcttagaataaaatgttctaaaattagattgtggtgatggttgcacaactgtgaatatactaaaaaccattatattgtacattttaagtaggttaattttatagtatgtgaattatatctcaataaagctgtttaaaaaaagaaatacagctggcctggtggctcacacctgtaatcccagtaggttgggcggatcgctcgaacgcaggagttcgagaccagcctaggaaacatgatgaaacccccatctctacaaaaaaataaaaaaaattagctgggcatggtggtgtgcacctgtagtcccagctactcaagaggctgaggtggaggatcatttgagcctgagatatggaggttgcagtgagccaagatcacaccactgccctccagcctgggccacagagtgcaatcttgtctcaaaaaaaaaaaaaaaaaaataggcctggcagtggctcacgcctgtaatcccagcactttgggaggccgaggcggacagatcatgaggtcaggagattgagaccatcgtggccaacatggtgaaaccccgtctctactaaaaatacaaaattagccaggcatggccaggcgcagtggctcacacctgtaatcccagcactctggcaggccgaggtggggggatcacctgaggtcaggagttcgagaccagcctggccaacatggcgaaactctgtctctactaaaaaatacaaaaattagctgggcgtgtccgcaccactgcactccagcctgggcaacagaaggagactcagtctcaaaaaaagaagaaaaagaaaagaaagtctacttacagcttaatatgattaactatagaaatctaccgatgtgaaagagtatctaacaatttctaagacccagaaaagctgacatcctagataccttaccaattttgatcgccacttctcatgacagaagatgctaaacatagcttctctcggatggaccatggctctgtggggccagtgcttagcagcttgtgttctgggaaagggagaaaaaaaaaaaagccttggaaacaaccactgagactgtagtgctaagctccaaaatccccaaaaagaggactaaaagcctaatacaaaacatcccaacttgttaggacaaagtgagctactataaccaaatcttgattttcacctctccaagtgaaatatcaccagtgaccggggtacctattcgttgcatgtgaattattaacattttatttcttaaaacgccatggcttgaagctccgctttattaagaaacagggaatgtcagattaggcagttctccctaaaagcccagttttaagaatactggactttattccagtttgaacttattcagggcttatttcccaggaacccgagcggccagcccctcctactaccccgcctccctcttagcataaacttgtttacttctctcagatcctctactccaaatgtcgggggtaaaagagcttttcagtccaaaaaaagaaaaatggctgaaatccccgagatgcaatttcctgagtggcaagaaaagctcatggttaaaagaccccacttccactgcctcacaaacgtcagacaaaaaaatgaatggctctttgaggtgccggttactccgtctggctcataacatcttttcgtctgcacgcccaagtttctagagtgcttttacggttaacccgcagagttcctaacacactaggattcactaagctgcttctctcacacctccgctctctccctgagaaacaagaccccagatttctgggcccccaaacgttggtcttcacgatgctgtagagcgcaggtctctgaaaaccctgggctctcaagcaacccacttctcccactccctaagcgtgtaacaaaaatatggtgcctagcctcggatctacaaaggcctttcacgcaaaacctgctcagatactcactgcccgttcccgtcgccatcttggccccgaagtctccaaccctgaggagagacggtctggaagggccgaaaccctggaattctgggaaatagtgtaccggcgttggttcgcggtgcctcctgggaaatgtcgtttttccccttaagacaaagcaagcaccctaaaccagttaccctgtgcactcctgttaagattgttgctaaggaaggacaggagttggctgctgaagcctcaagatttcctttaggctcttaggtaagaaatgtctaaggttcaaggaaaaaggttaagttggaagaatcccaggcaaaataagtgcgaatccacgacagttggtaacccggacccacattagaactcagaggtcaagcagaagcgaacgactggaattccagtcaggcccgccccctttccttacgcggattggtagctgcaggcttccctatctgattggccgaacgaacgcagcgcgtaatttaaaatattgtatctgtaacaaagctgcacctcgtgggcggagttgtgctctgcggctgcgaaagtccagcttcggcgactaggtgtgagtaagccagtatcccaggaggagcaagtggcacgtcttcgggtgagtgtgcggctgtgctggagcccgggttaccagctcttgcccgcgcggaataggctttaagaaatcggagctgcagccatctgtttttctcttaatgctgcatctctgttctcacggtggtccttggggtgaggttagagaaggagccgagggatcctgacaccacctccacagcaccggcgggcgaggtgccctactttaggcgtagccttctgcttttggagccagatgtctgtggacttctgttcgcgttcagaaatgccgcctcaaacttctctcaattgttcattaagtgaacttctctcattcccttcccctttgccgataattggaggggaaaagaagtaggaagcgggacacggtgtcctggggcaagggacttattacctaaaattcgcggccccttctgtccctaaaggttcttctccctgcccactttttggtctctttttagacctaggctgcccctgccgtcatgtcgcaagggatcctttctccgccagcgggcttgctgtccgatgacgatgtcgtagtttctcccatgtttgagtccacagctgcagatttggggtctgtggtacgcaagaacctgctatcagactgctctgtcgtctctacctccctagaggacaagcagcaggtaaaggaactggggagtggctggggcggaaagtgatatcctcaggccaataattgtccatacagggtagtatgaggtcaaagactagcaatcctaaaggtctgagatcaattcaaaattaagggcatttaggacaaaatggctatgaaaagaaaaaaagaaaaaaaaattaagggcatgacaagtaaaaaaaaaattgagttgtgtgtccagaagaactataatttgcattgcattaatgaaatagcctcaaatgcatgctcttagttaatctttcagggaataatagttatctctctttgccttgaggcccagttgtgctaaataatttgcacaaggtcata

SEQ ID NO: 10828 - DNA, 6000 bp, Homo sapiens
acagtgaagagtttattcttacaatctactcacctgcggctggagttctggttgaggtgggtgctggcaaagctctggttcttacgacccacttttaggagcttccaggcctcctcagcatcttgcacatgaatccagttgagatctggggccaaaggagaggggtgtaagatgggaacatccaactcttttgccagtctctccccagttgccctccagggttcatgccagctttccccatgttcctttacctttcacatagggattgccattttgatcctcgcatagccgcaaagtctgcctcttgcgctgttggctaggcggttctaataggtcataaagcagttcgttgtagatctcaaagaatgagatccagatggagaagcgaatgtttgccgggacaggtagtggggcagtgtctggctgtgcccatcgatgacttgtttctggagaagaagccaatgtatagggcatcaacctagagcagttcacctctcttttggcctgcaggggccttggaaggcagaccttagattgcaacctctggtctgtactcctggcagctattaggaacagggagtgagttcctactattttttggcagagcccagtcacggtacataccatccagctggctactgctggtacactgactgatagaagagagcccagcaatgccactgtcgaagctggtgctggtacctatccgactttcgatgtagacactcctcttcaaggaagtggacagctcctcctggaggggcacagggagaaggtaagcacaaaacttccccgagatttgtaccccctacccccactgccatggataccaatgctttacctcttggaggcctccatttagcagggacagcttcttcatttcctcctgtcggatctgcttgctgtctagccagattacctcattggagagcaagggcttcagatcaggtgttggatgaagttggccttggaggctattgaagatcagcgccagggaccgggggagaatccctccatccttgatggtacctggaggcatatgaaagatggacagctgaggcaagtgcccttctccccctaactcagagtctcaaaaggtaaaaacaacaccattaccagccaatcaggaatcccgtgaaggcttactactcaccttgaatcgtgtgggttttccctgagttagtgactccatatgtatagatgagccagttctgccctttgagtacatcctttaccatctccttcacagttaggttgaagaaggatgcctgtcccacttctggcccaaagatctagagagagacccagttttttagaggcctctccttcatctcccacttgcctcctgtgcagagccagcagatatattccttcctgagtggttggctctggagaccactcaagcagcttcttcctgcaatgctgctggctgttccctaaacactgaggactcaagcactctctgctagtccatctttccaccaaatcaacaaacacttaaggaatgctatgccctaggcctgatgctgcacacacaatggggcaatataatggcccacaagtatgggctttggagatacatggatctagactcaggtcctaactctactagtgactagctacatggcttcagcaatattacattcattgagccacactatccttgtgaggaaaataaggaaataatgataataacaatagaatttttcagaactgatatacatatgttacttgacacattgactaacacataactagggccctcaaaattgtaggtgtgcatatacaaggaactcacagtcaggaagagaagctttccctctaaagagggaataaagttgcccttacatgttggtcttttgttcacaaaccagtaccctccatacctgggaaaaggtgaacctgtgtgtggcttggccaattccccgttcattgctcttcagggcaaaagagtccttgggtgcttgtagaacaagggtctccacattctcaatacggacacaaccctgagaagggagaaaatacagttgtcacagaaggcattcctgggaatcttttgtactgcatcatttcaccttgaatcctcccttctcagacacttacctgatcttcctgtcgttccaactctgaaggtaacaagggcctaaccctcaagtatactttcaccttctccatactgtcctcagatggaacctgtggcagaatcccagcccagaaccacagattaatttcagcagttacctctgagcaaatgggcaaacagtagtttctaggaactatgataacactaccccatttcacctcaaatgtctctgtgcagctactctttggttccacaatcattccaacccacatggacatttttactactttgtcacccttccctgtctcgtcattatcctgcaaatgtggcttgccacaccgatgatctgagttcgaatttattgactggtatgaaaattagtatgtgatattaaagcaaagcagaggcaaacacttgaatttgagtcccaattccatgacttagtaactatgagaccttgaattatgagttcttgaaattcttggcctcagtttcctcatctgcagaatggggttaataatagcacctatgtcattcattcaacagatacttagaggctgggtgcaggggctcacgcctataatcccggcactttgggaggccaaagagggtggatcacctgaggtcaggagttccagaccagtctggccaacacagcaaaaccccatctctactaaaaatacaaaaattagctgggcttggtggtaggtgcctgtaattccagctactcaggaggctgaggcagggagaactgcttgaacccgggaggcggaggttgcagtgagcagagattgtgccactgcacaccagcctgggggacagagcgagactccatctcgaaaacaaaaaaacccaaaaaacaaaaaaaacccagatatttagagtgtctactatggcctaggaaccgagaagctctgatagtccatagtgagagacatcatcaaggaccatgctctcatggaactttataagtctctaagagaaactctataagagcacaaaatctgacaatgtatgttaatgtttagcataggacctagtacagtgtttctcaaccagggtcatttccactccaagggccatttagcaatgcctgaagtgcctgaagacattttttgattgtcacaaatgggaaggcactactgacatctagtgggtaaatgccaagaatgctattaaacatcttgaaatgtacaggacagatccctacaagaactgtctagccccaaatgtcaataatgctgtaactgagaaaccctggcctagcaggaaacctacaacaaattgaagctatggtgatactattaaaacctgaacatacattccacttacataatgcctatatgaccttgtgcaaattatttagcacaactgggcctcaaggcaaagagagataactattattccctgaaagattaactaagagcatgcatttgaggctatttcattaatgcaatgcaaattatagttcttctggacacacaactcaattttttttttacttgtcatgcccttaatttttttttctttttttcttttcatagccattttgtcctaaatgcccttaattttgaattgatctcagacctttaggattgctagtctttgacctcatactaccctgtatggacaattattggcctgaggatatcactttccgccccagccactccccagttcctttacctgctgcttgtcctctagggaggtagagacgacagagcagtctgatagcaggttcttgcgtaccacagaccccaaatctgcagctgtggactcaaacatgggagaaactacgacatcgtcatcggacagcaagcccgctggcggagaaaggatcccttgcgacatgacggcaggggcagcctaggtctaaaaagagaccaaaaagtgggcagggagaagaacctttagggacagaaggggccgcgaattttaggtaataagtcccttgccccaggacaccgtgtcccgcttcctacttcttttcccctccaattatcggcaaaggggaagggaatgagagaagttcacttaatgaacaattgagagaagtttgaggcggcatttctgaacgcgaacagaagtccacagacatctggctccaaaagcagaaggctacgcctaaagtagggcacctcgcccgccggtgctgtggaggtggtgtcaggatccctcggctccttctctaacctcaccccaaggaccaccgtgagaacagagatgcagcattaagagaaaaacagatggctgcagctccgatttcttaaagcctattccgcgcgggcaagagctggtaacccgggctccagcacagccgcacactcacccgaagacgtgccacttgctcctcctgggatactggcttactcacacctagtcgccgaagctggactttcgcagccgcagagcacaactccgcccacgaggtgcagctttgttacagatacaatattttaaattacgcgctgcgttcgttcggccaatcagatagggaagcctgcagctaccaatccgcgtaaggaaagggggcgggcctgactggaattccagtcgttcgcttctgcttgacctctgagttctaatgtgggtccgggttaccaactgtcgtggattcgcacttattttgcctgggattcttccaacttaacctttttccttgaaccttagacatttcttacctaagagcctaaaggaaatcttgaggcttcagcagccaactcctgtccttccttagcaacaatcttaacaggagtgcacagggtaactggtttagggtgcttgctttgtcttaaggggaaaaacgacatttcccaggaggcaccgcgaaccaacgccggtacactatttcccagaattccagggtttcggcccttccagaccgtctctcctcagggttggagacttcggggccaagatggcgacgggaacgggcagtgagtatctgagcaggttttgcgtgaaaggcctttgtagatccgaggctaggcaccatatttttgttacacgcttagggagtgggagaagtgggttgcttgagagcccagggttttcagagacctgcgctctacagcatcgtgaagaccaacgtttgggggcccagaaatctggggtcttgtttctcagggagagagcggaggtgtgagagaagcagcttagtgaatcctagtgtgttaggaactctgcgggttaaccgtaaaagcactctagaaacttgggcgtgcagacgaaaagatgttatgagccagacggagtaaccggcacctcaaagagccattcatttttttgtctgacgtttgtgaggcagtggaagtggggtcttttaaccatgagcttttcttgccactcaggaaattgcatctcggggatttcagccatttttctttttttggactgaaaagctcttttacccccgacatttggagtagaggatctgagagaagtaaacaagtttatgctaagagggaggcggggtagtaggaggggctggccgctcgggttcctgggaaataagccctgaataagttcaaactggaataaagtccagtattcttaaaactgggcttttagggagaactgcctaatctgacattccctgtttcttaataaagcggagcttcaagccatggcgttttaagaaataaaatgttaataattcacatgcaacgaataggtaccccggtcactggtgatatttcacttggagaggtgaaaatcaagatttggttatagtagctcactttgtcctaacaagttgggatgttttgtattaggcttttagtcctctttttggggattttggagcttagcactacagtctcagtggttgtttccaaggcttttttttttttctccctttcccagaacacaagctgctaagcactggccccacagagccatggtccatccgagagaag

SEQ ID NO: 10829 - DNA, 6000 bp, Homo sapiens
actaggtaatgaacaatttaaacatagaagtgattgagaattgaagaccattataattgtgaactaagggcacatttaaacataatgacctaggcagaaatgtaaaacttgctagagttctaatgataactcatttcattaatttacagatttacttataaccttgattcatacacttaacccattctaatcaaatacaatactttcagatgtttttgatgatacacttgataaaccagctggcatataaaagctcctcacctttgattccgaagacttaacttttctagctgaagcaggcaaggtagtatctttgtcaacattaagattttgtttagattctgcggaaaaatgaattgtacagatcatggttgatgtcaatgtgttttaactacacacaaaacacaatttccaaatttttttgtctttctctttttgtttgtttttgttttttgagacagtctcactgtcacccagcctggactgcagtggtgtcatctcagcccactgcaacctctgcctcccagtttcaagcaactctcccactttcctccctagtagctggaaccacaggcgcaccccaccacacctggctaatttctgtatttttagtagagatggggtttcaccatgttggccaggcttgtctcgaaatcctgaactcatgtgatccacccaccttggcctcacagagtgccaggattacgagcacgagccaccttgcccggccccaaatttctaattacaacttttgatgaaacaatatattctttccttagttgtacattttcaaataattactcatacaatttttttacacatctaacacctttctgattttcctaatattccctgacaagtcaaggtaattaccaaaagggaagctacatatcaatataagtatcttgcttaattttcctggttatataacaatgtaatgatgacagcattattctgtacttgaccctttcataaatccatcaaataaaatttaaatatagttctagcttcacattttaaaaaatgctataacatctttaaatattgttattcataactttaaaacttataagatcacataaccattgttctttggtgatctatattacctttttgctgtttaaatctttgtgatttctgaaaggatactggtcctttcaatacttctaaagttttaacatcataagcacctggagatggtgcacaacctagaggaaatagaaaacattaatatattatctaatgttacttatgatcttaagttaaaacatgtcataataaagtgaatataaatgtaaaaatgtcattaacaaactgctttttttaaatgtaaaaaattgcatccatttgatattacaaagaaggcctctctatgaagaacaatatcatcttgccctttatatcaaccgggtcaaaggaacacaggcaactgagcaaacgacagttttgagatgaacatcatatattacaggcaatatatggctttcttactaaggattgaatatagcaaataaaatacttggtgtcaactctactcgaagagagtcacaaagataactactatcagtttctagaaataaagtaattaaaattgtctatccctcaatgtttagcctagaataaaaatttatagtgataatccatctctggctaatatcaatacatcagacctattaaagatgtcaactgcaattcaaacacatggaagaaaagcaaccacactagagcaactagaattttttgagcacttactaaatgccaggcattatgctaagcatttcacagatgttattttatttaatcctcacaagaatcctgtgtgataatttatagacaaagaatgtgaggcttaggaaattcaaaaagccaatgttacacaaagtacaaattgtactagactatatttgtatgttccagaagtttatactgcataatttcacttaactaaagtcccagatttgaaggcatttctgagtaaatacacatagcagacctgagatggggcctttaggacttaaagtaattaaaatactactagcctaaagctttagctgattgggaacaaatagattaatactattctctgaaaagctatttacttcagtctagagtctcatgcaaataaataggaagagcaaggagcttggaccattcccaggcaactactgctgtcccctaaatgtttgtcaaacagtagacaggaactcatgatttttttttttttttttttttttttgagacggagtcttgctctgttgtctaggctggagtgtagtggcgccatcttggctcactgaaacctttgcctcctgggttcaagcgattctcctgcctcagcctcccgagtagctgggattacaggctcccaccaccacgcccagctagttttttgtatttttactagagacagggtttcaccatgttggccaggctggtcttgaactcctgacctcagctgatctctctgcctcggcctcccaaagtgctaggattacacgtgtgaaccaccaggcccagccccatgagtagatcttgattagcattttttaaaaagtaaaaacaatagaaaaagcatgactcatatgctgcaaagttaggcattgttttgtgaaacttttctttcgtatgtatgtgtagagatataaaaatacatcttaggttgaaatataaattttgggggtttttttgcttttttttttttgaaacagagtctcgcactgtcacccaggctggagtactggaatatgaaaaatcaccacagtgcctcatacacattaagcatcaaattaataattagtattatttctgtaactgtgagcctgaaatactatatctttgataaagccagtttaacctactataatgcaaacaacaaaaaaaccaaaaaaaccttaaagccacactgctgacaaaacttaagagtaggtcctttgattactcgggaaatcatatggtccttgagtcttttaactaagaaaataagtttgtgctgattcacttgctcatttggccttcctttgtgagtagttgtattttcattcacacgttggctgacaaaacttagagacgtaatgagtaaccacgaaatagtgtatgatagtgaataaatcatgagctttaatatttagctctaccacttactgattgtgcaagatacaaaacctctgttttctcatctgtaaaatgaggtcaatatcagtaccttcctcacttggcttttggaaggaataaacaagatctagtagcacagtcccagcatacagcattttttttttttctgtaagacagagtcttgctctgtcgcccaggctggagtgcagtggcgcgatctcggctcatcgcaagctccgcctcccgggttcacgccattctcctgcctcagcctgtagtcagctgggactacaggcgcccgccaccgcgcctggctaattttttttgtatttttagtacagacggggtttcacggtggtctcgatctcctgacctcgtgatccacctgcctcggcctcccaaagtgctgggattacaggcgtgagccgccgcgcccggccgcatacagcatcttaaatgatgagtgcctaccaaacacagctaaggcttcctggttactgtgctgtgcattgcggtgttaagagcacacgatgggggctgggttcatattccagtccggtcactttggtaatgtagcactgagcaaatttaagtctcagtctttttatcaataaaataataataggattaccccttagagttggtgggaaattaacataactaataatcgatgtaaagccttagtacggtgcttgaggtataagtggtcaatatcagccataacttcattgtttatgttttcaataagtgctgctgctctaattttacacccataaactgcctttactaatcttccttcttttatgcccaaatggaatacacaaaagaaatgcacaagttcagactacaagtaatactccagtgttcttatcagtgaggccctctcggacttgaaaatcaagtagctaccaacgtctcgggtccattcccttcgccctgctgtagtttctccattaccgctgtttattgacagtattccccgcctgaatgtaagccccacggggcggagactgtttcactgcggtatccttagcatcctgattagtgcttggcatgtaacagatgcttagagcatatttgagaaaaatcaatcaactgaatgagccccagcccgaccctaaaatcgcctcctgcttgcctcccaagaagggagctgaaagaggcaaagggcgttagggcgtctcccgtcccccagctctttcccccttacgcaccagaagggtcattgaatcgtttcaagggcgccttaggaaaggacatgttgacggccagctccagaaactgaaggtgactggcactcctcgacaactgaatgcggattatcactccctaccggtttcaaattcaaatctccccacattccccacccaccccggcgttagccaattggaaagccaaacccctgggcacaccaatcccgcacaggaacacgaagaaagaatgctgggttctgattgcgtccaattagctggcctgcgagtttaggctgccatccaataggagaccgttactgttccccgccccacccacccagtcattcccggagttactcaagtgtaacctagcatttgcgcaagcgcacttccctccggagacgttagaaagtgcattttggcgtcacttaggggacggtgtagtgagttccggcttcactggttccaattctgtcccattgttcgttgcatgtgaacttttctggatttcagttctttcatccggggcctgccggtgccgtaaacggccattcaaagggaaaaacgaacacgcacaccaaagcgctagcttgcgttcctgcgcatgcgcagtgacccgagcggagaggccgaggcgtagcctaagcgtgggattccgcgcgtgcgctcggctccgcctggtgcggccgcggccgggagggactggattatgtcggccccgtttgaggagcggagtggggtggtaccgtgcgggaccccgtggggccagtggtaccagaccttggaggaggtgttcattgaagttcaggtgccgccaggcacgcgcgcccaggatatccagtgcggcctccagagccggcatgtggcgctgtcggtgggcggccgcgagatcctcaaggtagcggcagctcggggcttgtgttcagtttcctcttcccagacgcccccagccccgtttccctgaacgactgttgggtgtcccgacggctcctgtggctggcagaaagagaaagaggataacactgaccaggtttgggtctggtcagagcccccgcctcttcagggcaggtgctgagttgtggaaatttgaggagcctattttcgtgtttagttttcaaactaagactgctgcttctgcttctctgacgggcttcagctgggaacagattaactaggttgctaaaggaacaaatatttcttccgtgcactgaagacaggcaggaagacaacagataacgtacctgcagtggagaggttaagctcctgtacggaagcgtaattcataaatagataaatataggaaaggacaacaaagaaaatagggatagaataacgggcagagaatttagagatgatgtcaggtgattagttttctcatctaaaagcttgaaaatcctgcatgtttgtggagtggtcaagcaggtggtgaagaggtgtgtgcataaaataagtagtactccttttatttcttttcaccaatgctctttggatctggacccgctttttctttgttaagtgtataattaaactaacaggttgaaattagatttagttctcaggttagatgcccaagatgtttgatggcagtgtaatatggtgaagggagactacttgtttcctagttttgtaaacttgggcgagagattgttcagtgtctctatatcttccttatccacaagataaggtagttatagta

SEQ ID NO: 10830 - DNA, 6000 bp, Homo sapiens
tttggaaagaattcatgcccttaaattaaaacatatgttggcttgaaaacatcagtaaaagtaaaagcaggctgggcgcagtggctcacgcctgtaatcccagcactttaggagaccaacgcaggcggatcacgaggtcaggagtttgagaccagcctggccaacatagtgaaacatcgtctctactaaaaatacaaaaattagccaagtgtggtggcatgcacctgtagtcccagctactcgggaggctgaggcaggagaattgcttgaacctgggaagcggaggttgcagtgagcagagaccatgccactgcactccagcctgggtgacagagtgagattccatctcaaaaaaaaaaagtaaaagcaaattttttaaatcagtgttttgtttcccttctccctgcctcctaatatctctgcttgcccctctccctcaccccacaatggagacccagaaattcatctcatccaggtcaaagaggaaagattaacataataatcactaaacaatgtctgtgaaatgtaacttttggttagccacctacaattctttttggaataaagaaggatataaataattaattgagttaaaatacacacacggccgggcaccgtggctcatgcctataatcccagcactttgggaagctaaggcagacagatcacaaggtcaggagattgagaccatcctggccaacatggtgaaacctcatctctactaaaatacaaaaaattagccgggcgtggtggcgtgtgcctgtagtcccagctacttgggaggctgaggcaggggaatagcttgaacccaggaggtggaggtttcagtgagccgagatcgcaccactgcactccagcctggcgacagagcaagactctgtctcaaaaaaaaaatgcacacacagtctggttaagtctatcactgctcctggctaagtagcctgacacctgctgagtgctatgccttggcatcctggtgcccatgtgaaaaagccaatggttgtcttgaagggactgtctcatggaagggtcaggtgcagggcaggagggtgggaaggtcagggagaggaatgcttgctcactctaaggaggaaacgttctaccagagaggctgtctggcagggcacagagcttctctccctggaggtttgcagcagaacccagatggcctggtcaggtcagatgctgtggaaacagcacagcactgggaggtgatttcagtgcctaccgctctacccttaggcaaacccttcccactcagggcttccgtagcttcccctcaaactgggaaaagaatccctgctctgttctcctcacaacaaagtggtgagggaaaacagacaaaacagattgactggatcacgtgatagaagcattacgcaaatacgcaactccctggtacctgggataccagagatggctgaggaggcaccgtggcatcacgtatccccgagggatcactgtgacccctgtgtctaagcaaagactggcaacagaaatttgctgggtgaagctggggaaggtggtacacccatcttgagacccacaccttataaaggagcagcctggcctcaaaggggctgccccaggcaccagaccagaggagaaagtacagctcgggagcagcagctccacccaggccactgcccacctctcaagccgctggagggagtgaggaaaactcctgtggcaaaaaaggaaagactggggaaggggatggaagaaaaaaatttaacatggaaagtaaggcataagtacaggattttcagtttgcagatgacctcactgtcacccatcctcaaggaacatgtgaggcctaggtgttactgagctagggagaggcagagacatgccagaagccaggcctcctgccctttgcccaggccaccataccctactgtctctcaaaattcccaacactgtgctctacccctcctttctgctgtgtgttgtccctgggaaaagcaggcatcttggcacaggtaaattggaattgaaggagggagcagacaggaagtgagaagataaagacaaacagggctgcttttatagggaatacagcctgagaaaatacaaagggcgaagagatgtctggaaaaaaacgtcatcttaaggagcgggagagataactagcatatggcacaggaaggtaaagaccaccactcactccaagaaaagtgcctagccagacacctgccctcaaggcttaagcatccttccaccccctctttaatcagctacctcaaaggggcacactgaaattggactggagagccataagggccaatgcagtatctgcaagactccttcaatccaagttctccttggatctattcacctgttctacaacttgatgatcccaagtactgtttaccaacaagatgatgaaacacattcaggggcaggcttttcactaaggacatcttcttaggctgttgccagcacactatttcaagaagaaaacagaactcctgactcagagttgtttctgtgcttttaaggcacgtagagcaacatcgatgttattgtttcctgtgtacacggccctggatacttttcaaaatccttgtttcatttgctcctcgtaacaacttgtaagggacctggaaagtcagttttcccccattttgtaggtgaagagaacatggcctgtgtagggttgtacactgactcaaaaagtcaaagctagaacacaagtactccttcctgacccccaaacctgtgttctgttcctctgctcttttcccgagctttcatgggctaagctccccttatagaagtaggaagggagacaacttaggaggttatctagaccattcccgccttctccccccaccagcagtccttttcagttagctccccaaaacagagcagctgcctctgcctaggtaatccattccagtcttaacccagactgacttggaatcctattatctcagtgttggaagggcctttaaaggtaatctaatccaacctcccttcagaagtcttcaattattatcatgttctccttggcctaacctcacaactgccattgctcacaatcccttacaaggcactcatccagcttgggtaaggggaagttgggaacaagtctatacctggacagagtaatggagaggtgtagcttccagtgtactcatctggataagatttcctgaatagtagcctccgcgaactcgccagctcaacaccttctgcacaggcacagcaagacattaagtgggaaatgagacaggagccttacctttcttctcttgtctcagttgctctccaggagatcatcaaatccccattcagcactccattttcaaaactgagaatcccaaatcagatccaccaaagtgcagcttctctcttcttatccaggtccaaagtccatggctgagctgaccctgacggggaggagtctgggggggaaggggtgtgtccaggcccctccccccccactgcagacttcagtgcccctctcaggggtccgttacctcccttcattcagctgccttattaagctcagagtctggtgatggacagatcccagatactatcccatctcttgctcaggcaggggaagttatccactgtgagaactggcccatctgtcttgtgctggggctcatgagaagaaacaggccttagaagcggcatggcccaggaggcagatttctgtgttaacctgcagaacatttaaacattataacgctctctaatctagatacccaaatagagtcctaaaaccttctagtttccactccccacctaagagtccatactaggctctatcatcaaaacaccttcgttaaacactccgcaaggttatacaaagcacctacttaactcacgtatcacacgccagaacacagtcacctcatcaatagtgtttacatatataaacacatataatataaacatattatatgtatgtacaaacatacatgattcaggataaaagatggatcgtacccgttctcaccacagaaaagtaaccggagactcttctaagaaatcgagaaaagaacgccctttctcctgccctcctgtctaaagcgcaacataataatcgaatctcccaagcttcttagggtgctgagtgttttaatccaccagccctcttcaactagttaataaatcctttccagaccgagatgctggcatcttccacttgcattctttgctcctttaactaagctccccctctgcttgcaaaactgtgccagagatgtaattcccaacctctgttaaagtccttcccggggctactcccgagaacactctcctggaatgtttaaggcccaagtcctgcttgcagcagccccacagtgttcccatttctcagcccgaaaacccacccctgttgccccctcccctccaagtttattcgtaaacacacacacatccattctctctctcaacacacatccatccacacacactctctctctcctttccttcctgtaggggcgtggcgtccacatgacctccaccccctccaagaatttaactcctcccacccttctccccggaaccccgtgccccgtgttcacaagagaagagggtgacactgcgacccttcctggactctgacccccacccgtccgccctgcggacgaccctcgctctaactgcgccgggtcgttacctggttcccgcccgccccgtctcggctaggagccgcggcccgccgcgggtcgcaatccaggccccaggcccgatccccagcgctggcccaggccccaccccctcgacccccagcggcccggccctcccctcgcactccttcccccctcccaccatccaccgcagccacttccgcccgtcctccggaagtgggccccggcaacgcagcgttccacatcccgcccatttttctacccaacgtccccagcccgtcaccaccgccaccacgggagcgagggaggtgggtctgcagggcctgagactgttctacagccactgttcacagggctgaagaacaggtgtgggcagaaccaggttgtgagaaggaagccgggcgcagagtagcggccgtacaggagggggaggggcagaagagactggccagcagcggaagcgcgcggcaggtggagccgcgcgggaagaagcacgcatgcgtcgcgggggggttggcccttggggtgctgggcggagcttgggaggggcgaggacgctgaagtaggggcggaacctgtgcggtgcagccctgccctctccctccgcccaaaggtcgcccagcgacggcctgcttgacctggtttctcaaaaagggtgaccccccccctccgccccacgctggtcgcgggtcctggcgagaagcctttcggaaagcaccggggcctgtgtgttcccgcttcctcggacgcgagctctgtgtagccgtggtggaggaaggttttgtttcgttcatcgctgctgtttctcgctgcctctcttgacgaggcagggcccttgcagggtgcgcccgcgctgccctctgacaggtgctgttggtacctgcggccgggcccgccgtcgccggcgcgtgaacggcctgcccgaggctgccgggaggagggctgcctggccggcgcggcccttcccgtcgtgccccgggctcctcggaagcagcctcccgctccttcagacgtcggactcctgagtttcgaacctgccccgcggtttccccctcacgctgaatccaggggagccgctactcgtttttgaagttcctatgcagccctctcccgacatgttcgagaatcttgccggactggggatggatttgcagcctccgtgtttgcccccacggttcgaaaaccggaatctaggcccggtctcctggcctgtgttctgtcgtgggatttctccagagcacggactgacttaacatttccattactgggaatgtaatggttgctgcgtcaggactctggagatgatttttttatttggaacgatataatttttggaatttccttaaagggaaaaatacatattgcttaattatattgcttgggatatatt

SEQ ID NO: 10831 - DNA, 6000 bp, Homo sapiens
gcaaaattttaaattttaaattttaaatttcaaatcttcttgggttcttctgctttggctaaggcttccaacagcattttgctacagagatgatgggagggaagagggctaaatacagagaaagtgtgtttgggtcaaaaaggggaaaatactatatagtctaggcttggtattcactttaacctgagtcaaagattaaaacattttaatatgttggagctatggatttacagcaatcatcaaatcatactttcaaaaaaaaagttacaaaaacatctttgtgtggaatctactttatgtttgctcattccaaagctgacaaaagtagctccagtatttactgaatttctctttccaaagcagatcaaataattttcagctatttttcactagaactcaaatcaaaccaaaacagaaattaaccaactaaacaactccaaaaggcgttaaagccattttgcagatgggaaatccaaggcaaagggatattaaagggcttgttctggcagaatcataaaacagctagcatcattaagccaggatgtggtgccttccctcaaaacttgttgttcttccatcacaggtcacgtctcctcttatttcctaactgcaatgacagtacttgatggctgaaaaaaagacttaagtagctattgcattttttttcttttaaaatcagatacacagaaagcaagaaaataaatatggggccaaggtctcagtaatgaagagctcttaagactacggataaatgacagcacaagaacttcccgctaaacttgcagtgcctatttgttctttttatggtctataaaatctatccgagcatacgtttctttataattatttcaaatagtcataaaatatcaaacgaacagtatggaaatgcagatggaaccattcagaaggaaagaaaagtggaatttagattcccagctcccttttcataccttccttgcaaccccccaaaccttttcctttccttttttttttttttgagacggagtcttgctcttgttgcccaggctggagagcagtggcgcgatctcggctcactgcaacctccgcctcccaggttcaagcgattctcctacctcagcctccctagtagctgggattacaggcacgcgccaccacacccggctaattttgtatttttagtagagacagggtttctccatgttggtcaggcaggtcttgaactcccaacctcaggtgatctgcccgcctcagtctcccaaagtgctgggattacaggcgtgagccacagcgcccggcctaaacctttccctctttcatagcaggtaggtgctgactgcttaaacaaatctcaaatcaaacagatctcccggggttcttttgctttggctaaggcttccaacagccttctgctacagagatgatgggagcgaagagggctaaatagaaagtgcgattgggtcagcattttcagctgccttgtgggcttctatataatgactaatttgtagcatacacccagaaatatccaggcttcatgaatttataacgacaacgcacactttgcctgttataggcggtaaagtaagcctcctgtcaaaatgccaagacaatgcggagcagaaacaatctcaaggatgtagccaagaaggccatgaagtgtatgagtaagcaagtaactcccatattggatctctattcaggaattgcagaggtttgcttaaaaaaaataaaataaaataaagcaactaaaggtactcttttcatactcttttcattccccaagggcagaattaaaactctgcagctacagatttctctatttttgggtcagattatctgtgatcagtgtgacagtattttcacaccagttactgaacatgctaaagcatttgtgggtctagagctttcatttcatcatttttgaatgaatcagacataaagacctcaccattcaagacagtttctttaacaccaggactacacgtgtgaatctgcagcacaatcaccagtttataataaaagaaatgaggtattctgaagctgaattaagtgaaatgtggagccatatggggtgctgaggcagatgataaggatccaggcataaaacatatagtagtccatctgcaaagagcactggcactcttgctgggttcccttatctgagaaacaacccgggcatttaaatagcaccactcttcaaagaaatctctcaaaaggagcgttcttttctttaacaggattaatcgcttcactccaacaagttgtccatagaaatcgcttaccacattgttgggctgaatctaatggtgacttaaatgaggacacatgaagatactgggagcttcacattccaaattcttgaacgaagacaccctacttttctaaacctttaagccaacttagtatgcctttcacgggctagcaaagaaaccttcagggaccacattccaattctgtcacaggatcctatggcaactatgggaaacaatatccaagcagccaagggggacacaatcccacctagcacaatttccatttcatgaaacttacattttggtattatggacacatatttttcgcacaaacactcctgaatatatcttttaacatgtcaagaaaaattttccacgtaactacatgcagattgacactattttctaaggttcttaggttactaattgaaagccgtaatcatcctaaaactttctattacacttttttattaagccgtcttttccctaattgtcggtgttaaaaagcagctattacatcataatgcaaagctacgcaaagtaaattaagtctcctcagatgtcacattttcccccccattacttaaaagacctccctgatttttagcatggcgggtatggtttaataagtaaaaattactccgcacagttgggtggcatcgaagttcaggattctccagaccagaacgttgtgaagtgtctcatatatacaggacaaaaaaggtctggaaggaaaagaaacttatctaatgctgtttgttctcaagactaaaggaaaatgaccctttcaaccttagcattaaaaaaaattctttgtctaggcaaattcctagaaaaaaatagtgtgaagagcgtcctggattttcatgaaacgattttttaaaaagaaaaataggtatcacatggtagaaggctcatttgcaggcttacttcccttggaacatacgcctcaaggctggggaagcgccgacctccagaaggcagcatggttatctgtcaacccctcacggagcccgaagacacccggctagtcacaaaacacgagcttttcccgggaggctgatcgctgaacaaacgcagcttttgccaaaacgaaagaaatccctgctcaaaaaagttgacgttacttcgagattaactcccaggtttgcaaaatctggtaaaaatctttccatctggtgtacttccttcgcctcgccgccacccccaactccagaaaagcagcacaaggctccttgtctccctccgaggcggctgcgacggcggaaacctgatccgagcctgactttcagtaaacaccagcgcagagagcaataaagcatccggaacatttgtctcgggcgcgcggcccccgcccgctaaatgtttgataagcggctgtcggaggggagatttgtcagcggtccgagccgaaggcggggagggtggagagaaggctcgtctctgcgcccggcggccgcccggtgggtggctgcgttactgtggcccggagcccgacagaggtgcgtgtcaggggctcgggaggcctttcccgttgcgccacgccgcccttccgccccggcgagcgccttcgagacctggggctatttgggaacaaagccctaggccccggggctggctcccctcgcgcgctcccgtcctacctgcgtggagcagcccgaggctgaacagcagcagcagcagcagctccagcggcggggggcagagcccggggctgcggcgctgctcaacctcggcggcggcagcggcggcgctggaaggtgctgctctcaagcccatgcccgtccatgcaggtctcgtgggctccggcgagggcggcggcgcgggcgccgtggcgggtctgggcccgtggctgcggcatgggccggggggcgcgcttcgcttcctcttcttccttcttcaggcccgtgtagcagatggggcgccaccaccgccgcagcaagcagcgcgcagccggcgcagccagtccgcggcggcagcagcggggcgcaggggcatcgtggcggccggaggcggcaggcagggaaaggggcggaagagaagacacaaagaccgtgagcgactgctgagacgagtcccgagcgcgccggcaccccggccccagccagcgtgggctcggcgggcgtggacctccaagaggctggcccagccctagcgaccacccaccggcggcccggatatctctgcgcggcagcccccgcggtcgatcaatctcagtcccgcactgccgtcccgccccgccctgtgcccgccaatccacgacgccataatcccccgccgtgtccctcccttcctccccattggttgtgaccgcacgtcagcccgactcagcctgccaatcgcaggacccagagggccctctcccccgcccgctcagtgtaattcgagttccctgtccatcgactccaagtcctctctcctgcgccgcatgctgcctcgcgctccctttccttccccctctacccccttccgcgatttactgtttcctcgcgcccaacagaaatgggcgaccgcaagtcttactctcgccggcgttacaaaggtaccggcctttgacctctccttgaattaatgtgatccgattcatcttccctccaagttttttttttaatttaattacccctccctgccctggccctgccagcttcagctccacctccttggaggaagcaggcgcttttacagagcgccgcgcggcaggtcccctttcagccaatcacatctgcggaaccgcgttccgagtcgtttgagggtgtctggtaaagcaagctcggggcggtgttggaaatctgaatgtcacccgcggtccggagcagataggatgggctgggaaggtacccgcgaactgccgccggaattcgctggcagctgtgcgaggctcaggtgttctagtttgacatttcccttcctgaaagcggcaaggagaggtctaagagtgggcaaacttcaacgttcggttacagtgtaattaatgagagtggtgggtttttatgcagtgtaattatgccacgatttgttgttgctcagtggctttttcacaaatttctacagattatttaaattttccacaaatttctacggattaattcaatggcagctcactttctccttttatgatcggatgggtccgaaagtgaggaaaaagacaattgtctacaaagaaagaggctgccaagtggagacagaaaagcagttatgagactgatgatagattccaatttgttatcggtaggtgtgaagtggtatctaatctcaagaatgacctcaaggctgagagacacttgataccgccctcgcctttgcctttccccaaacagcacagggttgccatttaaaatccactaacatccaaatcgtagttggcaactgtacccgctatgttactcagaatctctaattaggaatttcttatcaaccacggacatgctgatattccacacatgtttaaatgagctaatcaatggactaggataattgaggggcaaaccttcagtctcaccagctcacttattagacacattttgaattgcccaaaccactaggtccctaatgaaggatgcctatctgtttttactgtaacttttcattacttacttgttacatactatgatgacttaaggggtaaacacacctttcactatccacaatataatccaagcctgtgtatatccataatacgcttaataatagcttcacagttgcctggagaaatgacttttggggaggaagttatatgacatttttagataatgctgcggactaagta

SEQ ID NO: 10832 - DNA, 6000 bp, Homo sapiens
gggggcgacttgatccacaaatgagatcccaccagtgacccaggtaagaggattgcaaaggccaagaggcttgaggagggaaggctgcccggaaggcagtctgtcctggagacagagtgagcaggaacccacagtgagagcaggagtggcaggaggtggtcacagctggaggcagaagcaggaatgcagcagcagcagcagccaggcgcaaggcagctctgtaaacctgcaaactcgaggctggctgaactctacagcattgactaacacggggcttttccatctggcatttccacttgctttggtatccacaggcgcttccgggcccgggggcagccgccacgcacacacgcatgccacctgagcaagccttgatgggtgaataccaggagacccctgaaggtgctccttgcttcaggagcctgagaacccagtctttcgtcttgtaagggggtcctctggcaccgcaggccccaaactctactcctcccgccatctctcctggacctccccgagccacgcagccccctcttcctctccaccctcacaggagaccgccggtgcctggcctgagaatccaagtgcagctggggaatggcctggaagaggccgtaaaggctggaatggaacagtccagcctcacacagtggctaacagcacagagttcattccaatccggctctccctcaaccatctgtgtgaccttgggcaacttcacctctgtgtgcctgcttcctcactggtaaaacaggagcaaaacagtacccaccgcctaggcttgctctgaggatcaagtaagttggtacttatcctggagcactaagtaagttggtacttatcctggagcactaagtaagttggtacttatcctggagcactaagtaagttggtacttatcctggagcactaagtaagttggtacttatcctggagcactaagtaagttggtacttatcctggagcactaagtaagttggtacttatcctggagcactaagttggtacttatcctggagcactaagtaagttggtacttatcctggagcactcagaacaatgcacttggctagctgcatgacatgctatgcgcatggagcgtggcggccaaactcctcctggctccaccggaaagggcacaatgcagctatcgccgggccgattccacgtctgaaatcacggataatgaccacctccccttatttaacaaaaaatatggctaaataatccatctaagcaacaggggaaggcaaaacccgctccacacaaatctcaaaggttaaaataaaaccaatgtctgacactggtttctgagcccagatgggaggttggagctgctcccaaggccacggccctcgacacagctccccagacaactctgccaccatctggtgtcgagctccaaagtagtttctgccaagaaagttgcctagcccagggtttttggtttgttttgttttgagacgcagtttcgctcttaccgcccaggctggagtgcagtggtgcgatctcaggtcactgcaaccaccccgtcccgggttcaagcaattctcctgcctcagcctcccaagtagctggaattacaggcatgtgccaccacacccagctaatttttgtatttttagtagagatggggtttcaccatgttagccaggctggtctcaaactcctgaagtgatccacccgcctcagcctcccaaagtactgggattacaggcgtgagccaccgcgcctggactagcccagggttttcaaacccactcatgaaatcaagttcgtgagtcacaaaaagcgttttgtttttccgagacagagtcttgctctgtcgcccaggctggagtgcagtggtatgatcttggattactgcaacctctgcctcccgggttcaagtgattctccagcctcagcttcctgagtagctgggattacaggtgtgtgccaccatgcccagcaagtttttgtatttttagtagagtatttttaggtttcaccatgttggccaggatggtcccgaactcctgacttcgtgatccgtccgcctcagcctcccaaagtgctgggattacatgtgtaagccactgcgcccggccgcgttttgttcttttaaatgaattagtggagaacagaaactctcagaatgttgcacgtgatatgcagaggtaacagtctgtctgtgttctgggtattagcaaaacaggcactctcactggggttgcgtttgggagtccaagcgccactgtgaggccaaccctggtatcagctgtgtaccctgaggctccccggcacgtcataaagggcactcaataagcactgcctgggccagcagagggcaccgggcacaaagcaccactcagggaccaccctgatcagaggacctggttcttccccagaccaggcctgcccagccagcaggaggcagaagcaggagacactcaccagctttcctgctgcggcctcctggctctacaggacgatcagcaggagcacagtccggggctcctctccaccttgtggcctggacttcctttcccacctggcccccatcccctgggctgtccctggctcttccctcccactcatctgctttctttcctcaactttgcttcctcccacccgtctagccctctccttaactcttcattctcccttttcctttctttccctgcctgccacctccttttccaggacacacacacataaatatttttcagacaattcagcctttattttagaaaataattctgtagcttccactttctttcatgaaactgaggtcaggcaagaaacaaaaatccaccaagtcctctccatcctgccatggcgtcctggcctgtgaggacatggggcgcctgggagcgggcggggaggctgggcagcactgggccagaggcgtcctggtcactgctccacctggtcactgctccacctcatgctgagaggagcctgtgtgtcaaaccccaggggaaaaagggacaggcagatcgaattctgtcttctaccaagccagcaggagcctcctagagcaacagggagggcactgattttcagaaaggaggggtcagggcatagtccctctctgaggtaaggcaagagagaggttgtcccagcacaaggccttcctccctgcacctctctcctgacagctgggcatgggctgaggagaggtcttgcttgcccccttcaactttccatctcagaactataaactgctaggctgcaaggagagaagggctaagtgggggtcagacaggagagaagggcaggaggcagtgagccccgatgacccaccaactccaccaggccctgacaaggaagcccctttggttagtatcattttggccacaaatatgtccccttctcccataactcagtccccactgggggaaggggagcaggtatagaaggagggctcgtgccctggctggaagagccaggtcagggagaaggggtctggtcaagagagcgaacgttgccaaactctctgcacatgctccaggagaaagctcaggacgtggacatttctggccccaacaagcccagtgccccccaccacacagtggtttcctgcttaataccccgcaacataccctagaatagttcccctgatctgactcccttgagaacgggagaataatcctcttgttatcatttgtgcacttaaatgccactcggaaaaatcaaaaagataaatgcacctaagagggaaacacaggcaggccgatgcagcctggggactgtggtcccacctcagctcatgatgtggcaaggaggggcccaggaaggacaggcaggtgctaattccagctaggatcatagccctcccacgtcagtgggggcgccaggtggacacggcggccccggaactggaaggtgacaataccccggtagccagctctcggaacccccgacttaaggtcatccatgacacccagagccttggcgaaagccttgaagctgtccctgcccgtatactgcacccgcacctcccccagctccttccggtcattggtcctcactttctccacctgcagctggggagcaccgtagacgcgggcgaggaaatctcggtcataggcctcccgctgcaggtaagacaggtccagctgggtgaagtgcacaaactgctggttcagcttgataaacttgaggtgctggtcaaagaactgcccgtggctcacacccttgcggccaaaggtcatcgttcttgagatctcagggcgtatgcaggcccgcccctgccgctgctccggccgccgcatccagtcgtcccagaaggcctttggccacttgggctccagctcagcccagagctcggccaacagcagccagcccaggccagggaaaaagtcggtgcggtagagcagctcaggcctgctggcgtccaccatctgctccttgccgttgtcattccaggccgagacgcaccacagggaggggtcggccttcagcagcggataggtggcccgaaagtactcgaagaagtccggggccacctccaggtcatcctccaccaccacggccgcggggaagcgaaactgccggaagacctggcccagcgcccagcggtagtggcgcgcgatcttgtagtagccctggaacttgcggtggtccggcggcaccgcaatgctgctcaggtcgggctgccggatgtgcgtgaccgcgctgccgtaggaggcgatggcctgggccgtctcctcgtgcccgcagtcctggctaacgatgatggggaagagctcagccgagggccgataatgcagcagcttgtccaggcagcgccgaacagtgctgcggtcacaggcgatgaccaggatgggaatcaccgccggcgcgggggtcacaggcacacgcggctgggcgggaggggccgcggtgggcaccctcccccgctggctcgacagggcatccccgatctgctgcagcagcccacgctgccgctccagctccacctcggcgtcttgggccaggcgaatcacttcccgggtgaggctggcggggtcgccatcgagagcgctgactgagggtggcctgccaggtgctgggcgcgtccagaagaagaggagcagcagggcattccaggccacaaagaggatagcgccccacagcacaagccctgcagactgcttcttcagcatcctggcccccaccggggagggcaggccaggggacggttcaaggctgccctgggcttgcccggctcccttgcccgcagtcctagggatgcctcctctggactatgggattaggaggcagccatgcacctaaagacaggagagagaaagcaaaccgtcacacaaaggctcgtggctccatgccccacaggtagaggaaatgggggcaggaaaaggccaagagtgagggtggaggaaggccaggaggttgactccagagctctctagggagtcaacatatatcctgacccaggaacgtatttttgagggagaggcagagagtgatgctggtggagggagagagaaaaagaaccccaactcccctctttctacctgtcagatttcatttcccctccaggtgggaaggaggaggggaggggcaaggagtgacagcatctgcctaccattcctctaacctaagcgccccaagatgactgatttttaaaatcaaatgtcccacctcagggctacagttaaccccttaccaacagggaagcaccagaggcaccccacgaatgtcaggagcaaaacgaagttgcccatcatctccagggttatttaacattttgctggaggaagcagccaatgcaaatgaaccaagaaaaaaaaattcaaagcagaagtggaaaggaagcaaactatttctattatctttacttgtgagaatatgcctggaaaactcaaaaagaatcaataatgaactgagcaaggaagtgtaatataaaaatcaacatatactaatggatagccttcatatccacaaataactcatgagaagaaaacatggatgagaaaaccctacttacaaaagccagagaaatgagaaaatatttag

SEQ ID NO: 10833 - DNA, 6000 bp, Homo sapiens
acacacacacacacagagcctcctccacgactcttggaataagttgtctttgtctttataggctactgaaacagaatagcctcaaatacaaacttctcccaaccaccaaatctattcctcctccagtatttctcatctcaagcaacagtaccaacatctattaagtttctcaagttcaaaatctacaagtcagcttctttctcactcccacatccaatcctttgtgccaccaacctttactatctctcaaccagaccacagtaatcacttgagtctctttgcttccattcttgcccctgccaatccattctccacccagagcctaaagatgttaaaacaaaatgggtcatgtggctaccccacacaaaattcttcaatagcgtcccactacatttataatgaaaaatagttatctccttttagttatgttaatataccactctttctcaccccattaccttcatgtgcgctgtccctttggtcaggactgtcattccacccaatcatcaacttacccttcaggtctcagcttcaatgtcatacttctcaaaaaaacgccttcccaaaacccaattaaaattaggtcctattctatctttacaagtatccttttctttcgtaacacttaaaaaacagttattaactatgttatttgtccaactactttgttaatgtctgtctaggcagaagcagtaactggtttgctaatcaccacataatcccacaatgtcacaagcatgttgtcaacatctaagatacccccttccccaataactcataaatggagaactcatgcctactggtcctagaatggctatataatatagcaagatgcaccaaggatatttatcttttcccctacagttggacatctagacaaaatacttttaaaaagtcagtgatggataatgaaaggaattcaactggagggaagacaatccagtccttttccctaacaagtttctgaagtattttacttcttttcttcttctgtagttcccaacacagagttagtcccatggtagataattatgcacttagtagaccaaagtagagtatatgccaatcaatcgactgctagaattaggtgttataaaaattctaaatattataattcactgaaggctagaaacattacagaaggtgttagagaggtagaagtcaatttagacagagtaagggacaacttctggggatccagccaacctgttataacccctcctgtctgcccctctttcgacagtgatgtatagtcatatttgtactacttaacacccatttctttaatccatctgctaaaattctaagcaaaattatcttcaacatgtagttattagttaagccaataaaacagtggccataaagattatgagtggcagaaggtaaactacaaagaattaaagtacctgttgcataaatgaaactgaacataatatttatatactacattcacctaataacgtaagaattaacagaatctaaaattgagatcctagagtcttctgaagggccaatataagagggaaataacaactaggtattattttccaggcactgaacatggtcatttttattgcgctttttttctaatcttcatgataaccctgaaaagctgaagctaagaggttgggtgatttcttcaactaccatacaactaacagtacaggtgttgttttttagatactttgaaccaaaaagccaagcaaaaaacacaaacacacaaatctaaagttttggagaacttgaagtgctttgttattgagataatttaatttaaagtagcaaaaacttccctaggaagcatataagctcaacatatatacctttcaattggatgtctttctaaaacttatgggtaaatacagatcactttactgctcacatacttggctttggtaaaataaatctaaaatatatctgtataatattttcattagtaaaactgtcctaagataatgaaaattgccagctccatatctacttttgtctacaatgatttttgagttttgaaaagaaaaaagaatagacttgatagaaactacaggagtatgaataaaaaatgttttagacattgttttgcttctgattatgacaaaataccacaatggaataacaagaatagtattatctaaagctaaatgatctcaggcttttaaacaatcaataagctgtaagagctctgtaattacctctgtgtgaatgttacattatcaaacactgggacaagtacaatcttgtatgaaatcactgtatgagatcaaataatcatatccaaaagaaatcacatactggatttaaacttgtccaaactgtgatcatttcaacctatgtggtaccatcctcttgcgttcacaaattccatcaatgtagtcattacacacttgtaaaggaagacttcaagtaatcccggctcataaaaaagttaaacattaacgaaatctcaaaagcatcaatgttatctcaaaacagtgacattgaacgctgaagaaataagtcttatgtgaccataaaaaatagttacaaaaatcaatgagtttatggggatggttttctgtttacaaagtgtaactgcttatggcaaagaccccacaggtctttctggtcatcctctacagaaaaaccaattctcctgtttcccttttttctttaaagactcgcctctgtccctttttttttaaatatacacctctcccaaaacgttttcatcgcaaaaaaaaagagttatgccattattaggaacagcgtgtcccaagacaagatctctatgatcctttgtatattcaagattgcaagaattgagctttaataactcatagaccataaacacaccctgttaaggttttccttcaaacagcaacattcccactcttgcgatccctaataggcgtacataagccacacaacacaatctttcaaaacgacacagatggtaggtgctctccaacctctctcgagagatcctcactgcacattctcctctaaagggcccacaaacactactgtcattcagagggatggtgactgttgagcgtgggtgggaaagaaagtgcacacgagatacctaactggatggggaaggttgttagaggcagccctccggtatcacgtaactagccaaacccgctacaaacttttgagagattaagttaacattcctcggcaattccacccttgacagctgaatccagagatgccagcaagtcgtgcacgtctactactcccgccacctcaactcgggaagagtctgcagccacatcccgcggtcggcatgcaccaggggctggggaagaagggagggctgggcgagctcaccttttccagctcgtcgtggagctccgccaggctaggccggagcagcttctcgcccagctgcgcggctgtgtgccggtagtgatcgatcctgggcacagcgtccatggtgttgtggccgaaggtgcgcaggtagtaggtgttggtgtgggtatcataatagtagtgctggtggtgcccactgccgccgccgccgccggagtgcaggctgctgccctcgctcagcaccgtgtccccgccgttctggaagctcacgttgggcccgtcgactccgaccccggcagcatctgacaggctgtcttcagccgacgaggaggcagctgggtccacgaagttcacgcggaagcggcccttggcttcctcgctgcctttagccggctcgctctcgccgctggcttccccgtccgcgggggtctgcttggcccccgccccagcaccagccgccgccgctgccgccgccgccgccgccgccgcagcagcggcccgcccggcgttctcggaaaccaggtccacctggaaacggctctggctcggggtgggccccaagggtctgcccagcccgtccccggccgccgcggggccctcatcgcggaccccgccgccgtcccggctcgcgggcgcagcatcctccggcaccgagggcacagccgtgccgggcagttccaccctggctgcggccagcgcagcggctgacggcgtctccccgaccccggccagtcccggggcgccggaggagggcgccgtgggccgcggctccatagctgcccgacccccggcggaactgcagagcccggcggacgtctccggcagcacgccctccacacccctggccggcggtggccacagccgcaagaccaggtgagagagtctttctccccgccgcctgcgggccgccgctagcctggacggccacagaggccaccggcagccgagcgagcgcgcgagtgtggcgggcgcggggcgggccccgctgtttaaagcctcggcggggctgcggcggcggcggctccggcagcagcacgcgggaggcggggccggaggctcctccgcccctcagcccgcccacccgcggtcccgcagcggcgcgcggctgacgctccctcagcgatccggccctccgcggctcctgcgcgaccccacgcaaaagcgccccgtgcgaagagcgcggccagccagtccgcaaagggcctcgggcagtgcgggcagcacgaacggcgcgatcggggagcaggcgcggctacgctccgcctcagtgatgtcgccgggaggatctccgcgcggctacctcctcttccgccgccttcctcccacgccttcacctccctcccccgccgcgctctgcggcgaaaaggagcgggctcccaggccacctcccctctctccacccaggggccgcgcgtcagtggacctgcagcccaggcaacggggctgcggacggcgcgcgtgccctgcctcgcctcacgccggtagctgatgctcccgcggcagctgccaccccagcgccccagccacggcttcagaggctctcgcacgctggctttttttttttccccccgctttggtgaactcgcagtacttgggctgagcccgaaatctcgcgagatgctgcaggcgtcagtgcggcttcccactaggcgcgtggtacccgaggccgggccggagccgcaggccagccgcgattccttcgggcgatgctgggggctttccggtcggggccgcagccgcttccggagccgcgggcgaggtgcgttccccagcctggtttgctctgggctctgacccgccgccgcgaatctccgctcgtaactccgggcctgaacctggaggagggaggatttcctctgtgcagctttcgagcggtagactcaccctgccaggcagacctagattggcataaccagagatcagttccagttgtgatgcagtgggtgtctacacacttctgatgacacctttattttaaaagctgatgttccaaggtgagaagggagcttctttgagacgtcatgttgtttcaagacgagttttaatttaaggcatttccaaaagtgatatgcagctcatctctcagaatacaatgccggcaataactacccgtggagtccttaccaggaggtttctgcgtgatttgggttgtgcagaattcctctgcttatatagaaacagaaaggtactcctctgcaggtctagtttctcttcggtaaaatgtaagggaatataactgtgttcccactttcttagcagcagaaatttttaaacctatagattatgcccaaagtcctaagtaaaatcaatgaatggcgtcctccaattacttggtttttatttatgtactttttttttttttttttgagacggagtctcgctctgtcgcccaagctgtagtgcaggggtgcgatcttggctcactgcaaactccgcctcctgggttcacgccattctcctcctgcctcagcctcctgagtagttgggactacaggcgcccgccatcacgccctgctaattttttgtatttttagtagagtcggggtttcaccgtgttagccaggatggtctcgatctcctgacctcgtgatccgcccacctccgcctctccaagtgctgggattacaggcatgagccaccgcgcccggcccttgtatttttaaactttgactttatggagacgaacaccatcgtttgctgaacact

SEQ ID NO: 10834 - DNA, 6000 bp, Homo sapiens
actttgttaccctccaccttttatttcttcttgtagggccaaaaatccatactttgatttttcactctgtgtgtgtacgtatatacatttttaaatcaattcctagcatcagctttgaagagtttctgcctttccaaaaactcttttctctcagcttcccccaacactgctctccaggctatttgacagtatggcagctcttccttaatttcctttgctaatggctcctcaatctctaacagacctttaaacaatctccaagtccaatgccagaccctattttctgttctcttatctaccactctccctaagtaatttagtccatgaccttaagcaaccaaatctttatatgtaaatatatatatttacatatgtttatatacagacacacacacacacacacacacacacacacacagagcctcctccacgactcttggaataagttgtctttgtctttataggctactgaaacagaatagcctcaaatacaaacttctcccaaccaccaaatctattcctcctccagtatttctcatctcaagcaacagtaccaacatctattaagtttctcaagttcaaaatctacaagtcagcttctttctcactcccacatccaatcctttgtgccaccaacctttactatctctcaaccagaccacagtaatcacttgagtctctttgcttccattcttgcccctgccaatccattctccacccagagcctaaagatgttaaaacaaaatgggtcatgtggctaccccacacaaaattcttcaatagcgtcccactacatttataatgaaaaatagttatctccttttagttatgttaatataccactctttctcaccccattaccttcatgtgcgctgtccctttggtcaggactgtcattccacccaatcatcaacttacccttcaggtctcagcttcaatgtcatacttctcaaaaaaacgccttcccaaaacccaattaaaattaggtcctattctatctttacaagtatccttttctttcgtaacacttaaaaaacagttattaactatgttatttgtccaactactttgttaatgtctgtctaggcagaagcagtaactggtttgctaatcaccacataatcccacaatgtcacaagcatgttgtcaacatctaagatacccccttccccaataactcataaatggagaactcatgcctactggtcctagaatggctatataatatagcaagatgcaccaaggatatttatcttttcccctacagttggacatctagacaaaatacttttaaaaagtcagtgatggataatgaaaggaattcaactggagggaagacaatccagtccttttccctaacaagtttctgaagtattttacttcttttcttcttctgtagttcccaacacagagttagtcccatggtagataattatgcacttagtagaccaaagtagagtatatgccaatcaatcgactgctagaattaggtgttataaaaattctaaatattataattcactgaaggctagaaacattacagaaggtgttagagaggtagaagtcaatttagacagagtaagggacaacttctggggatccagccaacctgttataacccctcctgtctgcccctctttcgacagtgatgtatagtcatatttgtactacttaacacccatttctttaatccatctgctaaaattctaagcaaaattatcttcaacatgtagttattagttaagccaataaaacagtggccataaagattatgagtggcagaaggtaaactacaaagaattaaagtacctgttgcataaatgaaactgaacataatatttatatactacattcacctaataacgtaagaattaacagaatctaaaattgagatcctagagtcttctgaagggccaatataagagggaaataacaactaggtattattttccaggcactgaacatggtcatttttattgcgctttttttctaatcttcatgataaccctgaaaagctgaagctaagaggttgggtgatttcttcaactaccatacaactaacagtacaggtgttgttttttagatactttgaaccaaaaagccaagcaaaaaacacaaacacacaaatctaaagttttggagaacttgaagtgctttgttattgagataatttaatttaaagtagcaaaaacttccctaggaagcatataagctcaacatatatacctttcaattggatgtctttctaaaacttatgggtaaatacagatcactttactgctcacatacttggctttggtaaaataaatctaaaatatatctgtataatattttcattagtaaaactgtcctaagataatgaaaattgccagctccatatctacttttgtctacaatgatttttgagttttgaaaagaaaaaagaatagacttgatagaaactacaggagtatgaataaaaaatgttttagacattgttttgcttctgattatgacaaaataccacaatggaataacaagaatagtattatctaaagctaaatgatctcaggcttttaaacaatcaataagctgtaagagctctgtaattacctctgtgtgaatgttacattatcaaacactgggacaagtacaatcttgtatgaaatcactgtatgagatcaaataatcatatccaaaagaaatcacatactggatttaaacttgtccaaactgtgatcatttcaacctatgtggtaccatcctcttgcgttcacaaattccatcaatgtagtcattacacacttgtaaaggaagacttcaagtaatcccggctcataaaaaagttaaacattaacgaaatctcaaaagcatcaatgttatctcaaaacagtgacattgaacgctgaagaaataagtcttatgtgaccataaaaaatagttacaaaaatcaatgagtttatggggatggttttctgtttacaaagtgtaactgcttatggcaaagaccccacaggtctttctggtcatcctctacagaaaaaccaattctcctgtttcccttttttctttaaagactcgcctctgtccctttttttttaaatatacacctctcccaaaacgttttcatcgcaaaaaaaaagagttatgccattattaggaacagcgtgtcccaagacaagatctctatgatcctttgtatattcaagattgcaagaattgagctttaataactcatagaccataaacacaccctgttaaggttttccttcaaacagcaacattcccactcttgcgatccctaataggcgtacataagccacacaacacaatctttcaaaacgacacagatggtaggtgctctccaacctctctcgagagatcctcactgcacattctcctctaaagggcccacaaacactactgtcattcagagggatggtgactgttgagcgtgggtgggaaagaaagtgcacacgagatacctaactggatggggaaggttgttagaggcagccctccggtatcacgtaactagccaaacccgctacaaacttttgagagattaagttaacattcctcggcaattccacccttgacagctgaatccagagatgccagcaagtcgtgcacgtctactactcccgccacctcaactcgggaagagtctgcagccacatcccgcggtcggcatgcaccaggggctggggaagaagggagggctgggcgagctcaccttttccagctcgtcgtggagctccgccaggctaggccggagcagcttctcgcccagctgcgcggctgtgtgccggtagtgatcgatcctgggcacagcgtccatggtgttgtggccgaaggtgcgcaggtagtaggtgttggtgtgggtatcataatagtagtgctggtggtgcccactgccgccgccgccgccggagtgcaggctgctgccctcgctcagcaccgtgtccccgccgttctggaagctcacgttgggcccgtcgactccgaccccggcagcatctgacaggctgtcttcagccgacgaggaggcagctgggtccacgaagttcacgcggaagcggcccttggcttcctcgctgcctttagccggctcgctctcgccgctggcttccccgtccgcgggggtctgcttggcccccgccccagcaccagccgccgccgctgccgccgccgccgccgccgccgcagcagcggcccgcccggcgttctcggaaaccaggtccacctggaaacggctctggctcggggtgggccccaagggtctgcccagcccgtccccggccgccgcggggccctcatcgcggaccccgccgccgtcccggctcgcgggcgcagcatcctccggcaccgagggcacagccgtgccgggcagttccaccctggctgcggccagcgcagcggctgacggcgtctccccgaccccggccagtcccggggcgccggaggagggcgccgtgggccgcggctccatagctgcccgacccccggcggaactgcagagcccggcggacgtctccggcagcacgccctccacacccctggccggcggtggccacagccgcaagaccaggtgagagagtctttctccccgccgcctgcgggccgccgctagcctggacggccacagaggccaccggcagccgagcgagcgcgcgagtgtggcgggcgcggggcgggccccgctgtttaaagcctcggcggggctgcggcggcggcggctccggcagcagcacgcgggaggcggggccggaggctcctccgcccctcagcccgcccacccgcggtcccgcagcggcgcgcggctgacgctccctcagcgatccggccctccgcggctcctgcgcgaccccacgcaaaagcgccccgtgcgaagagcgcggccagccagtccgcaaagggcctcgggcagtgcgggcagcacgaacggcgcgatcggggagcaggcgcggctacgctccgcctcagtgatgtcgccgggaggatctccgcgcggctacctcctcttccgccgccttcctcccacgccttcacctccctcccccgccgcgctctgcggcgaaaaggagcgggctcccaggccacctcccctctctccacccaggggccgcgcgtcagtggacctgcagcccaggcaacggggctgcggacggcgcgcgtgccctgcctcgcctcacgccggtagctgatgctcccgcggcagctgccaccccagcgccccagccacggcttcagaggctctcgcacgctggctttttttttttccccccgctttggtgaactcgcagtacttgggctgagcccgaaatctcgcgagatgctgcaggcgtcagtgcggcttcccactaggcgcgtggtacccgaggccgggccggagccgcaggccagccgcgattccttcgggcgatgctgggggctttccggtcggggccgcagccgcttccggagccgcgggcgaggtgcgttccccagcctggtttgctctgggctctgacccgccgccgcgaatctccgctcgtaactccgggcctgaacctggaggagggaggatttcctctgtgcagctttcgagcggtagactcaccctgccaggcagacctagattggcataaccagagatcagttccagttgtgatgcagtgggtgtctacacacttctgatgacacctttattttaaaagctgatgttccaaggtgagaagggagcttctttgagacgtcatgttgtttcaagacgagttttaatttaaggcatttccaaaagtgatatgcagctcatctctcagaatacaatgccggcaataactacccgtggagtccttaccaggaggtttctgcgtgatttgggttgtgcagaattcctctgcttatatagaaacagaaaggtactcctctgcaggtctagtttctcttcggtaaaatgtaagggaatataactgtgttcccactttcttagcagcagaaatttttaaacctatagattatgcccaaagtcctaagtaa

SEQ ID NO: 10835 - DNA, 6000 bp, Homo sapiens
tgattataaaaagggttagactgagccgaattggtatatagttcaaacaaaacgaatgatttcgactcattaaattatgataatcatatttaccaaatgcctctcatttacataaatattatactagaatttaccatctcacttctaggaatactagtatatcgctcacacctgatatcctccctactatgcctagaaggaataatactatcactattcattatagccactctcataaccctcaacacccactccctcttagccaatattgtacctatcgccatactagtctttgctgcctgcaaggcagcagtaggcctagccctactagtctcaatctccaacacgtatggcctagactacgtacataacctaagcctactccaatgctaaaactaattgtcccaacaattatattactaccactgacatgactctccaaaaaacacataatttgaatcaacacaaccactcacagcctaattattagcaccatccccctactatttttcaaccaaatcaacaacaacctatttagctgctccttatccttctcctccgaccccctaacgacccccctcctaatactaactacctgactcctgcccctcacaatcatggcaagccaacgccacttatccaatgaaccactatcacgaaaaaaactctacctctctatactaatctccctacaaatctccttaattatgacattcacagccatagaactaatcatattttatatcttcttcgaaaccacacttatccccaccctggctatcatcacccgatgaggcaaccaaccagaacgcctgaacgcaggtacatacttcctattctacaccctagtaggctccctccccctactcatcgcactaatctacacccacaacaccctaggctcactgaatattctattactcactcttactgcccaagaactatcaaactcctgagccaataacttaatatggctagcgtacacaatagcttttatagtaaaaatacctctttacggtctccacctatggctccctaaagcccatgtcgaagcccccatcgctgggtcaatagtacttgctgcagtactcttaaaattaggcggctatggtataatacgcctcacactcattctcaaccccctgacaaaacatatagcctaccccttccttgtactatccctgtgaggcataattataacaagctccatctgcctgcgacaaacagacctaaaatcgctcattgcatactcttcaatcagccacatagccctcgtagtaacagccatcctcatccaaaccccctgaagcttcaccggcgcagtcattctcatagtcgcccacggacttacatcctcattactattctgcctagcaaactcaaactacgaacgtacccacagtcgcatcataattctctctcaaggacttcaaaccctactcccactaatagccttttgatgacttctagcaagcctcactaatctcgccttaccccccactattaacctactaggagaactctctgtgctagtaaccacattctcctgatcaaatatcactctcctacttacaggactcaacatactaatcacagccctatactccctctacatatttaccacaacacaatgaggctcgctcagccaccacattaacaacataaaaccctcattcacacgagaaaacactctcatgttcatacacctatcccctatcctcctcctatccctcaaccccgatatcattaccgggttttcctcctgtaaatatagtttaaccaaaacatcagattgtgaatctgacaacagaggctcacgaccccttatttaccgagaaagcgcataagaactgctaactcatatccccatgtctaacaacatggctttctcaacttttaaaggataacagccatccgttggtcttaggccccaaaaattttggtgcaactccaaataaaagtaataaccatgtacgctactatacccaccctagccctaacttccttaattccccctatccttaccaccctcattaaccctaataaaaaaaactcatatccccattaagtaaaatccattatcgcatccacccttgttattagtctcttccccacaacaatattcatatacctagaccaagaagtcattatctcaaactgacactgggcaacaacccaaacaacccaactctccctaagcttcaaactagattatttctccataatatttatccctgtagcactgttcgttacgtgatccatcatagaattctcactatgatatataagctcagacccaaacattaatcaattcttcaaatacctactcatcttcctaatcaccatactaatcctagtcactgctaacaacctattccagctattcatcggctgagaaggcgtaggaattatatcctttttactcattagttgatgatacgcccgagcagatgccaacacagcagctattcaagcaatcctatacaaccgtatcggcgacatcggtttcatccttgccctagcatgatttctcctacactccaactcatgagacccacaacaaataaccctcctaagtgctaatccaagcctcaccccactactaggcttcctcctagcagcagcaggcaaatcagctcaattaggccttcacccctgactcccctcagccatagaaggccccacccctgtctcagccctactccactcaagcactatagttgtagcaggagtcttcctactcatccgcttccaccccctagcagagaataacccactaatccaaactctcacactatgcctaggcgctatcaccactctgttcgcagcagtctgcgcccttacacaaaatgacatcaaaaaaatcgtggccttctccacttcaagccaactaggacttataatagtcacaatcggcatcaaccaaccacacctagcattcctgcacatctgtacccacgccttcttcaaagccatactatttatatgctccggatccatcatccacaacctcaacaatgaacaagatattcgaaaaataggaggactactcaaaaccatacctcttacttcaacctccctcaccattggcaacctagcattggcaggaatacccttcctcacaggtttctactccaaagaccacatcatcgaaaccgcaaacatatcatacacaaacgcctgagccctgtctattactctcatcgccacctccctgacaagcgcctatagcactcgaataattcttctcaccctaacaggtcagcctcgcttcccagccctcactaacattaacgaaaacaaccccaccctactaaaccccattaaacgcctaacaatcggaagcctatttgcagggtttctcatcaccaacagcattctccccacatccaccccccaaatgacaatcccactttacttaaaactcacagccctaggcgtcacttccctaggacttctaacagccctagatctcaactacctaaccaacaaactcaaaataaaatccccactgtatacattttacttctctaatatactcggattttaccctagtatcatacaccgcacagtcccttatctaggccttcttacaagccaaaacctacccctactcctcctagacctggcctgactagaaaagctactacctaaaacaatctcacaacaccaaatctccgcctccatcatcacctcaacccaaaaaggcataatcaaactttatttcctctctttcttcttcccactcatcctaaccctactcctaatcacataatctattcccccgagcaatctctagtacaatatacacaccaacaaacaatgttcaaccagtaactactactaatcaacgcccataatcatacaaagcccccgcaccaataggatcctcccgaatcagccctgacccttctccttcataaattattcaacttcccacactattaaaatttaccacaaccaccaccccatcatactctttcacccataacactaatcctacttccatcaccaaccccactaaaacacttaccaagacctcaacccctgacccccatgcctcaggatactcctcaatagccaccgctgtagtatatccaaaaacaaccatcattccccccaaataaattaaaaaaaccattaaacccatgtaacctcccccgtaattcagaataataacacacccaatcacaccactaacaatcaatactaaacccccataaataggagaaggcttagaagaaaaccccacaaaccccattactaaacccacactcaacagaaataaagcatacatcattattcttgcacgggctacaaccacgaccaatgatatgaaaaaccatcattgtatttcaactacaagaacactaatgaccccaatacgcaaaattaaccccttgataaaattaattaaccgctcatttatcgacctccccaccccatccaatatctccgcatgatgaaacttcggctcacttcttggtgcctgcctaatcctccaaatcaccacaggactattcctagccatacactactcaccagacgcttcaaccgccttctcatcgatcgcccatatcacccgagacgtaaattatggctgaatcatccgctaccttcacgccaatggcgcctcaatattcttcatctgcctcttcctacacatcggccgaggcctatattacggctcatttctttacctagaaacctgaaacattggcatcatcctcctacttacaactatagcaacagccttcatgggctatgtcctcccatgaggccaaatatccttctgaggggccacagtaattacaaacctgctatccgccgtcccatacatcggaacagatctggtccaatgaatctgaggaggctactcagtagatagtcccaccctcacacggttctttacctttcactttatcttgcccttcattatcacagccctagcagcgctccaccttctattcctacacgaaacaggatcaaacaaccccctaggaatcacctcccattccgacaaaatcaccttccacccctactacacaatcaaagacatcctcggcttatttctctttcttctcaccctaatgacgttaacactattctcaccatggttaggccttccctaaccatgctcctcaaagagaattaggtcttcccattattctctctcacagcactcctttctgatgcagaggcagtatctgagccactaacagtatggattgcctggaatccaatcctgactccacacttactagctgtgagaccttgggcaagtcacttagcaagtctcagtttcctcctctgtaaaatttgggaaatctatttcacagagttctgtgaagattaaatgaatgaatacatgtaaagtccttcccatagtgccatgacccatagtttaagtgttcactaaccatttgctgttaagattttccttcctagggccgggcaggtggctcacgcctgtaatcccagcactttgggaggcggaggtgggtggatcacgaggtcaggagatcgagaccatcctggctaacacggtgaaaccccgtgtctactaaaaaaataaataaataaatacaaaaaattagctgggcgtggtggcgggcacctgtaatcccagctactcgggaggctgaggcaggagaatagcgtgaacccaggaggcggagcttgcagtgagcccagatcacgccactgcactccagcctgggtgacagagcgagactccgtctcaaaaaaaaaaaaaaaaagattttccttcctggcacttagcataacttgtaatgatacattaacttttttctttgtttacattctccctcccccactatactgtatgctctgtgaggataaggacagtatcggctttgttaactgataccccagtgtctggcatagtgtctagcctacagtaagtgtttgataactgtttattgttaagtgcataaaaatcaagaaaaactttctagaaataggtgggatgtgaacaga

SEQ ID NO: 10836 - DNA, 6000 bp, Homo sapiens
tgggacccagaaacactagataccatatggctttcctgaagattgaagcaaccattgtgttcctgggtctccattgaacaatcacagtggggcatttctggattccagaataagctttctagaatggcttagaaagtcagctgttgacactgagccagggagctgaggcccaacaaaacagacttaagtggcagtaaaggaaaagggagaagagcctcaaagtccatgctggacaatagagcctggtaaacaccggatgaggtgggcgtggaggcgggaaggaacatgactcagtagatgtccctctgttcaacagaaaccctgtgcccagctagatcaaataccattagctatcccctcaggatgagagcttaatgtggccttttcctcgcaatgctttattttgggtgttttaataatcctttagcggatgcctactcagcttgtctgaaaacttcccggcagccctgggacaagggtctgccatcttcatcagccccatatgagagatgagaaactgaggctccgagatgctaagcaagctggcgtggagaagcctaggttcaaagcttggttggaccgcttccaaagtccttgctcttaaccccttgagtacaaatgctttgcacctagggctggagccagagcccctaggtcatttctctcccagggcactaacgcatggatagcatggtacggattatgtcaggttgcatttcctcaggacctcgtttccttggactgtgtgaaatagaatgagcttatgagtgtgcaagttcctgatctcttctctcagttctacttctctgtggggcacgggctgatacagaagcaatgggagatttcggtgaccagatgtgatcagcgacctccgtgggactgggaaactcagctttggactcagggcaaagagctatgaggggagaagcccatttccagctggagaactctccttcctaccacacacatggatggcctggaaaccgatcttgcccagatcccaggggactgagtgccacagtttcccacttgttaagtcaaagccgtgtttccttcatagcccactgaggaccccaccctgcatttctgctggaaggagcctcatgtaggctgtcctcgtgccccaggcccaggcagccaagggcagcttggatgtgccaagttacagggaagggacatactttccgccaccacctcctcttcggtttcctctgcaccatcatcaaattctcctacttccacctggacaggattagctcccacagatacctggaattgagggagaagaatgggtgaaatggccccactcccatcccagacccataagggtagctgaagggttccaggtcacagaaagcacaaacgcagggttgggaatccagatttaatctataggcctgctgtgttttgcagtatgcctgggattctgttgagctgccttagaggtcaccaggggtgttagggaaagagagtgtgaaaggaaaatataccttggaccccaaaatcactaagctaaggggaaaagtcaagctgagaactgcataggacaaacctgcctcctattctatgcagtcatccctctgaggctcacctgagacaaacgcttatctgattgcttcctctcccctattgtttatgtaaaaatgcagattcactgagccagattaaattgtgtattcaggggaaggctgatcaaggactcaaaggaatgcaaccatttgtctcttatctacttctaacctggaagccctcacttctcaagttgtcttgccttagcgaactcaaccaatgcacaatttagacatgttgattgaagtctcgtgtctccctaaaatgtatgaaagcaaactgtactcccgaccaccttggacacatgtctcagaacttcctgaggctgtgtcacaggcacattcttaaccttggcaaagtaaactttctaaattgactgagatctatgttcacaagagggtgtcaagcctccacccctgccagccacacccaagcatctcccctttcctctgtgtgtgtgtgtgtgtgtgtgtgtgtgtgtgtgtgtgtgtgcttgtttgtttgtttgtttttgagatggagtctcatgctgtcgcccagggtagagtacagtggcgagatcttggctaactgcaacctccacctcccgggttcaagcgattctcctacctcagcctcccgagtagctgggattacaggcacccgccaccacgcccagctaattttttgtatttttagtagagacagggtttcaccatgttggccacactggtcttgaactcctgacctcgtgaattgcctgcctcggcctcccaaaggattacagggattacaggcatgagccaccgcacccggcctcctctgttttacgtttgcaaaaactgtgggtaatcatggaagaacaactgttgcatagcttaaaaaacaaaaattttaaggtcctggtccccaaacgtagggttccgttgaaggtttgggaagcattcaggagtgtgtcaggatgtgggatatactcagggtttgcatctatgctatgtgtgtacagggagacgaatgccccactctagcattgagacccacagcatccgccctaatttctcagggcacagatacaggtagagaggggctaaggggctgcggtcactgcccacatacctcagtcacctctgccacagtttcttccaccacctctgtctcatcaggcagggcttcttgctgctgttggaaagagaaagtagcgttcagaggggtcaggaataaggccagcttcacctccaaagtgcctgtggcctcggatacaggctaggggagcttggagagcagcttactggagatccccaaagttgtgcctcatggactgccatggtgagggacagaacaaagaagaagccagtcatgtgagcaccgtggaacactcaagcagctcccattttatatattttatatcctaggtgtctacctaagatttagcttggaaaagtatttctgctgctttgaattcttataaagtctgaaaatcactgatccagaccaattctttcactttacagataggaaaattgacatccagaggggatgacactgtgaattttaacagatgtcatcatcttcctcacagtgtgatattattagtagtattattaggcaatttttcttgccatttcaacttggagtaggaggaagcaagaaaacacacaactttgaggcccttagctggctggagctgcttcaaaacttaatgccaactttgagaaacttttgcctccatctaccagcctgatcaagattgccagggtctgccatcactcccacttcttagtaaacagaggatgaggggatcacaggttgaaagaaattgcactttttgcctgccctgtttcttcctcctctccttgtgaaggcttccagatgagctgtggataactactcctgtccctgcatgcaatgcttcgaggaactgtctgtcaatcaaggggccccactctcacctggccaagaagctggctcaggacccaagctcagccagattggctctcattttttgaatttataaaaaccttcttggcacattctctcaagatgtgaaaattgctggagttgattcattcagacagcaatatctcagagactgtccattagttcttaactcccaaagcctagagctgcccttttccagtcctccccaaggcctttaatattataatctacctctgtatcttcccctccttccccaatttagtcagattgaactgttgcttacaaccaaacaaccctcactgtttcagaagccaacacattcctctctctatagcttgaatctcttctaataccacccctaccagaaatcccccacatcctgtctcctgcctgcttgaattcctcatatgacaaagaggtcatttccttctaaagcaatcctagttcattgctgggaggctctgactactaagaagtttatctaacattacatggaactctctcttctctgatacctccacccaatggtcctcatcccagtttttatcccgagcttcctaacttaagaaaaaaaaaagaccactaacttgaaatggggaagtccctgttccctttcagcatccagggctggcaggctcagaacccctggtgctagcggtaggaatgaaaacaagaagacatgatatttaggtacttacaggggctgccaaggccctcccggccaggcaaaggagaaagaagatccaggccctcatggtgctgggaaccctatggggaggagagattgagagttcagtgagggtgagacttccttatggagatttccttctgaattcctgatatgtgcaagataatgttagatggtacaagttaaatgatagtgaaaaacatgaggaggttggttccatttaatattctttcaattctgcttatatgagaagaaagtctcagtttggtgccaagatgtcttaaacacctcctttatactcatctatctccttttttaacaaaaagagaataagcctccagctcagagcttccacaggaagttatatccagctggaactgaatcaagttgttttgttttttttatgtgtttgtttttacagtttccttctatttatgacaaaggtacacagagttttttccatttatggtagtgatataaaatctgcttttgtaatacatttattaaagtttttgcaaagtgattcaactaaggtgatgggctaactagttaagtttgggcaatgccaaaccagatcatcttcaaggtcccttcaatccctgatattctaaaattatttttttccctaaacccaatctctcctcttcctcctctgtcgcctcctccccctccttcctactccctctgcaatgggagaagttaataggcaggaacttcttgccagtttgggacaatgagatccacattctaaaacaaagaacaatagtcttggaatgtaacccatggaaacttgagggtggccacatttttctccattctacccagaagagacagcacttctttaggtcctgtacggaaaccatccagatgcttccatgtgttgcagaggggatgttagctgagatctagaaaatacctctgttctggtaactgttaaggcctcattctctaaatgccaagctctagactctaatactctcatgactataagggattttggagcagtatctcctctgaggattcaaaactaaaatgctattcctaacagaggctctgtggtggagacatttcatttcttgcactaactaaatggcttttcattctcaagtgactttagaaagttctttcttttactgatctaaatgtgcctccctcaaactttctgatctgtctaccccatctcccctgcagccacaaagaacaaacctgctctctctacccacaaataaccttccatcaggagcaacagtggccatgtcttccctctttcttctcccaaaacctccctgtcaggctcatcatcccttatttcttccaagacttctcaactgaccaaatggtggtgggaggtaacccggcatcatggagaaaaatactcagcttgaaattaaatgccagggggtcttgttctaccacagtagtatcaagtcttttggtctctctagaccttggttcccccatctatcaattgaaatgggtagactaggtgaactttgaagtggcagcctcggtccttaaaatgctcttaagacaccccaagcacattctggtcttgacacatatggtctcctctgggatcatatgtcttcacttgtactatagcatttgggaagcagaaacaggcagaggaagagcccacttcataatggtcctttcttgggcttaaagagacacaaaacctcaccccctattgcacagagtgaatgaagtaaaactaacagaaatgtaaaggacctgggggtttggtattgcttcacaataaccccaacttccagaggagtctagtcttcccttttgaggcagcttgtggaatgttcctcccctca

SEQ ID NO: 10837 - DNA, 6000 bp, Homo sapiens
ccacttcctctggaagtttgagcaagctctttaacttccctgacttttccaccattagcaaaatgggaatacgaacacctaaccttaggaggcttctgggaagcttcaatgaaacaacctatgttagttcataggtcacctaacaatgagctactatacccaatagacactcaaacactcattagttcataaaatactttgtaaccctctaatctgtcacaaagaaaactgatttggctgcatttcaggtaaatgatgcaatattaagagttacctgtgtacagaatgaccttaaagcaacatttttatatccaaatttctaaaattaattcctcaaattactgccaatatattttagcttttctttatagcacaccaccaagttatgattcaaaaaaaagaaaaagaaggccggcgcggtggccaaagtgctgggaggccaaggcaggcagattacgaggtcaggagatcgagaccatcctggctaacacggtgaaaccctgtctttactaaaaataaaaaaaaattagccgggcatggtggtgggtgcctgtagtcccagctactcggtaggctgaggtgggagaatggcgtgaacctgggaggtgaaggttgcagtgagccacgatcatgccactgcattccagcgtgggcaacagagcaagactctgtctcaaaaaacaaaaagaaaaagaaaaatcagccaagaacgctggaccagtggtcacagaaaaggaaagggaaagaaagaatttgagattaaagaattgtcttgaaacagaaatgaatgcctaatggatagccagcgaacaggcctgtggcagcctcccagtgtggtatttggtcgagtatctgccactggccctcaggacatcaatattctcatccgattgtggctgtagttgtgggtggctgaaaccgtggtgctaaaatactgaatgccagtcttagtctctctcatggttggagacaactgactagagacaccatgagcagccattttcttctctgatgtctcagtactgcatgcagaacaaaggcacaatcaatgctgctgttctgggaagcaccctgtggcaatgcagagcaccctctctcatctctcagacacagcaacttagcagccagataagctggtcaccattaggaatcatcgatatctaggagtaaggagatgagggagaggaaaagtccctggtgagaaagggttgtatgtatcctacagggaacaaaaagatgaaacactatgttcccctgggactaagtgcactgactaggatcacccatggggaacctaatcatgggccctcatgcattcaaaatacaactaggtaaccctgggctaggtactatgggagatgtacacaggtacaatccaagtctctgtcctcaagctgcttataccttagctggagagagacatgagtaaacagttacatgaccctgttcataatctaagttgcatttagtcttgtcctaactttgccactagttcgttgtcaccctgggcaaactacattacccctgggcttcagttgccccatcctttctagctctaatattgataggccctatatcaaagctctaagatgcttaattaatatcaaaacaaggctgggctgggaacgatggctcatgcctgtaatcccaatactttgagagggtggggtgggaggactgttgaggtcaggatttcaagaccaacttaggcaacatagcgagaccttgtctctacaaaaaatgttttaaaaattagccaggcatggtggcatgtgcctgtagtccaagctacttgggaggctgaggcaggcggatcacttgagcccaggagttggagactgcagtgagctatgatcacaccactgtactcaaggctagatgacagaggaagaccccatctctaaaaacaatgtttttaatttaaaaaataagtctgaaagaacaccacaaacaagtataagtctaggaatgaattctaaatggaaagaaaagacaacagactaatgtctgagactaccaggtctgtataaagcataagatctccacctcctctccaggctgtcctgtgccccacccaccgaaaccaactttgctacggtcactgatgtcctccatgctgcttcctccaatgggcatcccctggtactcatcttacttggtgtctcagcagaattcatacttccctccttttgaaacaccatcttcttttggattctgtgacatgacattgacctgattttcttcccttttttttttttttttttgagacaaggtctcgctctattacccaggttgcagtgcagtagcacaatcatagctcactgcagcctcaaactcctggcctcaagcaattctcccgccttggcctcccaaaatgctgggattacaggcaagagccaacagcctttttccatttatctaacaaatctttcttgtctttgccaactcctcctcttctaactcacccctaaatggaccaagtcctgagccatcctctcttctcacactataatttcttcttgagtcatctcatctattaccttggcttttttccataaatacctatgattctccaattatctccaacccagacctcacctctggctttctaattcagacataaattttctggaagttgacatttggatgtctcacagcactccttaaacagtgtccaaaccagaaatcttgatccctgcatcccaaacccattcctctcccacacttccccagctcagtaaatatcacttccagccacctatttcctcctttcctccaggcccgaaatctgggagtcatgttgcctaggctggagtggcacgatcttggcttactgcaagctctgcctcccgggtttacaccattctcctgcctcagcctcccaagtagctgggactacaggcgcccgccaccacgcctggctaatttttttgtatttttagtagagacggggtttcaccacgttagccaggatggtctcaatctcctgatctcgtgatctgcctgtcttggcctcccaaagtgctaggattacaggcgtgagccaccgcgcccagcctggaagtcattcttaatacccttcactccttttacccttgccatgagccctacaaacaactaacttaccactaatagtcacatcgtccctcttattaatcatcatcctagccctaagtctggcctacgaatgattataaaaagggttagactgagccgaattggtatatagttcaaacaaaacgaatgatttcgactcattaaattatgataatcatatttaccaaatgcctctcatttacataaatattatactagaatttaccatctcacttctaggaatactagtatatcgctcacacctgatatcctccctactatgcctagaaggaataatactatcactattcattatagccactctcataaccctcaacacccactccctcttagccaatattgtacctatcgccatactagtctttgctgcctgcaaggcagcagtaggcctagccctactagtctcaatctccaacacgtatggcctagactacgtacataacctaagcctactccaatgctaaaactaattgtcccaacaattatattactaccactgacatgactctccaaaaaacacataatttgaatcaacacaaccactcacagcctaattattagcaccatccccctactatttttcaaccaaatcaacaacaacctatttagctgctccttatccttctcctccgaccccctaacgacccccctcctaatactaactacctgactcctgcccctcacaatcatggcaagccaacgccacttatccaatgaaccactatcacgaaaaaaactctacctctctatactaatctccctacaaatctccttaattatgacattcacagccatagaactaatcatattttatatcttcttcgaaaccacacttatccccaccctggctatcatcacccgatgaggcaaccaaccagaacgcctgaacgcaggtacatacttcctattctacaccctagtaggctccctccccctactcatcgcactaatctacacccacaacaccctaggctcactgaatattctattactcactcttactgcccaagaactatcaaactcctgagccaataacttaatatggctagcgtacacaatagcttttatagtaaaaatacctctttacggtctccacctatggctccctaaagcccatgtcgaagcccccatcgctgggtcaatagtacttgctgcagtactcttaaaattaggcggctatggtataatacgcctcacactcattctcaaccccctgacaaaacatatagcctaccccttccttgtactatccctgtgaggcataattataacaagctccatctgcctgcgacaaacagacctaaaatcgctcattgcatactcttcaatcagccacatagccctcgtagtaacagccatcctcatccaaaccccctgaagcttcaccggcgcagtcattctcatagtcgcccacggacttacatcctcattactattctgcctagcaaactcaaactacgaacgtacccacagtcgcatcataattctctctcaaggacttcaaaccctactcccactaatagccttttgatgacttctagcaagcctcactaatctcgccttaccccccactattaacctactaggagaactctctgtgctagtaaccacattctcctgatcaaatatcactctcctacttacaggactcaacatactaatcacagccctatactccctctacatatttaccacaacacaatgaggctcgctcagccaccacattaacaacataaaaccctcattcacacgagaaaacactctcatgttcatacacctatcccctatcctcctcctatccctcaaccccgatatcattaccgggttttcctcctgtaaatatagtttaaccaaaacatcagattgtgaatctgacaacagaggctcacgaccccttatttaccgagaaagcgcataagaactgctaactcatatccccatgtctaacaacatggctttctcaacttttaaaggataacagccatccgttggtcttaggccccaaaaattttggtgcaactccaaataaaagtaataaccatgtacgctactatacccaccctagccctaacttccttaattccccctatccttaccaccctcattaaccctaataaaaaaaactcatatccccattaagtaaaatccattatcgcatccacccttgttattagtctcttccccacaacaatattcatatacctagaccaagaagtcattatctcaaactgacactgggcaacaacccaaacaacccaactctccctaagcttcaaactagattatttctccataatatttatccctgtagcactgttcgttacgtgatccatcatagaattctcactatgatatataagctcagacccaaacattaatcaattcttcaaatacctactcatcttcctaatcaccatactaatcctagtcactgctaacaacctattccagctattcatcggctgagaaggcgtaggaattatatcctttttactcattagttgatgatacgcccgagcagatgccaacacagcagctattcaagcaatcctatacaaccgtatcggcgacatcggtttcatccttgccctagcatgatttctcctacactccaactcatgagacccacaacaaataaccctcctaagtgctaatccaagcctcaccccactactaggcttcctcctagcagcagcaggcaaatcagctcaattaggccttcacccctgactcccctcagccatagaaggccccacccctgtctcagccctactccactcaagcactatagttgtagcaggagtcttcctactcatccgcttccaccccctagcagagaataacccactaatccaaactctcacactatgcctaggcgctatc

SEQ ID NO: 10838 - DNA, 6000 bp, Homo sapiens
cattggagatacccaaaagaatcagtttaagctgaggtcactgactgaattcttatctgcagttgattcaaatcagagaacctccactgggccctcacgaagcaaggcttgcgtaaagaaaagttttctatttgttcagtgacagctatcacaatgaagacagagaattgggctctctttttaaacaattttggaacggggaatgcattgtttcttctcaatcctggcctgggagaaatcactattgtgaacaacattgctcggaccccaacattctcacttgcaatcttcatgccagctactctatagttcagtaatatacaaacccaccgtctcctcactgtcacacttgaatgttgtgaatgtactcttcattcctattgtctcatgagctggtttagagacaggctctgtgtcatatttacctttcgtcgctctccctgctgccccgcttcctctcccccagcctttgaatgtagcacattgctgtgttaaagtgtccaaaaagcactcatcaaacaacacatccctcttaccctaaattcaagagtaatttgaaatgcctgataagaattcttcagaggttcaaacgttacataggagtggccaaagaactgaggatactggataacaatatctgaagaagaaaaaagacaacacaaaagaatgctatttcctcacttcttcaaaagcaaaaatcaatatacaacgttgcctgaatatcattaagtgagaaccctcactaatctattcaacttcgctatcttcttttctatactttttatacctacaactctcattcttggagactttgagcttctgaaattcttaggaagaagctgcatttttggagaccggcactggctttcctaagaagaaaccaatggcattagggccactgtcacttgccctcagctatacaggcctttgtgtaatataagttggcccagttgttatccttcttaaccctcatgcataagctttaactgcgtattttggtagagatgtgattatagtaaaacctacctctctaagatagtatcaggatgatttattgattgctttaaagggactacacatttggcacacatagaaatagggctgctgtctacttagaagcaatgaaagttgcctcacaatttgccttgtatagttaatttaatgaccaatatgtggacgaaggtacttatcttggagaagggactagaaggaactatgtttggaccacaaaactgccctctggctgtcaatggtgccaattcatcaccacttcttcctctcccccaagggcctaccttctgagcagctctcaccacctttgcccagggtgcactggcatcgcgagcccccccaggtgtagtcattgacacagaagctgtcagcagagcagagagtttcatcacaaggcatgtcaaagagccttgacattatggccacaccattcttcccctttctctgtatgggaatgggctggggagccaccgtggtcacagggagagatgctgaggtaggggggatgagcctagaaatggtctttgggttagatatagacatcttcttgctttccaccaaaaatttcttattccctcctttggtagcaggaagtggtttaacctaaagccagagaaggaaaggggttcaagatgaacacagagcatggcaattggactgttttatttatagttgttgcctagtacttgaaaacatggtcacttccaaaaaccctaggatggagatggggaagacagcactgactctaatttatggacaaagagcttgatggtcagggacttatagtgcttttccttgtattactcagaaaatcagcagtaaaactgatattacattatttattcttattacaatatgatgaagatgcatgactttgtcaaggaattgttcatttccttataatacttgattttctgaaatttcccttggtgggaaatagaaatatgtttttgccagattgtgaagtccgcaggcaggagctgcctatggaacatcaggatggctagtacttccctactactgatttatcagcacctggagactgatcatcagacaaaacaaatcagtgttaaaagcaaatgggcacatttaagttttaagtaaaatgtttatggtccattggctaaattgtcttgttcggcaagaaaacacaaacaccctgggttttaagagcagagattattgttacctcctcaaaggaaatatccaaatctaagtcgtcttcaaatccttcatcatcctcaccagctcccatgtcggtgatataacggggtccatagcggccacttcccgcctcctcagggccttcacaaagaaaagcagcacacccttcatcagcacaggccttctttgcactattgtctagcctaactcagccacaggcagagctgtaccgaatggaacgcagtgtattggaaacataacaatgaattcaacacagaaaaggaagcgtcaatgaccaaaagatataaaaaaagtttcctctcataagttactaaggaatttccaactgaaaccagaaagagcttccattttatactgacaagactggcaaaaatgtcaatcagataataaaaatattactaaggacgggatcaatgaggactcatatggtacttgtataaactggtccagtcactttgtgaaatacttggaaatatttcataaagtagatgtttgttcatacctagcaatcccatcccaacttacaaaagctggagaaactcctgtacctgtgtaccaaaaggcgtgttcaaaacaggttcatagcatcagaatttgtaatagtaaaaaatactccaaatatgctatttataagaacaaacaacatcccaaatgtccatcaacaaagaatgactaaattatttatagtatatctatagaatggagtaccatatagtaggggaaaggaatgaatcatcatttaatatatcaacatggcttaatctcacatgacttcatacaaaaaaaatgcaagttgcaaaagaatgcatctagtttgatgacattaatataaaagacaacagcaaacaaaacaatatattacttagggatacatatatatgtaatttaaactctttaaaaaagcaggacaaacacataaatacccaagggaagatagaaaagggatgtgaatgaggtgtgattcacaggggcctttgagagtattccatcatattctgtttcttaaggtaagtgctgggtacctgtaaatattcatattttttatatgttgtatatatacatatatatacttttgaagtacaaagtatttcactaaaaggtctttaaaacaaaaaagggagattatagtaaacactcccacaaccaaaaaaagggggccctataaggtatcttgggggtcatccatttcatccatcttagcaggacaactaaatctttcagaactgaaaggtgggtgagaaaacctctcagacgtcaatacagagcatcatcttttggggaacattcagttggcatttttattcaactgtcatccgcagaatccactgatccacagcgctctgatttaggttgcacatgggaaacactccaccaggaggtggcagccttttaaagagcggctccagggcacctgcatgtcctcacagtggatttgggccagcacaggtattaacttgctgccctctctcaactgaaaaagccaggcaccagcctttagggcagtaacaactttggcaacagaaactggctttggtaggatgctgccactcattagttattagacatccagtgtttggatgcctagtggaaaagaaaaaggaaaaataacataaaaagcataaaaaacataaactaaacttaaagacattttgctttcagaataagctaagtcatgcaccattctcaggaagacaaactcaccctcctacattgtctgtccaggctgctacaacaaaagtaccataaactgatggcttgtaaaccacaaacatttatttttcacagttctgcaggctgtgaagtcccagatcaaagggctggcagtatctgatgagggcacagatggtgccttctcactgcatcttcacatggtggaaagggcaaaccagcccctttgggcctctttaataagggcactgatcccattcacaaggactccacccttatgatctaagtacctcccaaaggcccctccttgggggttaggatttcaacatatgaatttgagggagacataaacattccgaccatagcactcctccaaacagaatagcaatcagattgaaaatggagtggaaggaaatggcagaaagtcatttttgtcagggggcgtgctgttgaccagaaatcaatctcctcccagaccagacgagagaagtgcagtcagcagatgatgcagatgacccagagacagggtggagtgagctgttctcaggggttcgggcacttcttggtggaggtgggataacaaaggggaggcggtgttctcatcccttccacaccaattccccagttttatttaaagtagtccacctgtcaactgaaaattcaacctgtcgatgccagatttatacctggatgcatgttctctcaagccacctgcatgcagcgtatctgtgtgccagatgtcttcacacaaaaggcccttgaggacagctccttcctcttgtctctatctttgtacagcaagcagtcccccttatctgtatttttgctttctgcaatttcatttaccctcgatcaaccacagtccaaaaatattaaatgggaaattccagaaataaacaattcataagttctgagtagcacgatgaaatagcacactgccctgctccatcctgcctgggatatgaatcatccctctgtctggcatatccgtgctccatatgctccctgccccatggtctgcagccgtctcagttgtcagattcactgtcatggtatcgaagtgcttatgttccagtaaccattatctgacttcataatggccccacagtgcaagagcagtgattctgggattcagatatgccaaagagaagccatgaagtgcatcttttaaattaaaaggtgaaagttctcaactgaattaaggaaagaaaaaaatcatatgctgaggttgctaagatctatggcaagaatgaatcttctatctgtgaaactgtgaagaaggaaaatgaaatttatgctagttctgctgcatatatagggttcagtattatctgcagtttcaggtatccactgggaatcttggaacacatcccctgcggagagggaactactgtatctatctctctcggcccctctctctctttctctttctcccctctgtcctttccctcactcttcatttctatctctgcctctctcacatattcagaattgttagattccagaagaagaaatccatttggtagtaaaagaattatacagcacatacataaagcaagctggcttttgtcttcagtagtttggtctctctccttccaggctgttcttccttgccctgtgcaccttattaacacattctcaacaaggttaagattctcttcatctttatcctatgatttcctatctgaaaaatcaccttcagtgactctccactgcctacaacataaattctaggcttcttggtcaagaattcaaggttctcaattaaaacagctccttttttcctccttcttcccccatcaccatgatttattgaattctactccatctcctcttcttatcaggtactattgggtgcttaacatgatatatttctaaacttttcaataatcttacaaggtaagtatgactaatccattttatacataagaaaactgagttaagagtagttaagtaatttacctaaaattgaagactttataactggctgagctaaactcaaatccaaggtctgtctggtgactgctctcctaatcgcctattgcagaagaagccactgtggaggtagaaagatcctagaatttgagaaaattaccatatgttgatcattcttagtgtgccaggagcttttcatac

SEQ ID NO: 10839 - DNA, 6000 bp, Homo sapiens
atgcaaaagtctgagtgactaatggagaattgaatcccaacataggggtatcatacatatctctgaaatccactcatctcccacctgcttgaataccttgcttttagccacacttaatttcttcctatgaccacggtaagcttccaaatggttatctttcttccaccactgcctcctcccactcattctctatacagtagctagactgcatcttgtaacacaaatctcatcttgtttcagtcttcaatgtcacccactgtccttagaattaggccacccctccttagcaagttccacaaagccagtgcttcccttgcttgtccgtttaaggtttatgcctttagccacattaaactcctctcagtttcttacatgtagaggtcataaagtggtggccctaggttgaattccaactacagatttgtctggtttggcccacagaatagtttttaaaacatttgggttagttcatatttgggagatttcatatttataaaatatgaattttaagctcctctttagaaatcaaggcatctggcaacacttggcctgcatcccaacctgacaatacttggctgaaatgagtatctacttttccctttagacagcttggattctccagattgccacgcctctccctcctgctcttacctatgtattgtttaacattttctgcctgacttccattctaaggcatcatgctccctttggtctctttcaatcttcccacctcttcagctgctaactaccactcatgcttcaggtcttcatgtattcatgctgctaggaagttttccttcaccaccaccaacccaattaggatgagatgatgcactgtgtgacattcacctacccaggaccctgctatcctatcttctgaggttctcttcactacccttatcatggcatgaatcatatggcattataattttttaaaaattttctttataaatttataattctctgtttacagatctgcatccctctctagacctttcagtcataagaaagtgactataactgtcttgtataccattgtatgtcagtgcctaggaaaaagccaaacgtttagtgtgggctgaataaacacttgttgcataaatgaatgaaaaaagttagctgaggaatggctatttcaaaatattggggaagagtgtatttatatttttatatatgtattcatttttaaaatgtggaccactgaaattccattccttcccccctccccctaccctggagaaactaaaataactacttgagtcatagagcaatagctgtatactggcaatgtgctaagaaccacacatggattagctcatttaatgctgacaacagtcctttcaggttagtatttcattattcccattttggagaggtaaacattcaaccccagataaaatgaaggccttattctccacaacacagtaaattgtagggatacatgatgactgaaatttctgccaggatacctgagagcacatgacaccaacagcagctttattcacagcccatcttttgagctatttgtatgtggttttaataattagctttcgcattcaaatggtaaagaaagttcttatacacacaagaagcatttatggctattataccagatgacacggcttccagggcagtaagaaggatctttaatctcatttcacaaatagaaaaacaaaggtatggaacaataaagccaagtgtaaagttaacattatgtccctcaggctgcccctcagcctgccatgccttaatgtgagagtccaatcaaagcctcaaagcccagtatgtaaagcctaataaattctgcacatagcagatagataaattcttcctaggaggaggaaaagaatcagagatgtcactgagtcacacaaaatacaacctagacagaaagtcaagatccctggtcaatcttttccaggtggaattcttgctcattctttgccccaagaaaaaaaaaaaaaaaaaaaaaaaaaaaaaaaaaaacaaaattctaagtcttttttttttttttttttgagacagggcctctctctgtggcccaagttggagtgtggtggcatgatcacagctcactatagcctcaacctcccagtttcaagagatcctccctcctcagcctcttgagtagctgggactaccggcgtgcaccaccacacctggctttttttttcttttaatattttttgtagagagaaggtctcactatgttgctggtttcaaactcctgaactcaagcaatactcccgcctcagcctctcaaagtgttgggattacaggcatgagccaccacactcagtctcaccaagtctcgtaacttttaaagtcaaatttccagagtcacttcaggacccaccaggccttaaggtccagcttattaaaaatcttacattaaatctctgtatattttttctaggcattataatttccttcctcaaggagttgagaaaaaaactgtatgtgggaaccacaacatacagttgaaggaagttagaattaaaatttctatagcttttaacatttgattagcacatcatacatgtgtagaatgttttcctaagctttcattctaaaaacacagaattcattttatttccaagtgcaccttgatgaagtaggagcacatggcattttattttagaaagcaatgtcttaacaaacttgttatttcttccaattatgcaaactcaccaaatgattttttatctatttatttatttagttttatctttttttgagagagtctcactctgtcaccagggctggagtgtgtggagtgatctcagctcactgaaacctccacctcccaggttcaagcgattctcctgcctcagtctcccaagtagctgggattacaggtgcctgccactatgcccaagtaattttttgtatttttagtagagatgggatttcaccatgtcggccaggctggtacggaacttctgaccttgtgatttgcccgcctcggcctcccaaagtgctgggattacaggcgtgagccaccgcagccggccaaatgatgatcttaaagggcctttgataatgcattcttgacctcattctacttgccatgtatagtcattagaagactgttcatataaaaatatgaaataaaactacatagtctttaagttaccttggaaggcccttcaggacaaggaacatactctatatctttatatctttaaagcatatagcagagtgcatcgcggaatgaaaatgcctattaagtcaggaatgcaggaacgacagggcttaccatttaatatcaattctaaagctgattatttatttttgagacagggtcttgctctgtcaccgaggctggagtgcagtggtataaacacagttcactgcagccctgacttcctgtaaagctgattttttaggccatttacttgctttataaagtaactagaatggcatgaactatgcttttttgtgcctgtgattataaactgaaaatttacaaacaatatgtcacatgttatttgagctaaatgtctgattttactaaaatgaaagtatccttcctggattattagaattagcagtaaatttaagtttgcacctagaagagaaaagcgattgtaaagaatgtaaaacatctgaagcaaacaaagtccaataagatcttccttctacttgaatttctatgaccacaaaggcacaggatgtaaggtccatagctttgtacacagggattggtggggacgacacgatttcaactctgaaccccaatgaccagctccaggaacacatgccttttagccccgcaaagctactgaccaaatcacccagagagataatcacatctcagccaaaggacctgaactcagacgatcagaacacaggacctgccatcaggcagctgcacgagacaagagaccgtgctcaaaatcacgtaataccctaagtcatcccaagggagccccacaactaccctcagcggcaggcagagctgacgcatattttgcagatgacaacatacaggttccgatggggcgggtcccaaggccacagagctgggaaggtgactgaacctagacttaactagtatcccaagtggtggatacttcccattctgccttggagatcgcccttcgcccgcgtattacattcggaggctggcaaaacggcaggaagagagcaaagctgggcaaggacgggaaagaaagaggggaaggaatttccactgcttcccggcactcgcccccactccacaccccaggttgctactccgcggcggcctctacttccccaaactagactgaagggcgggcggagaaccgaggaggctttctaggcgtcacggagagttctccaagttgggggcagaaaaggcgaatgaacaaattgtaccccctagggagagggcacaaggagaagtgcggaggtgagaaggaccggaggggaggacgacccctcacaaactggccagggacttaataatggtgatgaagggtcgtgagagaggtttgggaaatgcgagaatagctcagtccccaaaatcctccctggccgcatcgctggatccccgccccatccccccacccccgacccgggcagcccgggagaaaaagcaacaacctcctggggcaccaggaattggtggcagcaggatcccgagcccaggcccccttccgcgcccccaccctcacccttgccctgaccgcctcgcagtggcggcagcagcggcaacaacaccaacctgcgcgaccacgggctctgtccgggacggaagccggagcctgcgggcggcggagcggcgggcggagttagttggaggctccggctccctgggcggggacaggctgagcacgcggaggcagcggcggtggcgggggctccctctcctcggcgtgcgccgggcccagccgggtccgccgctcgccctcgactcctggggcaggtctcagtccctccccgggggcggctcccgggccagccccgcgctcgcctcctccacgccggcggcctctgctccgccctgcctctttgggcgcagggggcgcggagcttgggaagtggagccctggcgagtccccagcgattgcgcgcagcttcccggggtttccctgcgggggtcgcgtgtgctgggtgtctgaactcacgcgcgggccagaggtagccaagagctggaactcttgcccaagtgccccggggaagggagtgaaggcccggcctgaaagtctctgaccctcccgagtctcgtgtccctagaagcagccttgcgaggtggccacgccagctgccctgagagaagcagaggaaaatgtccgactctccctccgcccagcttcgcgccagaagaacgtttcccgagagaaggaaggacccattgacccccagcccttgctccagcctggagacctggctgagtgcatggaactggaaggatggcagagtaccggggctgaaagcctgggaaatgtgctatttctattcacaccacccccttgcccggcccctggattcaggccacctcgctcaggtctgcgcagtgcttcccagttcacacctccgacccgaggagggaggtcggtatccctttcttagcctggcttcccgcctccatctgcatccctttctgctaaacctttttaacccgcagagtgcccagcgcgcacacaccgatcacttcgcccctaaactgcgggcagggaactctggagccacccacatccccagcctcaccccaaagcaagagaaagcagggagccgcgcgtggggtggtgggggcggggctggagagttccagtaggaaggttttatacccaagaggcttgatgatgtgcagtactgaccccacacacaaattgatatgcgtttaattgaaggcaggtatttgccactgtctctccctgtctgcaggtaaccgcttgagtgcgttcacctcgcctcttccatccccagcgccagcccagccccctctctttctcccagagtcccatcctcctctccctcacctctcccatcccagctccctgcagcgcgggt

SEQ ID NO: 10840 - DNA, 6000 bp, Homo sapiens
tgtgcttatacttaacaatactgcattgtgcactttaaaatataagagtgtaaatctcatgttacattttttaccacaattattaagcaaaaaaattgttgtacactgatattgcactattttcatttatcttaaaaattaaaacatatttttactagattctgtttatcataattacctaagagtaatatagatcaacaaaagtttcttatccaatctcagtttctctgtctcttaatagttattaacttttaaaaattactgtgataatataatatttatataccgtatgataatatttttagaaatgttgctttgtattttgcttacaatgcattctctatgtattgttttccttatttttagctgaaatacacatacacacatattttgacagcaatgattttgatatttaataatttacctaaaataatttttattcttcaaattattcaatgtatctctcctcctctgaatcaagaaaaaaaaaacttagcatgtcttaaattatttgaaaatgtgcctctcgttcttacttgttattgctgtggagcgttttaggtttgcctttttgatatcacctgtaaattggtcactattatttaaacttagatttgtttcatattgtattaaggattggtttactgcatcttctttgatcatttgtatttttactgataaatactgtgagaaaactttttcagaggagatatacatttgtattggtgtacttaaaatatatttatataccatttgtcttgattgatttttattatttaatatttttattatttaaggattgaagctggtattttaaggtcttttgtaaagcatttttgaatatgagaaatctttattaatctattactatttatcaacaattctgcattttctttttagttgtttttactgttttgtcatttatttaattgtataggtctatgtaatatctgtttatatttattcatgtttattttactttgtgtgtctttcccagttaagaactaatatattttttcatttaaggaaaattctaaataaaaaacatttgaatgttgcttctctattcttttctgtattctttacttctgaaatacatgttaaatatgcactggaagctctttttactgaatcttctctagaatttttctcaaatattaatactatttttattctaataattgaattttatatttgtttattcatacgtacatgttctctattcatgtatttttttcataatcttgcatctttggttatatatataattttttttttaattttgagaaacacacttgtaaagtgccattcttacattgcattataattgttaattccctcaaaaaattatttaacttactggctttgttgaaattggtacagttttttttttcttttattattattatactttaagttttagggtacatgtgcacaatgtacaggttagttacatatgtatacatgtgccgtgctggtgtgctgcacccattaactcatcatttagcattaggtatatcccctaaagctgtccctccccactccccccaccccacaaccgtccccagagtgtgatgttccccttcctgtgtccatatgttctcattgttcaattcccacctatgagtgagaatatggcgtgtttggttttttgtccttgcgatagtttactgagaatgatgacttccaatttcatccatgtccctacaaaggacatgaactcatcattttttatggctgcatagtattccatggtgtatatgtgccacattttcttaatccagtctatcattgttggacatttggcttggttccaagtctttgctattgtgaatagtgcctcaataaacataatgtgtgcatgtgtttttatagcagcatgatttatagtcctttgggtatatacccagtaaagggatggctgggtcaaatggtatttctagttctagatccctgaggaatcgccacactgacttccccaagggttgaacttgttaacagtcccaccaacagtgtaaaagtgttcctatttctccacatcctctccagcacctgactttttaatgattgccattctaactggtgtgagatggtatctcattgtggttttgatttgcatttctctgatggccagtgatggtgagcattttttcatgtgttttttggctgcataaatttcttcttttgagaagtgtctgttcatgtccttcgcccactttttgatggggttgtttgttttttcttgtaaatttgtttgagttcattgtaggttctggatattagccctttgtcagatgagtaggttgcgaaaattttctcccattttgtaggttgcctgttcactctgatggtagtttcttttgctgtgcagaagctctttagtttaattagatcccatttgtcaattttggcttttgttgccattgcttttggtgttttagacatgaagtcctttcccatgcctatgtcctgaatggcaatgcctaggttttcttctagggtttttatggttttaggtctaatgtttaagtctttaatccatcttgaattaatttttgtataaggtgtaaggaagggatccagtttcagctttctatatatggctagccagttttcccagcaccatttattaaatggggaatagttttttttttccgctgtctctctcctgagttttaaaatgttagcctgcaaattcattctttctgttaccttctttttcccctctcttcttatgcttactcttgtttttaatgacttgattgtcacccttcccttcctttctggccttcctgtgaagagctatggagaaaaatattcatatattgataaattaattataatatcttgtatggagaaacgcattcatatgttgatggcttaattataatatcttgcaggactattgcacatttattccccaagctagtgctctaatattccatcttattgggttttctacaatgtatcctgtcccccaagagaaaagctactcagtatgagcaacggtgttgagtagtgttcatgttttgtaaatcgtatgtttgtgcactgaaactgggtgaaatactctgccatacacaagtgtactaagctcattttcatttcttcatgggagttaaatttccagatatcattctccatttcttattgtggtttctacctccattatctactttatctgtttattatatttaaggtccacataattagttttctttgtttttttttccacaaatattgttgtgttcaaatatctccagaaatttacatttttacttggatcagaattgctaatgagtgtttgtgtgtgtgtgtgtgtgtctgtgtgtatttttaaacttgattttctcttttaaactgaaggaaaagaatgtaagtattacactaaagagattaacctctttaatgcttttcccacatttttgcttagtgttatgcttatcatagttgattttaaaaagccaattctcagccaaggtagttgggttacaatgtggttttatatattttaggaagacataagacatcaatcaatacatttgaggtatgcattagttctgtcccgaaaggcaagataactcaaagcagcgagtaagggggaacagtgggggcttacaagtcacagggagattcaagtattttcttattggcaattggttggaagttattttctaaacacctgtaatcaatagaaaggagtgtctaggttaagataatgggttgtggaaaccaaggttcttaatgtgtacatgaagtcccatatgtggctactcttggagacaatagatggcaaatgtttcatatgtagacctttaaaacatgctatactctcagttaatctcttcagattgggagagtctggaagggaaaagatctagttatgttaacagagattctttatagaggcaaatttttccttaccaaagatgatttacaggaccacttcaaaatgtggcaaagaaacatattttggagtaaaatatcttgatttccttttttatctgtcttgtgatgttatagtagagtcaggttggaatatgatatcttattgctacaaagagtctgttttgtcagtcttaagatgtctattttaatgtttatgctggtcagctgggcctaaactctaaagggtggagagtataattaggcctgtcgaaacaacttcccttcccatcatgacttgaattactttttcagatttctttaaatccctttggctgaaagaggggatctatttagtcagttaggggcttcaaattttatttttgctttacacacagaaagctataaggactatgcagtaactgtatccaaaataagtgatgctgtcacatagatcctgtaagggaaatggctgcactttcatcaggagtaggccgaggcagacttctgtcatagcatgactcagtgggtttggaatgcaggtgcacaatcccacacattatgtaaccatgccacgtgaggcacattaggcgatcactcatatgggctcatgcttggctcagagccactattatctgtaaaaagtataattaccctgctaaagctgtacatatgatttgcccataccgagagagagagagagtaaagccatgttgaaactgtctatgattcctcgactgattttcctgctacccatcacttgcccaccaactcccctcagacctcagttagaacctgacaattggtgtcacaaacaggatcccaagctatgctgctcagatgggatctggtggaaacctgggtggtggtagatgcttcccttgcaagcaaggagaaggtgctgaagcatctggaagtgcagagcttttactggaagggttggatgggcttttttgactacactacatgaagtgcacatccagtctcagagggatggagcacaggtaagggcccttcaggcacaggttgggtgtctggaggcccagctacacagctcagaaatatagtgagaagttaccagaaatggggaccttcaggggcaagcggggcacctggaggccagctgcagagcttggaaaaggaattagaagctgctgtgaatgcaggcctgggtccatcatcttggccagagaccccccactcagtctgataccaaggaggaagaacctccattgcgggctagcccagtagtctgtcagaaggtagatcatgaacagccaatggggcctgccccaatgcccctaaagataggggaacaaaaaacctggctttaatatataaagtaatattcaatattgggataaagtcaccatgggtggttgcccacatatgtcagaactgtgtgtctggggcctgtatgtgaagcctgtgtatcaggcctgtgtgcccagagtttatgtgtcaggcttatgtgttaagcctgtgtgttgggcttgtatgcccagacttatgtatcaagcctgtgttgagcttgggagtccaaagcctatgtatcaggcctctatgtcagacttgtgtgtgcaggtctatgtctccctcagcctagagggtagagtaagaaaaatggatgtactgtggtcaagaataggccaaggcagacatctggtccaacatgactcagcgggtttggagtgcaggcacacaactctgcatgttatgtaaccatgccacataggcacattatgtaaccacaccacatgaagcgaattaggtaatcacccacatgagcttgtgcttggctcaaagccactgttgtctgtagaaggtataattatcctgcctaagctgtacatatgattctcacaccaacagaaaaagtaaagtcatgtcaaaactgtctgtgattcctcgagtgttttttcagctacccaccacttgcccaactcctcttggatgtcagttagaacctgataaggtggtggaaatacagtttcacagcaaaaaataaaatgatgtgaggatatctccaaccactttgatacaaaatattgtgttatagacttatgcagtaagaatataggctgtttaaggttgggccaatgttgtacatatggc

SEQ ID NO: 10841 - DNA, 6000 bp, Homo sapiens
agaccattttcttaagcaaagtaacgtaggcacagaaaaccaaatacctcacactctcattcataagtgagaactaaacactgagtacacatgaacacaaagaagggaaaagtagactctgaggcctacttgagggtggtttagttttttaaggactaaaaaactacctatcatatactatgcttatcacctgggtggtgaaatagtctatacaacaaaccctatgaaatacgatttacctacgtaacaaacctgcacatgtacccctgaacctaaagtaaaagtctaataaaaaatgagagagattgaaattatggtgccaggtttggtggctcacacctgtaatcccagcactttgggaggccaaggtgggcagattgcctgagctcaggagttcaagacaagcctgagcaaagtagtgaaaactcatctctaaaaaaatacaaaaattcattgggtgtaggagcaaacacttgtagtcccagctactaggggatgctgaggcagaaggatcacctgagcctgggaggttaaggcagcagggagccaagatcacaccactgcagagtacagacagagaagaccctgtctcaaaaaaaagaaagaaagagaagaaagagagaaagaaagaaaaagaaagaaagaagaaagaaagacagggagggtgaaagaaagaggagaaaaaagaaagaaaagaaagagaaagaaagaaagagagaaaggaaagaaaagaaagagaaagagagagggagggagggaagggaaagaagaaaaaaaagggaaggaaggaaggaaaaagggaaggaaggaaggaaggaaggaaggaaaaagagaagggagggaggaagggagggagggaggaagggagataaagtgatccatgttatacaataaggaaacatttcataaactatcacctgcaataacttagaaggcagataatgaacctaacaactgagtggaacccgagggttatgaagaacaatggatggaggagctacttttcaatgagtgggatatagggacatttccaaactcacatttggaacgcctcacaagaactgcccagtggttacagtgattgtttaacttctgggaagacattttaagggcagagtgtgttttgcaacttttatttccctctatcacaacaatctagagaactttggatagtgtctacttcatcagtttggatccctaatgcacaatgacatggacaagtccctagcaacattcaataaacacaaaacataagcaaaaatgaaatatttgttggtttaagcctttatgatggacttgtttaccagcatatgttaattggccattttttttaaaaaaaataatattatggagaaatactcactgttaagtggtggagaaaactcaagaaacgattctacacttagaacatgaccctaattttatgtatacctatatgtgtaagaaaacactagaaataagttcaccaagctaactgtggtgaggtaagtgacaggatatcaggaaatttttattccaggcttcttatttttctgtattttctgatttcatcatacaatttcttaagtattaggaaaaagtctaaacatcataaaactggtgctctaagtctatttcaccttgaaaagtcttgcattaatgtttatttgcttcccattagacactatcttaaagccataataacctaaagttgaattttatttgaaataaaaattattgatagtgaaatttttattaatgtatttataaatttggcaactaattttagaaatatctactccaaccttcaagcttaccattaataatttcccaaagtcttcttaaaaataattttataaatatttatactttggggggcattagtaacttaaataacaaaaataagatgggttgagctctaaaatttgaatcaccatcaatgttctaaaatatttttatattacttgtatctacattattatcacataccacctaaatcagagacacttaaattttctctgccttcctaagtgcacatccagagcaaagatattatatatagatatatagtatatacagatattaaaatagttataaatttgcctaatgtttttcaatcgcttactatacatacagattttgctatttgccgagtatttgttagtgaataagacagacacaattccttccctcacaaactttatagtctagtgggagaaagaaaacaaataataatactaaacatgtaattacaagttgtactaagtactataaagtaaaaatgacaaggcttcatgaataaaatggatgggtgattagtttaaaccaggaaaggttcaaggaaagctcttctagggaagtgtcatttaggctcagatctataagtgaggtagtaaattcttcagagtagacaaaacagtagatgctaaggccttgatctggcaggaagtatcataaccacaagtgttctttttattgtcatctttttatttaatgtagtttactacattttacatttataatgtatttttaatgtaatttttaaagttgcaagtataatacagaactttaaatacccttttccagagtcatcattcatttacatttgccttacttttacacatatgtaatatataaatgtagttttcatatctatgaaatttttcccaacctttttattactacatacactttagtgtatagttgctaaggacattaacttccatacatagccagtacaatcataaaaactgggacattttacagtcatataatactattatgtaatcaatagttcatattcagatcttgttaattatctccaaaatgttctttatattttctcccattcaggagccaataatgatgcaacatttcagaaaagtgtataaggatagtttgtcttaaaatcgatgctgttaactttagtcacttgactaacatggtgtcccccagatctcattatgcctttttcctgagaaattaataagtaatttgtggcagacagcataactatgtaaatgtcttaaactttcacccactaattttaacatctattaataattctccaatcctagtatgccctctatatttattaactgatgtgccattaagagttttcccttttcccccttcatgtattcattttttatatttttatcagtatatactcataaatttctattttatatcgctattttacctttttttattattacagtttttctggggtacatgtgcaggatgtgaaggtttgttacataggtatacatgtgccatggtggtttgctgcacccaccaacctgtcatctacattaggtatttctcctaatgctatccctcccccagtcctccatccctgacaggccccagtgtgggatgttcctctccctgttccatgtgttctcattgtttaactcccacttatgagtgagaacatgcagtgtttggttttctgttcttgggttagtttgctgagaatgatagtttcattaactagattaactgtgtagtaagaatttatcattcacttttcacttccacaccagcaggatgatgtaaggaaactaataccatcagaaaggatcatgttttaaaattaaagctataatagggaaaaaaaatatatatatatatactgtatccctacataaagctgagggttaccgagaataagtcaaatgtattcattaatgtcaataatgaattgggtgggagtggattcagacagaaaagaaataaaaacaaagggtatacgtatatcaaatcatcacactgcacaccttgaatatatacaatctttattgtcaattaaatattgttttaaaaaataaaggaccagaagctgaatatagttatagaatgcagcaaatgatgaaaacaaaagtgggagcaaagaacaagcctgagatgatcagtgtgaacttggctagaaggattccagattgctagatctgctgctaattgtgaaccatgggtgaaaaaagcaattactttaaaaacaagcccatggccaaaagttttcaggacccatattttcaaaattccagattccatgatttttaatcatgttttaataacattaatgtatgttaatatcttcttgacacaatgtttttatggtttaaataaaatgaggaactttaatgtagtcaatggaaggtaaaaagtctatactgtgttgggttattgtggaagaaattattgaagacttcttttgtctgtatgtggaactaggattatgatggctctatggtagcagaaatctaaagaaataatatcttgagaaaaactataaataaaagaaaattagatcttggcacctaaaataataatcttaatttcctccttgtgatccaaggaaatttttataaaattgttaaggcagattcagtttccttggcttctctcagacctgagtccattataaataacaggtgccaaaatttatcatttcattttattatggcaaggaagttagagggaagcatacccactaaggaattgctataatgacccttaccaagaaatttcaactctattatctgtacagagaacaaagtttcacagctttatagagtgagtggcaaccctataaagtactttttttaaagtacctttagaacaagatcgtgtcctttgcagggacatggatggagctggaagccattatgcaggaaccattatgcagaaaaccaaaccctgcatgttttcactcatggaatgatgagctgagcaatgagaaaacatggatacagggaggagaacaacacacagtggggcctgtctgggggtggagaggggagggagaacatcaggaaaaatagctaatgcatgctgggcttaatacatacgtgatgggttgatagatgcagcaaaccaccatggcacacgtttacttatgtaacaaacctgcacatcccacacatgtatcccagaacttaaataaaataaaataaattttttaaagtaccttccttacctctaaagagtaagtaggttttcatatttgaaaatatttggggtgtgctctgagggagggcctgggccacccacctttgctggaggagcccttcaggccataataagcatgaataatgtctttcctctttgagtggatctacaatggcttcagcagtgtgctccagttcctaggactctacaagaaatttggaaaacttgtatttttcggtttggacaacgcaggcaaaaccactcttcttcacatgctcaaagatgacagattgggtcaacatgttccaacactacatccgacatcagaaaagctattaattgctggaatgacttttacaactcttgatcttggtggacacaagcaagcatgtcaggtttgaaaaaattatctccaagcaattaatgagattgtttttctggtggattctgcagatcattctggcctcatggaatctaaagttgagcttaatgctttaatgactgatgaaataatatccaatgtgccaatccttatattgggtaacaaaatagacagaacaatgcaataagtgaagaaaaactctttgagatatttgggctttctggacagaccacaggaaagaggaacatggccctttaggagctgaacgctcaccccactgaagtgttcatgtgcagtgtgctcaagaggcaaggctagggcgagggattctgctggctctcccaatgtattgactgatgtttggacagagaaaataagagtttttctcctctggactgatcctgttcacagcttcttcatggacttttctaatagaacaatgaaaggtctccaatcatgtctagcattgagaagccaagagtcactgtctactctcatcacccagtggtgaaatgttctcttctccacactgttggggaggtaatgctgccccatgtgctggtgcaggtcagtatcctggggcttggaagctggcaggggttgctgagtaaagctgtgtgccattatggggcacctgaaaagaaaaacacatctcaccactctggttgatttcaaaagaaagtgat

SEQ ID NO: 10842 - DNA, 6000 bp, Homo sapiens
acatttataatcaatttatttttgacatagatttcaagaacacacaatgaagaaagaacagtttcttaaaaaaatagtgttgggaaaactaaatattcacatataaaagaataaaagttgatccttatccaatttacaaaataagctgtatacaaaaatcaacccaaaatgtattaacaacttaaatattaaagacctgaaactgtaaaactactagaagaaaacagagagaatgctccaaggacatcggtctgagcaacaagtttttggacatgaccctgaaagcataggcaacaaaagcaaaaatagacaaatcggactacatctaactaaaaaagtgcttgcacaacaaaggaaacaacaaaataaatccatagaatgggagaaaatatttacaagccataatacaataaggggttaatatctaaaatatttaagaaactcaaacaattcaatagcaggaaaacaaataactcaatttaaaaatgggcaaagggctgggcacagtggctcatgtctgtatttgggagggcaaggcaggcagagcacttgagtccaaggagttcaagaccagtatgggtaaaatggcaaaaccacatttcttcaaaaaatacaattagctgggtatggtggtgtgcacctgtagtcccagctactcagtaggctgaggtgggaggatcagttgaatctgggtgtattagtacattttcacactgccataaagatactaactgacactgtgtaatttataaagaaaggaggtttagttgattcacagttccacatggctggggaggcctcaggaaacttacaatcatggcaaaagttgaaggggaagcaaggcatgtcttacatggcagcaggagagagagagagaagtgctgcaaagaaggaacttccaaacacttttaaaacaaccatcagctcttgtgagtactccctcactaattcaagaacagcatgggagaaactgcccccatgatccaatcaccttcccttcaggtccctctcttgacatggggggattacaatttgagatgagatttgggtgaggatgcagagccaaaccatatcagaggtcagggctgcagtgagctatgtgtgtcactgcactccagagtgagaccctgtctcaaaaaaaggtgggggttaaaggatctgaatagatacttctcaaaagtagacacataaatggccaacaggtatatcaaaaaatgctcagcatcactaatcatcagggaaaggaaaattaataccactatgagatatcacttgacatctgctagaaaaccttttatcaaaaagatgaaagataacaaagatgcagggataagggaactctttacattgttggtggaaattgtgtacagttacataatagtgtaactgttatggaaaatcatatggaggtttctcaaaaaaactaaaaatagaactcccatataatccactaatcccacgtctgggtatatatatccaaaggaactgaaatcaatatgtcaaagagatatctgcactttcatgttcactgtaacatcattcacaatagtcaagctatgactaaccaacctaagagtccctttaacggatgaatggataaagaaaatgtggtagggtatatgcacaatggaatactattcggccttagaaagggggaaaatcctgtcatttgtgacaacatgtggaattgatgaacatttgctaactgaaataagctaagcacaaaaagacagatgccacattctactccctacttctgtaagttcattttttttttttagtttccacatataacagctcagcctccccagtagctgggattacaggtgcatgccaccatgtctggctaatttttgtattttttgtcaagacagggtttcactatgttgcccaggatggtctccaactcctgagcttgagcgatccacctgcttcagatcgcttgttatatgtggaacagctaatctgttatatgtggaaactgaaaaaattgaacttacaaaagtggagagtagaaagatgcttaccataggctactagagggttggggagggagggaaagaagaattgctggtcaaagggtatgaagatttagatagacaatagtagacaatagtaatagattttgagacctattgcatagcagaatgattatggttaataataatgtatatttcaaaataactaagagagtaaatgtaaaatgtctcataaaaaatgataggtaaagctgggcatggtggctcacacctgtaatctcagtactttgggaggccaatgcaggtggatcacttgagctcaggagttggagaccatcatgagcaacatggtaaaaccctgtctctacaaaaaatacaaaaattagccaggcatggtgtcatgcgtctgtaatcccagctaccggggaggctgaggtgggagaatcacttaagcccaggaggtgaaggttgtagtgagccaagatagcgccactgcagtccagcctgagtgacagaggcagaccttgtctcaaaaaaaataaataaataaaagatagctaagagaggtgatagatatgttagcttgatttagtcattccacattgtatacatatacggaaacattacactgtataccataaacgtatatgattatgatttgtcaatcaaaaataatattaataagtaaaataatttttaaaataaactgacatatactttttttgaaacttagattaagactgacaataagaccccttggttacttcttcaaaagtagacttttacaacaagttattactctagggcatacatacaaaaataagcaaaaacattccatttaggtactcctaaaattttttcatattcagagttcaattcttctgtacagacccaccactaacattgggagagcccgggaaaaaaatacaagtggaggccaacgtgctatatttctaaatagttggaagttataattcaaaactataccacagcccagaccttgttctcacctatgttctccaggaattaccctacccagaggctaaaggagcccccttgtcccacaccaggtttgcctcctatcaatcagagactagctaggcccgggcagagtggaagctggggctagactcctgggtggtgagtagacctgtcccaaccatgtcaagctccccaggagacaggaaaaacacattccccttccccagcctcacttttcttcaggattttcaagatgttctcagcacctcccaaaaccgtaccacccagctagaggagaggaagacacactgttttcctgggaccctgccctgcctagacacccacactgtgtggtgtggaggcaccaacttaaaccaaagcgccactctttctctgggttcccagagtagaatctagaaccctttccctccaccctcagccccacttcctctagaaagtgtgtgggcaccagccataattctggaaagttcagttgccaaactttccaaagacttacctacaaaatataaaaaaaaaataagacacatttgcgtttcaatgtgtgcaaaatacgcaatcctctcaaaggcaggacccacagtagggcccctctagcctgggtcgaagggcagttctgaatcacctttctccccagagtcagagacatgcttattatcccccaaataccatcctctgtgcaccaaaagcaacgatgatgaacatttctttaaaagtgctctactgttttcaccaggagatttcctaagccactaatcactaagcaatgttttcagatgattaagcaaaagacaaaatgttgacacattatttttagtacatttgtccaatttcaagttggcaaataaatacaagtgattaaatcttaatatttctgtttttattcatcgataaatgcctcaaaaatttctacaagaaaaacatatttattcatgcttaaaaattcagcctatatatttttttcttctcacaagctctttaacttctaaaacttttgagaaagaaatcaagaaaaaatatttttaccgtatacttttctcatcctcacttttacattttcatttcggaatagcagcttagaaggaaaaaaaaagatggttgttctaggaagaacaaattgtctttatccagcaatagaagaagttaaatttaagaatagctcattgcctgtcattagctgaggttgctggaaggtaaaggctgctcagattcacttgtcaaagtcttctcatgttttttcttctaccttctctagttgtagggtacagggcaaattgccccttcaaaatacagatatagccatgcttaaaatgtcatttttgtttttagcaccaagttattgctagaggtataattatccactaagagaactcgattcaaatgagtttccctggtaactatgcaattcatagagtcacaattattttgtaatagaaaaataagacaatgaaagccacaaaggatattgctaagcttaatccaggtgatggtatagtactcacctctatttaaaaagaaaatattggggaatttgggaagtaatataggcaactacagtaaatgctttctttgcatacagaaaatcacagaagggttatttcgacatgaattctatatatattatacatatattatacatatataagattgatgtcctcttatgaaaaatgaagagactgccaactaactcatttactaacagggttgccagatttacagaggataaagacaggatggacagttaaattttgattacagtgaaatattttagtattagtatatcccaaatattacaaaggacatactcatactgaaaaattattcattccttatctgaacaatcatatttaaccacatattctgtattttacctggccatcctatttactcattataataaccccataagtttggctttatcatcctcatttacaagtaaggaaattgagtctcagacaatttaaataaatcaagatcatacaactaggaggtagcagaacccatattagaatctaaaccccttggtgtgattccgtcctgcatggccattctctggagcagtagtcatttatctctgtctgccttctctcccacctaagtgcatgccaccatcccatggaagatttcatggacatagacatgaccctgaggccccagaactatctttttcaattgtgaactgaaggccaacaaagatgatcactttaaggtggataatgatgaaaatgagcaccagttatcttgaagaacggtcagtttaggggctggtgcgaaggataagttgcacattgttgaagcagagacaatgaattatgaaggcaatccaactaaggtaacactggcaactttgaaaatgtctgtacagccaacagtttcccttgggggctttgaaatcacactaccagtggtcttataattgaagcgttgttcaggatcagtgcatattactggacagcactgactagttgtggaggaagatgcagagtcagaagatgaagaggaggaggatgtgaaactcttaagtgtacctggaaggcgatctgcccctggaggtggtagcaagcttccacagagaaaagtaaaacttgctgctgatgaataagatgatgatgataatgccgaagatgatgatgatggtgattttgatgatgagaaaactgaagaaaaagctgcagtgaagaaatctataggagatactccagccaaaaatgcacaaaagtcaaactagaatggaaaagactcaaagccttttgagtcaacaccaagatcaaaaggacaaaaatcaacaccaagatcaaaaggacaagaatccttcaaaaaacaggaaaaaactcctgaaacacataaaggacatagttctgtagaaaacaaagcaaaaatgcaagtatagaaaaaggtggttctcttctcaaagtggaagccaagttcatcaattatgtgaagaattgcttgtggatgactgaccaggaggctattcaagatctctggcactggaggaagtctctttaagaaaatagtttaa

SEQ ID NO: 10843 - DNA, 6000 bp, Homo sapiens
tatgcggccagttgtggaagcactgctaataacttcactttaaatggtttccataagttaagggctaaagtaagcaagggaaaaaattgttaaataaaaaggaaacaggaaaacatgtcttgatttattcaaaggggtatggaaaggtcttatattaaagtttaaggcaagggcatctgctttacaagctgggtatatccattttttgataacaaatgaaaacctttttaaaaattaattcaaaaatccaaaggatttctctataatttctccagagtaacaaacccatggattttaatcacagaataaggagcaagggactagaaaagtcactgtgtaggaatgtatttaaaccagaaacatgggtgggcatgacaatttatatacatttttgtttttcaaatgaaaattgaatatttgctatggttgaattgaaattgtgaaattcaattataactttaaagtggtttttaaaagaaaaaggagaactgtagaaaatttgactaaaggggaagagaaaaatacataagtgaaactgagatctccagtcaaagtgaacagtttcaagtattcagatgtttagaatcttgatagacaaaaatgtaccattagtagatgttatgtttctttttatcatcattattatagcatttataaagaatacatacacatacatatgtatatactatgtatatagtatatatatttcatatatgtgtgtattatatataaaatcctaaaggaagtgcttataaggagagtattttccagatgttttatcaaatatcagcataaactttccccaaatatttctgcagcacacagacaccctgaactgattgaaattgtaacagttaatacttatttggatgctgtgtgccaaccagtactgtagtatttacatatgttaaacttattgaatccttacattcgccctttaaattatgtattataatatcccctattatagataagaaatcggaggcaatgaaggttaagtaattttcccaagttcacacatctggtaactgtagccaccaggatttcagcccagaaagtctggctccacaatctatccatctaaccattacactatactatatctcaagtgtaaaatatattgattatcgtacagaagcagatagttaaaattattttattgatcagtaatgtcatccacatttgaacatgtatcatgaggcagccaattcgtgcttatgtattttattaaaaccaattattactgatatgtaattttaatttaaggaagctgttaaaacctatgattataagccaactcacaaaaattttcatagtatatacttactctagaatttaatgtgtaaatagtgacctctgagacaataacaaaactaattgtcgtagacaatgaagtatttgaatcatccctcatggtcaccaaaacaactgagaaaaaatgtaaatcttatgattctggtcttactgtttagagctttggggattaaacatctctttcaaatacaactgttctgaccatgggtatcagagataaccactagaggtacctcatttaaatgatatctgctcagagcaagtttagttccacaatcaatatttgtgctttgaatggtaagatttttctgtagctaagtataattgtagtgttggaaatctacattatttaagagtaaattttatattataatacattcacaaccaaaaaaatatgaaaatacattttcttatttctttgtcctatagttttccttcatattaaataacttttacatctactaaacctgccctagtgaaatattagggtatggtctaattctaggctggcattttctatgacactgtactctagtaaagttaattggatgcagtcccaatggtttagataatctttttgattatctgagtcttcaggtaatactgggaaattttgttcaattctgattctgaattatccggttgcttttcctaatgtttctctatggtcaagacctacttgcaggttgatttaaactcagaacaagaagtaagaatttgtgacaggtttcatcctcttacttgaagtcatatattcgagaaggaggagtcctgttgagaatctctaccctaacacactttgggaaaagcagaattctccgtggcactgcagggaaatcatgagaaatttacagccctggagaaaaaaatgcttaaccgggatctattttccatagtgtggattctacaaaagtcgagaagtagaatggcaaaggaactccctctggatcacagtaatgttcatccttaatctcttggagaaacagtatgcctggattggtaaaacaatttgtagaaagtagaagaaaaagaacttagatctgtatgggctggttttatttcagaagtctgagaataaatattgatccagcagaaacaaaagcgagaaagatagattaaattgaaaatgaagaattcagatacttgtttttaattttgttttgttttgttttttaatgccatttgtgaaacttgtcagcaaaatattttattcttgaaggttgtggagccataaaggactcagattttatgtatccatttctaaatctcatactgtgcatgaaaatttatttgaagatttttctatgtcactttttaataggcagaaggaggatttttattctttcctgagttaatctttatggactgtagtaataatgaaatagttaagaaattaacagcataatattgattttaattttaaaagaattttcaggtttttatataattttaactgaagccctattttattcagaagttaggcacaattatacacatcaacgagtctgttaaaataaataagcattaattattgatgcccctgctcagacattatggaactttaatggggtgtgacagcttgaaatatctttcagagaattatttttctttctatccaatttgattaatggcaaaactcagaatcaaatcataatttttgaaaagctaatgctaaagaaatcacaaaatgattttctcaaaacggctatttcaaccaccatctccggttagtctcacaaatgtatccacttttgaatcatggccacagttggaagtaatttcttaataacattcaaaaaaacatatttgaaatggcataacaaacaaaaaaagcacaactttttgtactacatctatataaagagagagaagaagcaccagtttgatatttatctgggttttgtttgtttttgagacaggatcttgctccagcacccagggtggagtgcagtggtgcaatcatagctcaccgcaacctcaaactcctgggctcaagtgatcctcccgcctcagcctcctgagtagctgggactataggagtacgccaccacacctggctaatggctgttattttttaaccaaatgttttatattagctttttgaccactttattgaagtatgactgacatacaaaagcagtacagatttaatgtatacaacttgatgagtttgaaggtgagtatatacctgtgaaaccatcaacacaatctatcccatatatacatccatcacctccaacagtttcctcccaccttctttattgtgttgtgtatgtgtgtgcgtgtgatgagaacacttaacataagatctaccctcctagcaaaattttaagtatacaatatagtatttcttaaatgtagtgtaaagtggctgacaagttttaaggagatggatgacatgatttcatcaaatgttgtaacaatgtaaaggcataagactggatgcaaggactggatgcaagactattgccagaatccagaaaagaaatcatagtgatttgaattagggttgtggtggtagggattttttaaagtgataggataattagcatatatatttgcatccaaatttaccagttttggtgataaggcgttaagaatgagagagacaaggcgtccaagggtaaacaccagatgtcctacataacaaactaggagatcaaaggtgcttagtcactaagatatgaaaaaagaagaacaatctttcctcactcttttttaaggtttatttttaattaagcaacaattgtatatgtttatggggtgcaatataatgttttaatatatgtttataatgtgtaatgattaaatcaggctaattaacaaacccatcacctaacatacttattttttgtggtgaaaacacttaaaatctactcttagtaattttgaaataaacaatgcattattgtttattgtagtcaccattctgtgagatcactaaaactggttccttttttctaactgaaacttagtacccttgatcaacatctccccttttcccatccatctcctgcccccactctctacctctatgagttcaacttttttggattccatatataaatgaaatcatgcaatatttgtctttcagcttacttcagttagcatgatgtccccaggttcatcctccaggttatcacatcttttcctcatcctaccattagcccagtacttaaattttataggtgaatttactgatcaaataaaagaatatgttcattttatcaagctaactagcttataaagaatcatagggtcattttagaaccagcatctatttcaaactttcaaatctacacgttagataattcagacctcaagtttaaaagtgaactccccaaggtcacctggattttttttaaaaaatctaatattaaactcattgccataaaagaatctatgacaaatagcagatttcttggctgtaatttttacttttatccattaaattttttcaattagtaacataaattatctctctttgtttagttctaattttatcaaattatttagatagttcatgttgacaaattgtttcttcctcttttccttttcttcttcctctccctcctccttctcctcctctacctcttcttccttcttcttccttctccttatccttgtatcatcatctacctcctcctcctccttttctcactctaggatttagacattgaaggactatggaccaaagcaattatagttctttacatggttttattctgcttggcttctctaaccatccaaaaatggagatgatcctgtcaggagttgtcgccatcttctacttaattacattggtgggtaacacagccatcattcttgcatctctcctggattcccagcttcatacaccaatgtactttttcctcagaaatttatctttcctagatctatgtttcacaaccagcatcatccctcagatgctggtcaacttgtggggacctgataagaccatcagctatgtgggttgtatcatccaactctatgtttacatgtggttgggctcagttgagtgccttctcctggctgttatgtcctatgatcgttttacagctatatgtaagcccttgcattattttgtagtcatgaacccacatctatgtctaaagatgattatcatgatctggagtattagtttggccaattctgtagtattatgtacactcactctgaatttgcccacatgtggaaacaacattctggatcatttcttgtgtgagttgccagctctggtcaagatagcttgtgtagacaccacaacagttgaaatgtctgttttcgctttaggcattataattgtcctcacacctctcatccttattcttatatcctatggctacattgccaaagctgtgctgagaacgaagtcaaaagcaagccagcgaaaagcaatgaatacctgtggatctcatcttactgtagtgtctatgttctatggaactattatctacatgtacctgcaaccaggtaacagggcttccaaagaccagggcaagttcctcaccctcttttacaccgtcatcactccaagtctcaacccgctcatttacaccttaagaaataaggacatgaaggatgccctgaagaaactgatgagatttcaccacaaatctacaaaaataaagaggaattgcaagtcatagataaagactagagtgaataaggcaattaaatatgttt

SEQ ID NO: 10844 - DNA, 6000 bp, Homo sapiens
tcaaagatctagagccagaaatactatttaacccagcaatcacattactgggtatatactcaaaggattataaataattctactataaagacacatgcacacatatgtttattgcagcaccatttacaacagctaagacttggaaccaacccaaatgcccatcagtgacagactggataaagaaaatgtggtacatatacaccatgtagccatagaaaagaatgagttcatgtcctttgccgggacatggatgaagctggaaaccatcattctcagcaaactaacacgggaacagaaatccaaacaccacacgttctcactcataagtgggagttgaaaataagaacacgtggacacaggaaggggaacatcacacactggggcctgttgaagggtggcggcacagggaggagagcgttaggacaaatacctaatgcatgaggggcttaaaacctaaatgacaggttgataggtgcagcaaaccaccatggcacatatatacctatgtaacaatactgcatgttctgcacatgtatcccagaacttaaggtaaaatttttttaaaaaagtaaaaccacaaaaaataaaataacttttctattataatccaagcacaacaaattgtatttgaaaactaattacaaatatatattacatatagaaagtatgtatatatgtctattaaacttatatataaattattagctacaacagatgtcatatagttacaaaaatcacaggctaagaaaatgtcctaatttagaaaatgatcatattctacacaaaaagaaaaatgaggaaaaatagatacattaaaatacgagcacattagtttccttaagattatatctaggctgatgctcaattcaattacaacttctttattttactaagatcttaggataagcacttattaagtcacatattaagtcataacttgcataaatcagctttttttttttggagatggagtttcgcttttgttgcccaggctggagggcaatgacttatcttgtctccccaggttctagcgattctcctgtcccgcctctgcctcccgagtagctgagattacaagcacccaccaccatgcccagctaattttttgtatttttagtagacactaggtttcaccatgttggccaggctggtcttgaactcctgacctcaggtgatccgtccgcttcggcctcccaaagtgctgggattacaggcgtgagccaccgccccagccctcagctgcttctttcaaaaactattccccctattgcaatttcatgtaatttctgtgtgttctgacccagtgaattaatgctaaccttaaatttcaatgtgtatattaatatgttaagtgactttgtatgacataatttttaacctacagatctctggtagctttagtttacaaacacttattactaaaatcagtgaaaatagaaatatcatttttccctatacgccatcataggactccctatttgaccttgcaactatttaaaaggaatttggggctataagttcattaaaccttgtgctttcctaattaaacaactttaaatttatttttcattgtttatttttgttactctaatcttcaccctagttttagaatttgtgaacgacatatgtggtagtattatgcaaccagcccagttaggaatagagttgacttattgactctctggacataatgaccaattaaacttgagggactctagaatctctagggctaaaaagaggacacagaattgtgtgagtggtactcccttaataaatattggttggctttatttaaaggcataactttctttccatgacacttccaatgttgttgatgtctataaagtcaacttctcgttgtagaaatccactaggaacctggtgaggagagcccatgtcagtcaaaaatgccccaatgactgaagacacactaactatacacattttcctctcctcataagtatttttctcacatgttcttgatgcagtccaggtttcatgctaatttcattcttggtcagtgggcaaaaggtagttgagttagaatgtcgtaaagattgaaaattcaaaaactcaactgcatttattaatctgtctttgaaccagacttcctttgaaacacagcacaaagaaaggcgtgaatatctcttggacatttagaaaaaaggtgagtggcgtctaatacagtgtattatattaccatgagtgggaaggatctctcaagaacatctcacctacatccctgcctctgagttgcatcatgttaaataatcagaatgcccaatttgtttcctgggaactttgaaattaatatgaagtattttcagtgattccaaaaatccttcgtatcctttcacccttttgaatggtttgctcattatatctccgtacataaaaacggtcagtgggatttaagatttcttttgattcatgtagaaaatagaaataggacaaaaagtcaacgtgacagtggaatcaacatgttcttgtcaagaggtaagttcattttctgataacgtaaaagagaaattggcgccatataaaatatgaagaaaataagagaaattatcagtgccatataaaatgtgaagagaagaggacgtgaaaaaataggagtagaaaataacagctactgaatagggtcctcttttattccatgccctttagataaccagatatcacctactacattgatttaacttccatttactggaaaactatgtactcagtatattatgctagaaacaaagacaaagtgataatatgaaattcaataatttcatgttataatattatgaaattataacaatcacttgaaccaccaatagtaaattttctgttttctcatatacaagacaagctgagataatgatatagtattactattaatgacttattagtgattagtattaatgatactgctattgatatcaagctcacattcattaaatgcttagtatgcttgggacagggtcctaagttcagatgtgtatacattgtctcacttgagcttcacaatactctctttttatcaagtcagagattgttttttaatgtagcacaagaatgttcattcattgcccaggatcacacaatccagtaataaaaccctggcagattctggctccagaggcactgtacctaacagctaacctttaacagtgattttttttaatgctactaagtaggaagacaatgtgatactttcttcttgtttttatttgtgtttcttcaataatgaaaaagttataatcttttatactttcactgtcattttatgttgttttcttccccaaactgcttatttatgtccattgctcatttttttccattggacttttgatctttttctatttattatgtaataattatttatattttaatataataaccattttttccataaacattgtatatttttctatcttgccatttatgttttatctttctgtgtagtctttttctgatataaaaaattgtattaatgagtaaaaattgtatatatttatagtgtacaacatgatgttttgatatatgtgtacattataaagtggctaaatcaagttatctaatgtatgtattaccttacatatttatcattttgtaaatttacatggacattcaaaaaagcctaatctcatattctcttctatttttcaaccaaaggtgtattactgttatttgccaaaaaataatgtgtatctatagctaaaaaaaatcatatataatggaagaagttaaaaatctcaaggtcatctctgttcattttcatttattcattccattatcaaattatactttatatatcagtgtttttactctggaaaagttatcttattctgtggtaaattgtgtcaatacttattttctcttctctcttcagtctatctttctatttttatgcttgcaaattcaaatggtgtaaaccacctcgatgacatttcatttaaacatgcaaagtagactgaagaaacttaggtgcacttaggtaatataactaaataactgatgacttttacagactgaagaaaatcaacttgaatatatgacttttggtttgtttctattttaatttatgaccacttttgtgctgtatgcagtcattcttattgtactatctgtgtatttagggggaaatacggtataaaagaaagaatgatctttaaatcctaggtgttagtcttgacctcaccaataatgagtgtgcaaattatttattcttactgaatcacagaagcaataaaatgcaaaccatgactgtgaggggtttgatgagaattacaaagaatgtatttcacacactgagcagtttctggcacatgttaagtaaagcaacaattatgttatcagttttgctattttaattaaggtatttgcagatggggagatgacatctgtggtcattactatatatcacaagtagccataattttattactaatacccacggtagttctttgtggaaatggacctacatgcatggcatttaggagacagacacaactcaaaaaaacacgtaaagatgttactaaaagaagcaaaatttctttagatcaattgcagatttagattcaactcttataccctctatattactcagcattttcaggccaaatttaaaataattggagtaaaagtaatatttctttctaaactgtttattaagataggttaggaggtaagaagaggagagaacataaaatgcattgagaactcacaattttccatgtgttatgcatatgttacatactttatgtcatttaaatgtaatgattttctttaaagtaatttaaacactactgaaaacacaggaactacttttaagcttaaacataaccatattatactttacaagggctttatccacttgactgtaaattgtatttgatgctgagctattcattaaatttaattcagctccagtaagagtattcaataaacaaacattgattgctttcctatcttacatttttttaggagtgcgaaataagtgagtcatcatgaattgggaaaatgagagctccccaaaagagtttatactacttggcttctcagatagggcttggctacaaatgcccctttttgtggtcctgttaatatcatacacaatcaccatatttggcaatgtgtccatcatgatggtgtgcattctggatcccaaacttcatactcccatgtatttctttctcactaatctctccatcttagatctctgctataccacaactacagtccctcatatgttggtaaatattggttgcaacaaaaagaccatcagctatgctggctgtgtggcccacctcatcatcttcctggccctaggtgctacagagtgtctccttctggctgttatgtcctttgacagatatgtggctgtttgcagacccctccactatgtagtcatcatgaattattggttctgcctaaggatggcagccttctcatggctcattggtttcggcaactcagtgctgcagtcttccttgactcttaacatgccacgctgtggtcaccaggaagtggaccactttttctgtgaggtgcctgcacttctcaagttgtcatgtgctgacacaaagcctattgaggctgagctcttcttctttagtgtactaattcttctaattccagtgacattgatcctcatctcctatggcttcatagctcaagcagtattaaaaatcaggtcagcagaaggacggcaaaaagcatttgggacatgtgggtcccacatgattgtggtgtccctcttttatggaacagccatttatatgtatcttcaaccaccttcatccacctctaaggactggggaaagatggtttccctcttctatggaatcatcacatccatgttgaactccctcatctacagccttagaaataaagatatgaaggaggccttcaagaggctgatgccaagaatctttttctgtaagaaataagaagtactccattgtgatgagaatcttcttagtctttccttatcttcaatgatggtaa

SEQ ID NO: 10845 - DNA, 6000 bp, Homo sapiens
tgatcttcaatctctgatatcctttcttctggttgatcaattcagctattgatacttgtgtatgcttcatgaagttctcatgatgtgtttttcagctccatcaagtcacttatgtttttctctaaacttctagttagcggttcctgtaatcttttgtcaaatttcttagcttcattgcattgggttagaacatgctcctttagctcaatggagtttgttatttcccaccttctgaagcctacttctgtgaattcatcaaactcattctctgcccagttttgtgcacttgctggagaggagttgcaatcatttggagaaaagacatttttctctagaagaatgtttttggaattttcagcatttttgtgctggtttttcctcatcttcgtggatttatctacctttgatctttgaggttgatgacctttggatgggattttgtgtgggggtcctttttgttgatgttgatgttattgctttctgtttgttagtttttcttctaccagtcaggcccctcttctgcaggtctgctgcagtttgctcaaggttcactccagaccctatttgcctgagtatcaccggtggaggctgcagaacggcaactattactgcctgcttcttcctctggaagcttcatcccaaagggaagcccagtgccagctggactctcctctatgaggtgtctgtcaacccctgttggggagtctctctcagtcagtaggcactggggtcagggattcactggcagaggcagtctgtcccttagcagagcttgagcgctgtgctgggagaaccctccttgtcagaatccactgttctcttcagagccggcaggcaggaatgcttaagtctgatgaagctgcgcccacagctgccccttcccccaggtgctctgtcccaggaagatgggagttttatctctaagcccctgactgggactgctgcctttctttcagagatgccctccccagtgaggaggaatctagagaagcagtctggccacagccactttgccacgctgtgttgagttccacccagtccaaacttccaggcctccttagcactgtcaggggaaaactgcctactcaagcctcactaatggtggatgcccctccccacaacaagctcgatcatccagggtcgacttcagactgctgtgctggcagtgagaattttaagccagtggtccttagcttgctgggctccataggagtgggacccgctgagtgagagcacttggcttcagccccctttccaggggagtgaacagttctgtctgttgatgttccaggtgccactggggtatgaaaaaaactcctgcagctggctcagtgtctgcccaaacagccacccagttttgtgcttgaaacccaggcccctggtggtgtaggcacatgagagaatctcctggtctgcggattgcaaaaaccgtgggaaaggtgtagtatgtgggtgaatagcacagtccctcacagcttcccttggctggggaagctccttgcacttcccgagtgaggcgatgccacaccatgcttctgcctgccctccaggtgctgcacctgcttcctaaccagttacctaactggtacctcagttggaaatgcagaaatcacctgccttctgcattggtctcactgggagctgcagagcagagctgttcctattcagccatcttgccagatttgccaacaagtgccaatttcctgctttcatttcagagaatgacacccccagccatctgcttgttcaatccaggaatctagatcagcacagtgcactcgtttaggccacaaagtgaaatgtaaaacccaataacaccactgcaagtctgagtaactttaggcaaattatttaatttctctgaaacttattttaaaattttttacttgtaatgtggacataatatgtctctttcattgtgtgcgtgtgcgtttttagtgtgtgtgggcatgtgaactgggtaatacaatgattgttgaatggttatgttataataagcatttaatatatgttggttataactactatccttaatttatccttcttcgtcattttataccaaaattgtaacactgtatattctaatatctctcaaatgcctctatttctatccaaccaaattgtcaccactctagtctgcagtatatatataacgtgatgttataatgcatgtatatattttggaatgagtacagcaggctaaataacatatctgccacctcacatacttatcattactttgtggggaaaatatttaaaatccactccattagcaattttggaatatacaatacattttaactatagtcaccatgctatacaataaatcattagaagttacttctcctgtgtaactgaaactttgtaccctttgaccagtccacccctgtccactcctacctcaaactctggtaaccaccattctattttctacctcaatagatttgacctttttagattccacatataagggagatcatgcaatacttgtctttctgtgcctggctcatttcactcagcataatgtcctctagcttaacccatgtcagaaatgacaggattttctttttttaaaggctgcatagtattccaccaggtatatataacatttctttagtcattcatctattggtgaagatttaggttgtttccatggctactgtgaataatgctgcaaagaccatgggagtgcagatatctctttgagatactgatttcaattcctttgaatatatatccagaagtggaattgctggatcacatagtagttgcatttttagttttttgaagaaactgcactgttttccaaaatggctctattaatttacatttccattaacactgtgccagttcccttttttccacatttttgccttaaaatacatttgttgaataaaatgagtagaagggttaattcctcctcagaagtggaaggaaatgttaaaaaagatgaaaggggagatagagatttggaatagggaaaaagattgatttgagaatacaattttggagttcttctgtagatggaatgaaaattgtcccagtgaatttattcagttgtggtaatgtgaaatactatattatgtgaattttttcaacttatcctctcccttcattaaaaatatccacagtagttcacgaggaaagaagacagcaattacaacaaaagcacaattaagccacctctcaaacttgacattgaaatgcatatttgtctataggtgagggcaatcgataaagtatatagtttgaatgaatatacaacaattatcttcatttttaagtttttattttgttttatttatctaagtttttataatttgcttcaaacatcaaactgcagattaatttttctcacttgaattaggccctgagcattttaaattaggggattctccctacaactgttttaattttattaaacatttttattaaccaacttaaactaagctctagaagagtatcttttaataacacaaacatgaacatttaaattaatctatagctggtccaggaaataaaaaactacactagaaattgattgttcaaataaacatattcaaataaaaaccaggtatttagaaacaattggatttaaccatcaaaacactgcaggcatagcacattgccattaacagtcagaaatagaagtcataacaatttgtaaccagttaaaataattcagttgtatgaacgtaggttatattcaaaacaagagaagtgttttttaagggcattctgttgtcataagttaatggaaattaaatttttagccactcaactgaaagtatattagctttgggagtgataaacctaccttttttttacctgctagctgcgtgacatcttccagacgtttatcttgctgaggcttggtgctctcatccagagaatgggaatgataaatattacttatcttaaaggatttatgtaaagactaaatgagatgctgtgtaggaagtgctcagagattatcagcatccttctatatgaagcacttaacaataatttgttgaaacagacactaattcctgcaccagccaaatagctcttgaattttccagattgatgatctatagcaataggtttctaattcattaggataagtctcttggaaagtttataaaaattcagataacctaaccccaaattcagggaatctaattcaatatgcttcttgttgaaatttatcatatcaaaaatgaacaaataaaacaatataaatattcattaataagggtgggatatataaaaactttgctatattcatacaaatacttgaatacaactcaaagatcatgttttagcataaaatgtattgccacggaaaattaaggaaaaatcagattaaaataggtacttttgatcctctattcaacatttctatatggaaaatggatcagaagaacatataccaaatcattaatagagattttctctggtgactactaaagatttttaatgttttaaattttcttttctatatttttcccaaatattctaaaacaaatacattaattttaatcggaaaagaatataaaacaaaatttatattaacgttgaagtatgaaaaaggagagcagggatggcttcaaagaagcaaatgaataccagagattcttctagaaatcgcattctacagcacaagttcacacatccccaagaaaatgccggtgagcatgacccagccattattaacagagaactctaggacatatggtgtccatttgtattctaatttaaaacttccagtgttgtatatttaaaaagatttgatctgcaggtgaaacattggatgtatttatatctgtgttgcatggtaggtaggagctatggtttgcaaaagaatgctgcttctctggtttgacataaatggtgattacttttatttgtaaccgttttttcccttatttttcaggtcatgctattgcagcatatgattcatttttataatctggtcttctctttgcccaattcctgaaaggaaaccaggcgacatcatggaaagaaagaatcaaacagctataactgaattcatcatcttgggattctccaacctaaatgaattgcagtttttactattcaccatcttctttctgacttatttctgtactttgggaggaaatatattaattatcttgacgactgtgactgatccacacctgcatacacctatgtattattttctagggaacttggcctttattgacatctgctacaccaccagcaatgtcccccagatgatggtgcacctcctctcaaagaaaaaaagcatttcttatgtggggtgtgtggttcaactttttgcatttgttttctttgtaggatcagagtgtctcctactggcagcaatggcatatgatcgttacattgcaatctgcaatcctttaaggtattcagttattctgagcaaggttctatgcaatcaattagcagcctcatgctgggctgctggtttccttaactcagtggtgcatacagtgttgacattctgcctgcccttctgtggcaacaatcagattaattacttcttctgtgacatcccccctttgctgatcttgtcttgtggaaacacttctgtcaatgagttggcactgctatccactggggtcttcattggttggactcctttcctttgtatcgtactttcctacatttgcataatctccaccatcttgaggatccagtcctcagagggaagacgaaaagccttctctacatgtgcctcccacctggccattgtctttctcttttatggcagcgccatctttacatatgtacggcccatctcaacttactcattaaagaaagataggttggtttcagtgttgtacagtgttgttacccccatgctaaaccctataatttacacattgaggaataaggacatcaaagaagctgtcaaaactatagggagcaagtggcagccaccaatttcctctttggatagtaaactcacttattgaacctcacaggttcaataatcttatactacaaaat

SEQ ID NO: 10846 - DNA, 6000 bp, Homo sapiens
gatgcttgttatggtggggtccttctccagatgccacctgactgccctgttgtctctctttaggggaagagaatgccagacagcagggagagaggagctgagtagagtacttctctgggttagtagaattcctgatgggccccccttactcaagtgctgtgttgttggaggaactaccttttgataggaggcaggaaaaaacctacctaggctgccttttgttgtgggatggcgtgttggaagaggcaaacattttttgtcaaataaactaattgccttctttagttgggtgaagggacagccctgctgctgtgtggttcctacagttctggaatcccaaagcagttcaccttcccacatttgagaattcttttttggttacctcttgtattgtttctacggtttgtagttgtacttaatgggaagggagatgggagaaacctgtatataccatcttatccggaagtcaaaatcactgtttttaagttattttatttcgaaaaatctcaaacttgctgggtgcttagacctgagctgggcagcggcagaacatgccttgagcagatgggcatgtgcttgtgactaagtggggtgggagtcgaggtgcagcgcgttggtgctctttacagtgctcacggcagcctgctgtagcgcttgcctgcatgtcatatttcaatttgcatttttcttatttttaatgaggttgagcatcttttcctatctttaagatctattcatatttccttttctataaattgtctgtatgtttctctctttaaaaaaaattggtctgtgtcttttaggtttattaaataatttatatattaagaatgttagcacatggtctacaatttgctttgtgattttattcctggatgcgttttgatcttttatttgtaggatttttgtcatgcagacattttcgatgcctatgtagtcaaatttggtaatcttttattgcttcaggtttttctatgatatttagaaaatcatttccaaatccaagattattgtttcctcccttattctctttttttctgtaaaagtttatatgacatataaagtacaacacacatacagaaaagtggataaatcctgagtctcaataaattttcacaaaatgacatatctgtataaccaacacacccacatgaagaaacagcttcatccatattacttaatatagctgtagttcattttgactccttcacaatgtttcattttgttgatggacatttatatagttgtcagtttttgataaaaaatattgctgctatgaacatttttatatattttggtatgtgcaccttctattggctatatacctaggaatggaatttctggcttattcatatatgcgtatgtttagcttgaggatactgccagattgttttccaaaatcactatgctgattaaactccctggaggagtatatgagtgctcagggtgctctacatccttgttgacacttggtgttttccatcacttttttattttaactgttctagttattgtgcagtggcactgcattgtggttttgttgctgggggctcaggaaggtctccagatgcaggtgagaacccagccccagggggttttcaggttccccattcctttgcatttctatgtaacttttaaaatcagcttgacaattttatattttaaaaatcagggacttgtactgggattgcgttgacttttcagattacttttaggagagtagacatcttcattatagtatatctttcagcccatgaatataccatattcctctatttatttagatattctttatttcctcagaataatgttttgtagtttttaggatagagatcttacatatttttgtttagttttatttctatacatttattgtttctgatgctattgaaaatatcattggacattttattttcatttgattgtggttagcatataaaatatatttaattcttgtttaatgtcctcatatctcagaaatcttctaaccatacaggcatatcatctatgaaaatgagttttattttttcctttctaattctaaagtattttatttatttttttcttgctttatgacactggctagaacctctaggacaatgttcaaaaaagtgatgataggagaaatccttgtctcattcctgatctgaaacttttcatgtttcttcattaggtatgatcttttcttatggtattttttattaattttatcaaataaactaatttcccttgtatccctagtttgctaaggattattttattaaatcatgagtgggtgctaaatataatcaaatgcttttactgcatctgtggtgtttcttgttttctttctctaatatggctattgtattaatttattttttaatgttaaattacccttacatcttgaaataaattttatttggttgcgatgtagatattgcttgtttttattcattttttcaagatttttgcatctatagtcacaagacaggttagtctgcagttcctttctgttaagtttttttgttttttttttttttttgagatggagtctcgctctatcgcccaggctggagtgcagtggcgcgacctcagctcactgcaagctcctcctcccgggttcaagccattctcctgcctcagcctcccgggtagctgggactacaggctcctgccaccacaccaggctaattttttgtatttttagtagagacggtgtttcaccatgttagccaggatggtctagatctcctgacctcgtgatccgccctcctcggcctcccaaagtgctgggattacagccgtgagccaccgcgcctggcctctgttgagttctttttaaagtgttggtatcaaagttgtgctaaccttataaaagaaatatagaagtgctcctttttcattgttttgaaagtatttgtgtaagttattatttcttccttaattatttggtagaattcaccagtaaaatctggacttggtgtttcctttctggaaaaattttgaataagaactacactttcctatataaatatcaaactattgaaattgtctttcttctactgtcaattttggtaagttacttttggtttaagtaattttaaaattttatttaaattgccaaattcttgggcatgaagtcgttcataacgaccttttacaatgtttgacgttgatagtatctgtagtgatactagcttaaaatttgtattctctctctcttttaacaattttactgagttgataactttcattaatcttttcaaatgactaaattttgactttgttgacttttctttattgaacttttgttttctatttcaattattcttgttattattttagctatttcccttctactttgtttaggtttgagttgttggattatttgttcattcattcatgcattcattcatttagctgtttgaaatgaaagtttaggttattggtttttcaatatttctttttttctaacatatgcatttaaggctgacaatttccctctatttatttctttagctatatgccaaaagttttgatatatctcatcttcatcattgttcatttcaatttttttctaattttatttgaattttttctttatgaattatttgtgtgtattacataatatgaagcaattggtgagtttctagatgcatttttcttattgttttttaattccagtgtggtcaagggacattctttgaatagctcaaccttttgaaaccttttgaagccttttggtaatactcaactcatgcttgattttgtaaatatgtacaagatatacttgaaaataatgtgaattattttttggttgggttcagtgttctttatatgttaatcaaatttgtaaattatgttgttcagatgtttatatccttactgactttttggctgattcttctgtcaggtatagagagaaacttgttaaatcttctcattgtgattgtggttttaactatgtctttatttctgtctatttttagagttattttatggagaacttacactggagaacttatgatattgtggaccaattattagcagaagaatcttagtaggcatgggtgggaggagtatcctagttagcctttccaattcctcagtgcaagggctccctcttctgttgataaggtggtgattattattattgttattattattattattattaattacttacaaatgacaagcttcctttgttcttcatatatttactatacctcttctctccatcaccttcagtgcttagactgtgcctttttctatcccctgccccacagaaattctcactccctgggaggtactccccttttggattgaaaaattgggggtgttttcgaagttcttctactaatgggacctctaactatttcaagtttttcccaactacatccactgcctcattgctatgacacagtcttgtgactaatgatgctaattttgctgtttttttctcctctactcatacaacatttggtttgtgggtgtttatgtttcttactttcactgaaagtttgggttgtcagaagacatgtgttactctcttgtggcttttatgtatcttagaagaagtgatgaaatccccactgagctacatctgaatttttgccagaacctagaatcataagttgaaaaactattccctgtttgtatgtttaaaatttttgtaatacataattctaatgccatacatgaggttatgattatgtccatcaaatcttgcacttcctagttttgaaaacaaatgccctttatctatatctgatttgttcataatataatgcttttattagtctagtgccattttaacagctcagaatttatcaggtatattagtcttcctcaattttgttgtacataaatttagttttactgttcgtaactattcttcacactgttgctcacccctaggttcctccaaatagtaaacttgctttatttaatcctcacagtgtaaaattaaaaattcagaaaaattaattctgttattgttaaatttgcttcccagagcaatggagaatgtcactacaatgaatgagtttcttctacttggcctgactggtgttcaggagctgcagcctttcttctttgggattttcttaatcatttacctgataaacttgattggaaatggatctatattggtgatggttgttttggaaccacaactccactcccctatgtatttttttctgggaaacctttcttgtctggatatttcttattcttcagtgacactgcccaagctgctcgtaaacctcgtgtgcagtcgcagggctatatcttttctaggctgtatcacccagctacacttcttccactttttgggaagcacagaggccattttactggctatcatggcctttgaccgttttgttgccatctgcaatcctcttcgctacactgtcatcatgaacccccaggtgtgtattctgttggcagctgcggcctggctcatcagcttcttttacgctctgatgcattctgtcatgactgcacacctgagtttttgtggctctcagaaactcaatcacttcttctacgatgtcaagccgctcttagaattggcctgtagtgacacattactcaatcaatggcttctttccattgtcacaggcagcatatccatgggagctttctttctgactcttctctcctgcttctatgtaattggcttccttctgtttaagaacaggtcctgcagaatactccacaaggctctgtccacttgtgcctcccattttatggtggtatgtcttttctatggacctgtgggcttcacatatattcgtcctgcttcagccacctccatgattcaggaccggataatggccatcatgtatagcgccgtcacccctgtactgaatccactaatctacacccttaggaacaaagaagtgatgatggctctgaagaaaatctttggtaggaagttgtttaaagactggcagcaacaccactaggactaatgagggatatctgatttctattaagactgatttccatcacttc

SEQ ID NO: 10847 - DNA, 6000 bp, Homo sapiens; identical to SEQ ID NO: 3438

SEQ ID NO: 10848 - DNA, 6000 bp, Homo sapiens
agtctgtggggcacagcgttcccctggagagaggctgttccttgtgggctcttactgtccatactcccagcctgccctggggggaacttcctgctatctcctcacctccaggcctgagctggaggaaggctgggcagaggagagctgccaggcaagacagatggcctgcagcctgggccagggaggggcaccactttgatctctgatgccctggggactcacgggctgcaggtgctaccagcccagcaccccggcacagcggggaggctgaggcagacacacgctcctggagagacatgtcatgtaaggtggggatgagaaggggtatggtaagggggtagggagcagggctgctgtggctgagatattcagcaacaacctctctgagaagatgacattcaatcagagatgtggatggtgtgaaggaggatattctgcggaaaagcccagttggcagagggcactgcacatgcaaaggctgtgaggctggccatgcttagggtgctcggtggaggccagtgtggccaggtcgggtgggggaggggggctggtaagtgcagaggtaagtgaggcaggggagctgacacagggccacggctttccttcaacgtggggagggcttgggacaccatgtggggttttttttttttttttttttggtgggtgttgtttttgagacagggtcttgctctttcacccaggctatagtgcagtagcgcaaccatggctcactgcagcctcgacctcccgggctcaagcgatcctcgtacctcagcttcccgagtagctggaactatagttgtgcaccgccatgcctggctaattttaaattttttgtagagacagtcttgctgtattgcccaggctggtcttgaactcctgggctcaaggaatctgcccgcttcagcctcccaagggacaccatggtttaagtggcggttgtgcctgaacatgtgacctgtgtcccccgtgtgtctgtgtgcacatgtgtggacctagaccaccaagggaagggcagcaggctgctggggggtggtgtacatggagcagagagtcaaagagccttggaggtccttccagctgagggcacagtcagagtctccatggctccagagaacttggaaccacatgacagtgacagggaggcagatttcagctcagtatcctgaaagcctggcagccgcaggtgctggaattgactaccgtgtgaagtggtgagctgcctgttgcaggaggcaggcaagcagaagccagaggccacagtcagggacaccgtagagggtaatcctgccctccacagctaagagtctatggttaaaggcctccttccaggtgacatgggtgggtttgaacagaaatcggcttttgagactgggcagcaggcattgtggaggccttggaggactgggcagggctttgggcctccctttgaatgtactctgcagatgcccattgtctgctggtgcccgggaggcctggccgtgcctgctgactggggtgggtggcccctctgcaggctctgctccagaggcagcccctgcagggacccactgaggcctgggttggtggtggcagagctttgtcaaccttccaccttttatgaagattctggggcaggggcctgggtgggtgggacagggtgggaggggctaagatcaacgaggggcttccctctcagagtgggtcagctcagatcaccagttgctggcaattggacacatcgaacctggacagggggagccagcgggcatctcctgcctgtcccctcattgtctggacaggacccagatgtgctggtggctcttgctggcaggggaggagggaggccaggcagcagcaaggaagggtttcgatctttggcattgatgggcctaggcttcagtcagctgctggcagctgaggatggcaacttctctctagtccccaggtcctcaccccgagtggcgggtgataattcctactgggaagggctgctataggggtggcatgaagggagatgacggtggaaagcactatcacaggtgggtcccctggaatagacctgagtgagggttgcaggcactctacctgggaggggacctcgaggtgcaccggtacaggacgggaggtgagaggcagggatggggggctggtgccagtgccttcgtgagcaggggacctcggtgggcagccaggagatggcggaagcagatcctcaatacagggcgggggctgccctgttctctgccacctcccagcacctggcacactgtgggcactgaactggacattgggaggtctctgcaggcgtggagggaagtagaagggctgtgggagaggcccaccccaaatcaggtctgccatcctttcggagaaactgggaggctggatttctgggctgaggatcataggaggcagccacgacagagccagagagtcttaggtgattccgtccaatccttatttctctgtggaggcagcatagtgtgatggcaggcagggcccggctgtgagggttcaagccctggctcagccacttaccagctgagtatctctgggcaagtcccctcagcagtgcactgggctaggcgctagcagctctgtctgcaacaggtttctggtgaggcctaaataaatcaatgcgtaagcagtgctgagagcagaggctggcacatcataagtgcttgagagctgttaactcttattatagcggctgttaggattattagatgagaaacctggggcacaggaaggaggactgtctggtttgaggtcatgcggtgagttagaattcagatcttcccgtcgtggcaagctcacggagctgcggagtgtggcagtggtggaggtggggcagggtggccttctcctcatgctctgggctgggtccctgcccctcctcacccagcctgtgctgcagaggtagctagagaacctgcagcagccctgttttcttgaaggaatgggcttggcccagaggggaaccactcagctgtccttggagaacttgttagccttgtctcctggctccaggcccttgtgtttttggtgggctcagtgtctaggcaagggcttgtcaactgtttgtcacaaggaggagacacctgggagccagagggtttgagggagggttgtatttctctccatctccatagacaccccggtccaggctgctgtcttctctcacctggaccattgcagtggcctcccgtgggtatccagggctcatcctgcccgtcaagctgtgtctcccatcctctgttttggccttttagtttcttggacctgccatgggcccttggccacagggcctttgtacctgctgcctcttctgtctgggatgtgcttccctcccctcttcacctgggttttgcctacctctcttccaggtgtcagcgtaatgctgccttctaaggggagtgctccattgctaccctggctagatccaggaccttgttccgggctctcatccccatcgcctctcggtcatcacgattttgtgtgtattcgtgtgtgggtccggtgagaggccagctctccttctggactcagcaatacgagcatacggctttgtctgcttttgctcactgtggcctcctggtgcttgccatggcgccaggcacatagagggtgctcaggaggtatattctgaatgtgtccatcatggggtggagccatatcgcctctccccccttgccaggggctagagggagtggaagcttaccatgagtacctgtatgtgggccccttcctgcagacaccaccagagatcaggtcagagcaaggggccgccagtgtccaaggacagccgtgggaggcagccaggaatcaggcaaagatcccctggggtccttctcacccctggcttcggagataccccctgcagcctgagtgctcagcagccagctctaccctagggccatggaggccgtgctgggcagagggaggggccagcctccagccacctgtggtcttggctgaattgctgccacttggcccgtccattcctcagctgcctcatccacaccaggccaggagtttccagattctctttggaaggagaaagtttcccccaacagaatcttgaagaaacctgataatgagaagcaggtgaaagccaactgccgctcaggctcgcctgtttgtagttgtcattaatatttatttgcagaacctgcaagatgacagtgtgggtgccaggcattgtcctaagtcctggggctctagcagtgagcaaggccgacaaatcccctgccctcatgggactgacgtgccagcgggaggcaaacagtcctcactagatgcgtgaatgaaaggtgtggtgttgcagggagtggtgtgtggaaacagccagtgcaaaggccctgaggtgggctcctgcctgctctgttgggaggaacaacatggacgttggagtggctggacagggtgagtgagggggagggtggtaggaagggaggccagggggctaatggtgcaggtcgtgtagaggccttgggagccattgaaagctgtggttttcactctatgagaagggagcctctgttttttctttctttcttttttttttttttgagactgagccttgctctgtctcccaggttggagtgcagtggtgcgatctcagctcactgcaatctccgcctcctgggttcaagtgattctcctgccccagcctcctgagtagctgggattacaggcgccggccaccacccctggctaatttttgtatttttggtagagatggggtttcaccatgttggcaaggttagtctcaaactcctaacctcaggtgatccacctgcctcggcctcccaaagtgctgggattacaggcatgagccaccatgcctggccatgatgggatcctcttaaagagaggacccctgtggtgtcactcaggttttaatcgggttcctctagctgccaggtgggagtgcactgtgcatgtgtgtgggagtggcaagtgtgggaggccggagcccaataggaggctaagggccctgttgtgatagcccagacagagatgctggagctgtggacctgggcggtcctggtggaggaggtgagtcgtggttggattttggatccttttcaagtagagccaacaatatttgctgataaatcaggtttgggatgtgtgagaaaaggactcaaggatttgcccaacactctggcctgcataactggaaggcagagtagcagttacctggcggggacggactttgaacctgctgaatttgcgacacccattggatagcccaggggagcagcagctggatgggagcctggagttcaggggtgcatgctgtgtctcctcgcctgccatggtgagatctggtgaacccctgagaaggcagtcccaggccccagggagtgagtggagaggcagacagagggaagggagcgctgagccctggggaccaccagggtcggatcagggagaggaggcaggacagcaaaggaagctgagaggaaggaggggacaaggagcgccaggagcgggaccaccaagcgaggaagggactaccgggtcaaatactgcagtggggccaagtgcaatgaggactggcatcggggagaggggactgagcatccccagccacagctcagcacccccagcccggccggtcacctagccttgcctccatcttccttccaagctggtttttgactcccctcccaggggtcaggacccttttccccagtggaagcccccagagccccaggggggcctcctctctgccagcttggggctgccagcctggccctggcctggctgtgatataaattatgtggaaagatggtgatgtgacttttatcggctcatgtgttcaataatggtaatatatcccattatatcatattatattaatatagtgcaatatattacatacagcactgcacattaacttgactcgagaacgcactgggcagacaccatggttaattttctcggcctggccacgccccactgctggcactcagtgctcctggtgatgtggtcatcaggacatggggt

SEQ ID NO: 10849 - DNA, 6000 bp, Homo sapiens
gtacattgagaggaaaagtgtagcttccttctaaatagattccctcctaggccaagacaagaaggaatgccatgtcctcaaatacctgctcttctccatgggactgggttggaggggactgagggaggaagagtcaatgacaagtcgatgattctgaaattatgtgcatcacagctgaggcatgtgggtgacgtatttcataccatgggcatcagaagtgacttcctgctacatagacagcatgtcatctctaagagctgaaagtggaatgtgaaggctgtggacggctcacaggccattggtggtcagcgctccccgaggatagatcaataagggtcaagaaagaagtgtggatgacacctcaacgaaccatacctcaaatctgcactgccccccccctcacccgagatgctgtctctccctcttctaggagatggcagagggggtagtgctaagagtagaatccagaaaagggtcctacttggagggtgacttggatttctggcagaagctggggcatcactggagtcataacaagtgctggaagggagctgtcaactgtgtccagttggctcaaaaaatggaagctttgcaatcttccagggcaaaacaacatcaatgtctgagagaagcatacacaaagaaggtgtaataacactgtctattggtggaatgggtgcagtagcagtaagtgcaaacaaaatctgagtggctgcagctaagcacagatatgaccaattccattagtggaggctctgccaaaatatacacacccaagataagaataagaccatttgtatactatgaaactgcccgattatttgccagttccttccttgtataaggacagatcagtgccaaaggagaattttcttggcctcaatatagaaataccaaaagagagctgaccttgggtcaaaagggttaccaacgtctggttatggcttaaaaaataaaagaaaataaaaaaaagcagggcttaccctgccaagatatgaaggtaggagaatttcacaagttgaactattatgtactttagctatgctggccagggctgtggcgttaataattttgcttgtgtgttacactttcaaatattcctctgcaatgagtcagttaagcaggcaacagagttttgctgttgtcactcaggctggaatgcaatggcgcaatcttggctcacagcaacctctgcctctcaggttcaagcaattctccttcctcagcctcctgagtagctgggattacaggcacctgccaacacgccctgctaatttttgtattttttagtagagacagggtttcgccatgttggccagctggtttcgaactcctgacctcaagtaatccacctgtcttggcctcccaaagtgctgggattacaggcatgagccactgcactcgacttaggagcttaccttctagtccagggatgcaaggtggagactccagcaaaatttaaaagtgtattatagtgtaccagagatgatatggaaaactaaagcaagtaggggggatgtggagtgatgaaatgtaagatatggctgtcaatgaaggcctcactaagaaagcaatgttagggcaaaagtgagaatgaggtgatggagtgagtcttgaggaaatctgtgcaaagagcatccctggcaggcagagagaacagcaagtgtgaagaccctgaaatgcaagactgcctggtctgcaaggaggccagtgtgcctggagcaacatgaatgatggggagagaaggtggtgcagatcatgaaggtctcactggctgttgaaaagacctgtgctctgactacgggagatgagttgagcacgtgtggactttatataacttgtattttataaggaccattttaactgcagtcttcagaacagactataagtgacaagaggagatgcacagagacagataagacactggtgattatccagtcaagagatagtgatggcttggatgagaatgatagcagcagaaggggaagaagtgccagactatgcatatattttgaaaatagagctaacaagatttgatgacaaattaaatgtaaagtgtgcaaggtaggactcaaggataactcttagggttttgatctgggtaactggaaggatggagatgccctttgctaatatgggagagactgatggtatagctagtttgggagggatgatcaggagtttagtttgggacatgttctgtttgagggcctattgaacaactgaaaggagatatcaagtaagcagttgaatacgtgggtcaggaattcaggtgagaggtctatgatagagatagacatttggaagtcatcagcacaaagatttaagccaaaactagtagagatcacctgggaaataagtgtcaacagagaagggtttcaaagactgagctatgagacactcttacgttaagaggaagaaccagcaatggaaaatgaaatgcagagtttaattttgcttgcttttattgataacccattatataccagcactgtaatacgagctgggcataacataaataagactagtgcctgccttcaaggtgcttacagtcaatgcattagatggattgtttgaatgcagtgtggtaacttcaaaaagacatgcatctggcagtgtgggatcagggagaagaaatacttggctcaggctgggagaaataggagggtccttggaagaaataacacctggaacttaaaaagagactaaacgttacctgtgtgaagaaaggagaagggcagagtgaaagaagggcagaagtgaaacagctgggaacatgctggaaaatatgtatttatttggtgctgaaatttcttcctgagaaagtaggagctttgtctctaatgagactgtaccttacagccatgagagacatttcatattaacaaagtgataacatgactggtaaattattctctctacgtttgcagttgggttcaagaaatttgggttcagccaccaacaccaacgttttagaattcaagaaaacggctgctgtgacagtcaattccagccgtagctacgacagggcagggtctctccatccacagttcattctgggttgccgctgaggccatatggtggttgcattttttatttgcttttgttttcattgtaatgtgtgtgcagcaagcacatagtgttcctaacaacaagcagggaactgtgggcgagaagaattgctcctcagggaaggaaagggacagccactttgacaacgcccattccatgttagacagcctgctgcacccaacaaccaaaatacgagcaggaaaaaaggcagcatttgcccaggaactgcatccctcagcaggctctttttaagttagggtgtatccaatctaacgtgtagactacagttgagaatcattatctagaagtggaataataacattttggagttcatcctcttcttgcccaaatactctggtctcaagcctaagtcctgctggtggttgctgacttgctacaggctgatagcatgacaagaagggaaggcagctggaggggagagaggatgaacttggaggcattggagcccagggctccagagaacaacaaacagttactaaactcttcctcttcagtttcagcagagtctataaactcagtactattattatcccactttcacacacaataaaactgaatctcagggccaggagcagtggctcacgcctgtaatcccagcactttgggaggccgaggctggggattacctgaggtcaggagtttgagaccagcctggccaacatggagagaccctgtctctattaaaaatacaaaaattagccagatgtgctggtaggcacctacagtcccagctactgggaaagctgaggcaggagaatcgcttgaacccaggaggcagaggttgcagtgagccaagatcgcgccactggactctagcctgggagacagagcgagactccgtctaaaaacaaaacaacactgaatctcaatagggtcaagtaatgtgtacccggccacatataattggtgggactaaagcatcagttcctacagtctgactccagagtcctttctttgacactatgaggaattccctgaagatactcttgggactacctgcatgggactcacccgaagcacttatttccaatgccgattccaagccaggcctcattcatcaaactttctgtgggcagagctccagagtagagagtcaaacagcattccccatccgtgttctgaccttgggaagggttctccttgggcctcagtttcctcttttgtaaaatgaggatcagtgaggtcacttccagttcaaaaatgagctgactataattcatctttaaacccagcaacctggatgcagcctgccaaccaggcctttaccatatatctccttatctttaaatatccatgctattgagcggtattttaagtaccactaaatttatagtttgatacacaaatactcacagagtttccctggaaacctaggagaactggacgtccctccaatatggcatttttgaggtacagccctcccgcgggggaggactaagcaacttctctaggtctcttctcttctgcggattctttttttctctgctttcttggcactgctaaagacaaagaattcatcgatagtcttaattttccttcctctctgaagttacaatctaatttagtggtcatcttttaaaagttgaaaccagacatcctgtacttctcattagctctaacctatgtttggtttgctctggttttgcttttctgatttttttctttggagaaagaaaagtgagaactaggggcattggccaaacaagtctgtccacttggtggagaggtttccagataagaaggatctgaaggacttcccatgggcgtgagggaaatcgcacacgccatccggggaagaggaccaggaaatcactttttgtttttaaaacagcagcgcggctctcagggatgactctgtgagactgggaggatcatagctgggggaggctgagcgtgggagcggtgctgccagtcctgcctgaaaacgcgaaatgagtcttgcttggttctccctccactgggcgtgagagcccctgcccaggaggcccaggacaaatggccccatagtggaaactgggaagcttttaggcatctgatcagagcgggagccagccgggggaccacagtgctggacaggtaacagacatttctcctactgcggtctgtcattctgtctccctttgtagcaagacctcaggggctcctaagtcacttctcttaagacatcttccacttacgatcctctttgcctgcttttcttttgcgtaggtgtgatatgtatgttgggaaagttaagtatgtccagtcaagagcattgtgcatactgttggtccagttaatgagactatattaaaggagatggcgtatcaagcaactagctgggatcctttaggattttcttaataacagactttttttttttcaaacaagttctctcgtccttaaaccagaaaatactataaaaaccagtgcattcatgagctactgagctgctgctcttgccaagagcatttcagggccagtcggccattgctgtggtcaggctgaggaaggaagaggctgcatcccagtagcaggaggagggagccctggctattcgctcagcttcgggagagtccttccaaaggacaagggatgaccttagaaatgtaaaatgtaggctgcagcctcccacacaggactgaggggaaaggagtttgtagtcagcattaggaaggaggtcagtaaaagtgctggggcttcagggccaggccgacttgttttgaaaggagcaactctatgatgtgcggtttgcttaaaccatgttttctcatatttcagaaagccaggtcatgccacttcactacagcattttttctttcataaagggctaacgtagttggtttttcaatgtaggttatttttgaattacacagataatacttgactatattcttatcgtaaaagaatatctctaaatagatttta

SEQ ID NO: 10850 - DNA, 6000 bp, Homo sapiens
gcctcacgaggatcttttgagcttggagaggtgggcttcttggtgctgtataactcttattttaaacacagacggagtgaaggggaaaaaggattatcacttattttataggttatagctttctcttctcagtgttatctgtgtacattctgtacagagaataataattctgtatcaatactgtacattctgaactgattaaaggccacagataccgtcttgaccaactgccagatttacacaggaccttgaatttagtgacacttgaagcttacttcttgaataaaatgaagtgtggactctataggattttgatggctctccaatttattatggaaggttcagatgataagaatgttctatctcattagtacctggtttgcctttgctttttctttggatatttagcaagggtcagacacttctatttgtatttttcatctgtctttaggaagcagtagagaatagtgtgacagaacagactttgaagtcaggttgtgttgattttctggctcaccattcacttaactgctcgatgccttcactccattgtctataaaatagggttgcagaacgtataaaaacacatgaaaaatgatcacaacagtacttggcacataggaagtactccgtaaatgttggctgatccaccacaaaaaaaaaaaaagaaagaaaccaacaacaaaaaaaagaatgagatcttgtcatttgcaacaacgtggatggagctggaggacatttagtgaaatatgccaggtaaagaaagacaaacttcacatgttctcactgatttgtgggagctaaaactaaaacaattaaactgatggaagtagagaaaagaatgatgatttccagaggctgggaagagtagtgggcagtgggggagtggggatggttaatgggtacaaaaatatcattaggtagaataaataagatctagtgtttgatagcacaatggggtgactatattcaataacaatttactaaacatttaaaaataccttaaagtgtataattggaatgtttgtaacacaaagaaatgatgctgcataaccgcaaaggtttgaggtgatgattacacattgtatgcctgtatcaaaatatctcatgtaccccataaaaacttatacctactatgtgcccatacaaattaaaaacaaaaaatttaaaaaaaagtttgctaagccaggaactgtgacttacacctgtaattacaacactttgggaggctgaagcaggaggatcgctttgagctcaggagttcaataccagcctggacaacatggcaaaaccccgcctctacaaaaaatacaaaaattaacattggtggctcacgcctgtggtccaaactgcttgggagactgaggctggagaatcgcttgagcccgggaagcagaggttgcagcgagatgagataatgccactgcattccagcctgggcgacagagtgagaccctgtctcaacaacaacaacaaaatgttggctgatactaagtgcttggtagttcttctcttcctctaattagctgtccaggtctcaattataacacaatgctaccctacccctctgataaaagcaatttctcataagtcacagtgtccaatgcttgtccttaggtagcttcataatttcaaacccacctctccttatcttaagcccttgttccgagtatgaagagcctgtatcagctttgataagacttttatcatagtagtcagaagaatcgtctcgctgaaatttacagtttatactcaactcttctcttttttactcctcctttcagttaaaaaaattatacttgcaatatatacatatacatatatatagtgctttcaaacattttgcaactatggaataaaaccacctgaaacagtccagggtctttcacactcctgcatcatcacatcactcaagtctgccgtttgtgtttgcagcccctggggtaaaacttctttatgaccaaactcaaagaatgtccagcacttctgatgtatggacatgggcatcagggtccttctgtaattgggttcctgtccttttctggttcacctgctgatctgtctaatttagatattgtttcacaccgagtactcactcagggacagtttgttgacatatgaatttagataactagtttcaataacatgattctgtttgcattttctttctcccaggactcaggcttattgctgtttatttgtgggaccctgctcttttgcttggaaaccaagcaaccagactcttcactaaaccaacaccaacagatgaagttagaaggcttgaagctcttcctcagccccaggcctttcttcttcttcttttttttccccccagcatttgtggaatgtaaagttgaccagatgaaccaaaataaatttgtttacctggcttcttatgctcaagtgaacaccttgttcatgcctgtgaaacattacaatcaaactagaggggcaacaaagctccacagctctgcactcagaaggttggctttgtcctgagctcttaaggtaataagatgtccgaatgctgccacagtgcataaacccatgctgcttccttttgcactgtgtcctttgcaaggaccagagagctcctcaaactcaccaggaagtactgaggaatttagtgttgcgtgcactaacagattcttagcaggaaattagaagcggtgagtaaactgctttttggtgagtcatcagtttcaaaaacacaccttatttatgaaacaatctgaatattggacgtactatgacttccttctattaaacacggaattaaaagactattaaatgcattcatctgtttggattcagattttctccaaaatcaatgtgctcatggaatcattgatgtctaccggttgcctcacctactagtgtctgctaaagtgtttttggtctaatgagacaatgtagggtttcctttggttctgagggccataccttggccctaggaagttgttgggctgcagtgacacaatgagccaaaggtggataacagagcttccatctcagcttcaagccctcaccaccttaaactccacactagttggtcatttcaactgtttccacccaattccatggccactttcttgctctagtgattagtagattattaattccattttataaacacattcttactaggatgtcagtgaattactttaaacacttgtaatttaatatagacaataggaaaggggtggcactgaactgagaagatggcatctctcatcttaaaactttagacattggacctactgagtaagagtatgtatgtctggaagtctttatcctttcggaattgaaatttggtctacagttataattggtggactgtgaaacaggcaaaaccctacagaaaacaagcagaaggagaatggaattaactcgactagattatgagattagcttttttccacccaggctgatgggggacaaaggaacaatggttgaagcttgagtctacctgacaattggggtttgtcaggtaagccccattctcttgataactttttcagtgggctagacccagacccaatcatgttaagtatgatagggatcagtggcccagctggtgtggaagacaagtgggtcatactgggtttaggcccacatagcactaaaggtcttcaacatgcaattagaagctcaaatgttgacgggaatattgttcactctaaaaaagatgtttctattagaatttacttactctttcatgaaaacatagatgcttcctctttcctgattgtgagaacagtgtacctgactagcttccccttttctttaactgttaggaagttctgtcctagagataagtttcaaatttatgaaacaataatttcagggattattatttgcatcacttttcttaattgactctttatagtttccttttttatagtttatatagaggttttataatgattttaaaatttttattctcacactattttattttatgcattaacattgtaagccagctcaagtcatttgtaaaacgtggagtgcttaaaagaaacaaaagaaaattaataaattaattgaattcagagacatcctttgctttcttttcagtggcatttttgagaattaacatattattatccccttcattattccataacagaattacaaattgctaatttagacgtggttgttagtagctcattaccttgaccaaaagtaatttatgagccaatgtggctaaagatacagcacataataatcttgacctttcatagttttcaaactggatgactccttggaaagaaaacaaatctttactaaagaagttaatcaggtttcactctaggttttctaagcacaaaaaacacaccaaaagcattcaccccagcatccaccctgttgctgtcttttgccacagctcctttggtactaccccacccagaagtctgaggttgttttatctgggaaagtagctagttgattctttagtcttaaataaaaaagttggaaaaggaaaaacagtatctacccttatttctgccccacaggaattacccacctctcctcattggaattatgcatgaagggctgcattccttcagctttatagggtatgacccagtgtgttcagaggttggacaggaagatttgatggagtagcattttgtagtaaaccgatctagggcaaaagtgttccacattcccctagagcttttctctcccatttcccttctgtgatttcagacacccatttatgtctgctgggagaatcattaagtcttgagctctgtgctccttcctcttaccagacctgatagtgactttaagcgggagggggagttaggagaaaagtattttgtttccttcttgaagggggtgtgtcccaggcttgtctacctgcacaggcagtaatgcgtgccaggaattgctgatggatcagtgagcctgtgttcatgccagtgagctgctgtggctcagatactgatactttctttccaaacagcataagaagtgattgagccacaagtatactgaaggaagggctccctcgagttctggtgtgaagagataaatcaccaggtaagcccaataactgtactttgattactaagaacgtgtattacgatgaccagtactacctgttaatctgagattattttttctctccttgaaaaaaaaattctgatttcaatgtatcatttcctgaagatggttaaataagggaacagagttgaaaaagcaatgagcagaaacaacagatttcaacccgcttactaactataatgaggtgattggctgaggctcaagctccagattttctgactgaaagcacactcttccctctgtgataacacaggaaccccattgttctgatgtgccagggaggtagattgcctagaataaaaagggctccaccaaagatacttgttaaagtatcagtcatatggttttcactaattcataatacgttaacccttgcaatctcttaaaataaaattatgcttgagagaattaagcttatttttcctttagggtgaattagtttaagctttgcctggatccatatatatccaggaagtacttctcaatttaactccttcccaggactccaaaaaaccctagaattgactaaccatttctcctgctacttccccaaataaatataaaatgtcacactgtattttcttagtagaggccttgaaaatatataatttttcttttctcttttctttgttttcatgaaaaatccatttatgtaaacctgatagcctatgtaatgtaccatgccagagactacatgaaggaaaaataccgaaggagatatagaaagaaggtcaaggtgggagaggtgtggagaagtgatgaccttggctttttcatgctgagatccattaagctcaacttgataatagcattcatgggctggaaattacaaacagaggcaagaataacaaaaaataaataaaagtacattctttaatatgttagaatattaacacaagccttttattatgctctgttgtcattaag

SEQ ID NO: 10851 - DNA, 6000 bp, Homo sapiens
aatcaggtcactttgcttattgaatgtttgacattctggatttgattgattgctttcttcagatgatttctaacttgatcctctgtcccctgtatttcctgttaggtctagaggcttgattagattcagattccgttgcttaggccataaaacctctcagtggttctgggtacttctgattttgtcatatcatgaagtacatggtatctgcttatcagacttgtagtttatagtgtttttccccctttatcttcgttgttatgtctctttgggggaatttaaatttatgctacctttattatctttctccagccaaagttcagaaaagtctggatttacatagacaaaacaatcagtcaaaatacagtggtctagatactgaatttcttggacaagttgtatttgaaaatgtttactctttcatacacaaagggattgattaaataggggaaaaagtttgtaagttatgaacacttaagagggattactgaatgtaaaattacaaaaagcacatcactaattactatgtttagaaactacactattaaaagttaggatgaaaatagctggaatttaatgagtcatctgctaattattcagcttatggatttctaatgccacttacttctagcctttctgcttttccttagggagtttttggtggtatttttactgccttttaacacctccagaaacgactctatgcttacaactgaccataaaatgtacatgtggagagacacatgaaatattatgactcaggattcatgctgtgttactgaggtaaaccatgagcagtttacaccacagttgaagatttttcaggggcaaatgcagagtagaaagtagttagaaatctgctgactacctggcatgctatctatgggaagaaacgtaacttatcaaagtcaatgtactcactgaggaaagagacaggctcctcaggtgctagatgtgttctatggctccaactcagggttctcagccatgattgcacattggaatcacttgggcagcttttaatctcactgatgtccagagtcaaccctgaaattgaatctgggtctctgaggatgggccccaggcaacggtattttaaaaaaaacctctcaggtgattctaatgtgcagtcagggttgaaaatatccaatctagtcaataagaggtggcatttacaagtcttactgtgtgcacaggactgtgcagaaaatctcttgcacataaagaaattgatgcttggagagatgttatttgctcaatgtcttgcctcaaaacagtttcacacctagtctatttagcttcagaaccagaggcttttgagcttactgtgaacattaaccaaagtaagacattgaattcatgtcataactcagaacacgcatgataatgaaacacaagtttaacaaataatacttattaagtatgatgcatgctgatattttaattaaaataatactagtcaaaacttagtaaaatgacttcatgacttggagtttgaaaaacttttctaaaccatgacagtacaggtttcatttctgttcctgcaagtggcaagatctttttcccatcaatgccttctcattttgtttgctttcttgcttggaaaatctttcctttttcctctgcatttaaaaaagaccatctaattgcttcctcgctagaaagtgtttccaagactattccagtccatagtgtctcattttctgatgcctatttttaatacacggagatcatcccacactttttacactaaattatatgatatattgtgatgttctgtaattgtcttatatcttagatagttatgtctctttgaggacagtgactacattctatgcttttgcttctatatccttcgaaatgtctagcaaaagcacatgtgtgttagggacatcacagatactaaaaaacagctatgtaccctacacaagtcaacctttgagctttcatttctttagctctgaaatgaaagggatgttttaggttattctaaagtctcttccagtttattagtctaaatttctatgatatatgaggatttctataaaatgcacaaatgaagaaaaaaatacaaaacttttttttttagcaactactgtaaaagaaaagttcttgtgtgagacaaaaaaagcctgaaattttttgtcactttttggtaggcaaaataaacaccttttcagagagaaagataacatctttctctctgaaaagataaagttactgaagtttaaaaacaaagctgggctctttggcacttggatactgaaatgtgattattcgtaggccacttttttttcccccaagttgaatatatatatatatatcagggaatttccatgagctcttatcaaattaaattgattgcataactaaaaaggcctaacaatgaatgtgggcttgaggtacatggaggcaggtttataatttagggaaaaataattgaatacaatcatggtttatatattgtttgtttgcaggtggtttgtgaaatgtcacaaatgtcactcaggatcttctcagtggctctgaggccaaaggatgtggctggttggctcaattactagcacctccatgacccatcagcattctcattcttctgatcctgagactgttggtaaaggagcagagaggtggtcagtccccttggtgacagtggtggtgatgtgtgtatactggggaatggggattgtagtgggcatttatagtctttatctactcaacattcttttgccttctttattaacaacactttaattttcctttgggaaacctctttctttctactcggtccctgtggtttgggtatatatgaagggtacatacaattatttcccttgacctttttgtagataaaggcaaataaccccagcctggcagtgtgcattccatcccatagttacaatggttagttcagagatgaacgcaggatccacgtgggtctggtgagacattcttcagcttgctttctttctgatgcgactaattgctaaggaggttggatgttaagactggagatgtaggtcttccctctgtttagagaaataaaaccagtgcagtgaaagcacaatgaagacagggagagaaattgagtcctgatgctctttgagtatctggagtaaaaaggatttctaagaacgtgtgtgtgtgtgtgtgtgtgtgtgtgtgtgtgcgcgcgccagttctacttatgggatttataaacatatgaaccaataaattccaatgccctttgctgcaggttttgctaactcagtttgagttgtgtgctggccacatccaactatcctgacttcacttttgctcgctgataatctcctttcccatcttaaaagtttggtccaggcaagaccatgtctcctgcttttattgagcccagggcttatttcgtctccatctggttacagaagtttcttcaaccttttgtatagtctcctcttgccttattcttctacaagttcaacacaagtgcttctttcacagctgtaggtggcaggaggcaaagaactgagatgttctggttcagtctcagggtagtgatatgcaagtgcctttgtgtgaatgaggaaatgccactctctccgagcttggtgctaggactggtgctctggaacccaggctagatcttaactccaaattgcctgcccacctcctcagacagaggacacagtgcagagtacaaactgcacaacactatactgaagtcccataggtccaagaagcaagggttggaactatgaggtagaaaaacaagtccgtggacagtagcaaccctctgctgctcatgcccactgctgctgtggtctcttcctagggtgacgatagctgctgatgctgggagcctcctgggcatcaccacctgaggctgtggcctcagtaatgatcacatatgttgataatagctgaaaatatcacttgtcactgaaagcagcattttccactgtctcaagatgatactttttctggggggtcttcctgagttgtttggcatctttacagcccatgtgttgatgaaagtgaatcgttttagaaatccagtgggaggccagctggggattggccattggaagagaacagagcaccgggtaaaggaggatacctggcaattctcccatgccacacatcagggacaccttcaagcattggtctaggggccccagctggcttttagttatttcagtcttctggacgcctgcgtgagaccctcatcattgtgttggaaatgaggaagaataaccaaagaagaaacgcgagtagcctcggggaacgcaaatccactgggcagtagccactggaggtgcactctgggggcccgtgggagcgggaaaccaggaccctaaaaggactgccagggattaggggcggggcgaccgtctgggagcgaggcgcggggtgcagggcgcaggccaacgacgagggttgccccagtgccgggtgggcgcacttgcggtaccctcgatgcctttgcccaggcggaggaacgatgcgacctgagcatagaggggttcagggcagggagcggtcgaaaggggccggcgatccgccctggggcagctcgggcgtggcctccagggatctctccgtctctacttgcctcctccctctttacttgcctcctccctctttacttgccccctccctttttacttgcctcctccctctttctcttctctcactcacctcccggtctaaaaccggggccggcgcctttaagagggagcgttggttaccctgggggcgggaacccctcggcggctcgcgaggcggcggcgctcgtccgcgatgctcctcactttcagctccagctcccgccaccgccgcctgtatcgccgccgccgccaccacctcctcttcgttgtcctccttcctcctccgcctggcagcgttgttctctgcagcggaggagagaagtgctatgtcaggaaagttccgggagggactacatggagccatgctccctgggctcttccgcgggcgcccgcgcgctgcccttcgcttgaggtgaggtgaggctcgggatccccggcccgcgatccccggcccgcgggacaggtagccgctcggggcggggagcgcttgcatccgctgcgctgggcagggcgagcagtttggcggagtgcggggaggaatgaggctggagagaccgaagttgtgccggagaagcttgggttttcgggagggtttttgcagctggactggagttatttcggtcggcgccacacggtggggacccggcggggactcggtttctcccgggccgcccgcccccctcccctgcccgtctgagcggttaggccttctaggaaaacggtcggctgcagaggggcaccccatgccggctcctttcctgctgggctgttctggttgagaattcagtgctgggagtgagaggaaggagatgagctccacttgaacttttacacggtggtctcgctgcttgagggctgaaatttaccttgtttgcgagagcgaaaggtcctttcgcgctccaacagttaagagaggttccctcttccatgtggttcagcttgcggcgctgtgtgttgcatccttggccggttttcaacgtcgccctgatttcagtcttttctcctctgccccttttcggaaacattcttctttttaataataaaatatgttgtggaggctcagagtgcttaaaaaaaaaatccaacaacatatctttatgaaaatttcccccagggcttgcccaaattttcaaagagatcgtttagtcttggatgagactgagtctcgacacttagggaatacaggcatccctatagtagcatgcaggtttttagtgaggtaggatgaagtttaaaccatatgtttttaaaataggatttctctttgtttattgggtgagcttgtttttcattatgtcttagattaagaagccttcaaccagttctaggagtagtgtttctaagaatcatggataaaaacctcatgtttcttgcataagctgatactgcttcagacattctaatccattgacga

SEQ ID NO: 10852 - DNA, 6000 bp, Homo sapiens
ctcataaaaatgacttactttaagaatactcaattaacatgtcttacttctatcttaagaatgcatatcatactttcatttcatttgcactgtaactattcatgtgtttattttcaccacaagatttgaaggtcctcattggcagggatgatatcttgttcatctttgtacccctagtatctggaataattctccaagcattttattattggaaataaatgtcttttaaaagtaccacttataaaatgaaagatttttaaaatgaaagaattttactaacgctttagttaatagatagcaccttaccatagaccagccagctaggggcaaatatagtgagaagaaagaagtccacttagaagaaggaagaaaagtataaaaggtcaactgatttttcactttgttttaagacattccaggtcataatgttttatgcttactgagacagcttatatgataagctatgaccattcttcaagaagttggaaagaaataaattcttgtacaaacatcactgccaatggtgttgaacatgagcacctgtgtttgaaatgaaagcacaggccaaggccccttagggaatataaacagatatcaacaatgcatcatagttaccaaattaaatgaaaaaggaggtgttttctatatgtttcctgaaacccatgtgttttcttttgtgcttgaaagcagtcccaagccttggcattgtgactaagcttgaaaaagaattctcctgaaagtgctccccatttctcaaaaattaagagaaaaagagatcagccagtattttaggttattcattctcatttttaacaccaacatagctgctaagtaattttaatagcaaatattagtcatgttatttgaaaaaaagaatttaattaaaattgatcaatataattcattggtcatttacttaaaaaatgaatgttctttatactgattataaaatcattctgaaatttggctagcaccagaagtggaaaataattcttactcatttagaaatttagagccataccagacaagtcactgatgtgaaattcagcagccatgagaaggtaaatggggatttactagtaagtaaactttatgaatctgattgattggtaaggcttgaaaatcattgtcagttgttctaagagttcatccacgtttcttaatagcaagtttaggacttaggcaaactgctcttctttgtttttttttttttaatctaaagtgtatattttatataatattattataatataaaggtaaaaaatgaaatgagtttgggaagtaatgaaataatgcagtccttctcagagcctttaatatattaatgtgggttatgactctgagaagagggagttatatgtgtcccaaactcttttgactattatattagttatctacagccacaataattccagatggcaaaccacaccaaaattcagtgtctcagaacaatcttcatgtattctcacagagctgaagtttgactggaacacttctgcttcaagcagcaggcctgggaatttgtgttttctatgcttctctcatcctccttggcctagcaggctagccaggacatgttcttcttggacaatgccagaggtacaaaagaggcagtgaaaatgcactaagtttcttaagtcctactcctaaaattgtcatactgtgtctgtaatccatattcaactggacaaagcaagtcacatagccaagcccaaagtcagggagtgatgaaatatgctccatccatggtgaggccattgcaaggagtggatccaaggaggggttaaagagctaggaccaacaattgtctcacaacaaaactctttgtttatggatcatctcatggaactagtgctccacagaacacacttttggaaacactgcaatatctcactgctttttatgcaatgcttatgttagtgggcacaaaatgacatctgactaactttctgagaatttcctaattcaggctaatttcctgagatgctgcagcctgagagacaatttaaaatattataatctaaatggaacccactactagattcctagcagaaattcttcttgttaataggtctttaaaatcccttctgttgtgaaaactcaatgaaaattcagcttatagagtcaatatggacacagcgggttcagtttagagagagatcattttcctagagagcctcagtcaggattctgcaaaggattttggagggaatcagatgctttgataggagtggatgattaagactaagttctcagagactgtgcttcgaggaagtgcagagccaaagaccaagctgggtagcagatgattgcagagacaagtaatatcccagcccaggccagtgaggagctcaagaacagcctgggtcctcagaagaaagccatgccaagtcagcagagagatgttcctgaacaatcccttaatgagaaggaatagagatcaggacctgctgcggacactctgcagtccatggtatatacacgtttggaacacaataagcctcattctcatcagcatgaggggtcagtcattgcaccaatctcttttatttttataaaaccagaattaatgagactcaccaaaaatccttgaaccaaatgaaagtttttctgataagcatagtcagaagtctgtagccatagcaggacaacaccaggtcagccggagctctgcccacaaatccacctcccagcacataaattgccagtaacctgaagagctttgtctgacaaacttcccagtttccagctgagaaaaaaaaggcagggactttacaggggtggggttttaactgggcattctggctctcctactgctatctaaagaatgttacctcatcagaaagctcaaggtccagggtgagaattaggtgggattctatttctggttcagcctctgtttcactgtctatggtttactttaacttttaacctcagtttctttattagtaaaatgggataacacccatcttgtgtaccttccaattattataaaaataatgtaatgataccttttaaagtatgcataaaaagtggcaccaaaatgtaaggtaaggccacatatcctccattgacaccaatagaaattgtcaaacttaagcaaggatgcaattaagcctcatatgctaatatttccctaaatagtgacgtctagcacaggctttttagccaccaatgctccataaaacacaatacaatatattgggctagaaaaaaaaagtattcttcacttttcaatttagcaacaacaacaaaatgagatttattcatccttcatttagagtacacaactagatagaattcgtcaacatcatcatcctcatcattatcaatcactggaacaaagaattgaagtagcaaaaattggcattgccaatattcctgtcttttttaaaatggattgcctacaaatgagaaattcaagacaagccactctgagttttctttgaaacgacttaacatttggtcagggataggaaagttgaacaggaaaatgtacatcaaaattttaacttggaaaaaaacataaggtgtataaacttatagtggactgaatttttatattattagagaactagaaaaggcttttccacaagggtattgtagagggcgtttagataatcagcctaataaatgggtcaagtgtttcttcttgtttttctttcctaagagatgctttgaaatctcccactttgaaatccaaattctctttaaatttaatctcccatcctcatatctccttgatttttctgagagattttagagatgatgtctttttgcacaaacactaactctaaggcgacttccagttctgaaatgtataatcattgactctacacttgcttttaaaaattctgatctgttgaattttgaaattttaaccaatttcactaacctttcaagtttttctcattttcctaacttaatgtgaaatacaggacattttgccatgccactctgactactcatcttatagatgaaggaaggattctgaaaggtgctctaatgactataattatcatagggaccacatattgagcactaactacatggcaggcctgatttgagggcttttgcatatgtcaagccagtgaagcctcttagcatccctgggagggcagttttacaattctggtagtaccaaatgagcaactgaggatgagaaacattaaagaacctgcccgaggtcatatgcctaacagtaaatgataaagctgaggtggaatgcggggcgggctgcctgtctccaaaatcgtatgaggctcccttgggtggaaagtgatccaactccagcttcgtccttgtcaccttatttgctaagtagctactaaggccagcagatttgatcagggtgcaagcatgaagctaaagatcattataaagcagttgtactgggtggattaaaagttcgtgaaaacaaaacaagttccttggtggtattatgggtttcttctttcctctctcctttcccctttcccttcctttaaacctttggtacatcaataaacacttgttcatataaaatggaggtcgagtttctattactgcttagctgaaaacacctacaaatgttcacaggaactttagtgactaccagtctagataagcacttgaaaataagaaagaacaagctccgcgagagcagagatgccttcagattttattcgcgaaggcaccccacgctcctagaaaagagcacgacgcacccgatgctcggattggatgaagtggcaaaggtaaccccgctggttcgggcgtttggctgttcctgtgcctggacccccgctttggaaatggaggtggggctggctcccaacctgtctcagagaccctcgcactcctcccccaccttccgtcagctgggacccgctgagagccgtttttggtcacgcgcgcttagcggatagacctgcagtcccgcagagaggaagggcgcccgggctgtccgccgcgcggggaggacgcgagcacccaggtgacgtcccgcgggctgccgcgcgagggccgggctctggcgtgggcgcgccccagggcccgtgggctgcgcgcccgggaaggtctggcgcctggtccaccagtcgcccctccccggggctggctcgccggtagtgtctgattgctgggggatccccctccatccccagaaggtacaaagtttggctctgtggaggcacctacgagacggagcggggcgggtgggtggccggctggtttcacactcggcaaagaaaatggaaacacaggtgggaaaagaaaaagggagtggctttccgggaagcagcggccccgaccgagaccgctggagcgcgccgggctagttcatcccggctctccatggggactaaagaggctgaactgaagtggcgaaggcgaggaggcgatcactggcttgtttgctaagagttcgggaaggcttttttgaactagaaaagacaaattcagttcttcctccaggtagatccccgtgtcccctgtacgcgcctccggacggccttctgtgaagcccccattcccacttagttaacttagttaatattattcctctgtcacaggactcctgcacggtcaggtcatctgaactcctcagtggccctagggaagttagttagcggctgtcagagaactggggaaagtaggcaggtggtagcctaggccctttgcaactcagctggggcttctgacagcctttgaaaaattctttctaaaaatgtgcttcttgtattttttaatgaggctttgccccaaagcctaatatctttgtttgaggtggaatcttcttattaaaatggccctgaagctaccactaaagaatcaggcatgaacacaaaatcttctggatttgaggaatgcgcagttctaatttcatagaacttagctcagcgcaaatggggaggcaatctgttttcaatgaatgttttctgacttcttaataatgcatttttctacttaaataataacctgtttgttagtataacttagtgggtagagatgggggggtgg

SEQ ID NO: 10853 - DNA, 6000 bp, Homo sapiens
tctaatagatttaacagtgttctcataaaacagacagtgattcttcacatttctgggactaaatgaccctttgataatctgatgaataactgaatgttctccccagaaaaatctatatacgcatgttcactcaaaacttttatacaatttcaaaagattcacagactctcatgaagtccatccatagacctcctagggtaccctaagtaagataaaatgctgtatgttgcccattaaagaaaattaattacttaatgttaaaactacatattaagtaagaaatgctaggggggatttcaattacagaccagggtacagcaggagaagaaaatggagcaggatgaagtagagtgttgcagagatcaatgatagttcaatattaaatagtacagtgatggaataataagccagctgggcaagtacggggaaacagggaacctggtgagggaaaggatacaagaggaccaaaatctgacttggttattttatgaccttgttaaggaccaatctttctcttttttgcatatttgaaattcagctaaatgaaatagctttcttagctatgcatccagcggtccccgtggggatttaggcttttgcttgtaattttacctctagaagaggttttattgaactctttatttaaggtgcagtgatatccctctagcattcaatacttattaagcaatatgaattgatatttttattttcttgggtaaatgataatagcaacagactgtaaaagctgctgatcatatctagtgagaactatagcttggattcatttttctggggctcatctatctactatgagctcattggtgatttgttaagatgaacaaactgagcaatatatttgtaatgtaattaaatgcatacatatacaagtaaataataacattataataagtaacatgtaattgcagacatttaaagagtcttcaaactcatatatgtttgttaaactttctggacaactgaagttgtcctcataaaaaagcctgccatttgaactgtgagatacacaaagaagtgtaaaacatgtatctgaatctttaaaaagcttcaatctagttgaagaggtaatagtaagcacgtgaaaaattagaaaataatggaaggattaaataagctggtaagctagcagcacaagagatgccagttgaacgtgcctaatcgtgggattcacggctcagtgcttatggttgtttttaagggtaaaatctctcctgttgtgacttcttgataaggaattattgagaaagagaggcacaccacaagcagaaaaaaaaattcattcaaatttaatgttgatgaaataaaacggaattggataattgtgttttgaatacctgcttgttttagctaaatatatttttgttcatgctgccctgaaaaacaaaaggaaactgaagtagtttgacaatatggaatgatgggtcagaagtgattcttaagttctgtttatttcccccctaggctgtagatattggcatctacccttataacattggtattggcttctttccttccagaggacactctctgacctgttccatcaggctgactccatgtgcaacggcatagtcaggtgcctgcctagtgtggaccaaggatcctccatgagcccctgccacactctacctcccttgacccctcttgcagacaactgaaattccattgttttatatttattcctttaatcttgaagacatttctcttttaaatatcttattgcagatgcaaatagcactgaaaataattttgtagtgtcattgttaagatgaaactcaatgaagtatgaaagatgggtgtgcaattgaggagggtgagtgggaagctggaataacaggagggaaaaataaaatgttaaaataaaataagacatgtgtcaaacctcactctcttgagggctttcttgagtgcgaatgtggtattccctgcccctgctcccggagtatcatttccagcctgatcccatcttcactgcagcctttcatcactggggaagccatcccatcttcagtgctacaaactcaccattttagaataaagtatctttaatcattgattgtattttcctactatgcttgtctaaccaggataatggtatctttatgagaattacttggggagtgatactttcttacttccctctaagttattttaaccagatgcccctccacgtaaggctagttaaaaaaaaaaaatagaatcttgagatcaaaaggagcaataaactagtactgtcagtaattcatatctcaaaaatttttaagaggttttacccttcagaaatagttacttaagataaaaatcataatcttttggaatagaagtagttattgttgtcatttataaggattttttaaatagaaaaaaatgtagcaactgtacattctaaattatggctaaaagttctatccctaataatagaaactacaagagtgacaataatgtttccagtggaattctaaagtaattaacgtattctatatcttccttcaagtttaacttaacgacggatttgcattccaacatgacaacaaccagctagtagtactattataaaagtcatttctaccatgcatttaatgcttgagaaaaatctttgaacaatgatttagccagctgtagaaagcactacaaatttggctgggtgcgatggctcatgcctgtaatcccagcactctgggaggccgaggtgggtggatcacctgaggtcaggagtttgagaccagcctggtcaacatggtgaaaccctgtctctactaaaaatacaaaaaattatccgggagtgatggcacacacttgtaatcccagctacttgggaaggtgaggcaggaaaatagcttgaacctaggaggtggagttgcagtgaaatgagatcatgccattgcactccagcctgggcaacaagagtgaaactccatctcaaaaaaaaagaaaaaagaaaaaaaagaaagaaaccactacaaatttaggaaatgataactttcagtttagttttgggaagggaaagaagggaaaggaactaattattcagtgcgtaccagaatacagaagctttgcaaatcaaaccagcttatctcacaacatattcattagatagagtatcttaactcttttatagatgagaaaattatttttcagagaagttaagtaactcattcagtgtcacatagctaagtagtgggcagagcaacccaggtctatccgattccaaagtttgggccctttctgccacatgatacttcattttacagcacaaaagtctttttagatgttttgttttcctaccttcagaggctcctttaaagacatagttcttcaaacttagattatatttattaaaatttaaaaagtgccttatgtttacatttcatcagattacaaagaccctaaatattgttaaaattgcaacctaaaagacattattggcataccttttgtcattgatttttcaaataaatgtcatctgaacaatgtatcttcagaatcactctgagttgcttaatacttactataattttgctgggaattatctggatttcccattttttagtttagttttcccaaaatcatttttgaacttgtaattacataagacctttgaggttatctgagcaaaataactaaattcatgaaaatataaatccatccgataccatacacacacatatataccaataaataataagattaagatgagtaaaatgtaattgctaaacatctcaagagtcttcagactcatgtatgtttgttaaactttctgggcaactgaagttaaccggttttcattctaatagaaaattctgccattagtaaaaatggtaagacttaataaaacatttgaagctgcatgatgagctgtgacttctccactcctcagttgtcataaccccataggactatggaatctaatgctaatttggataatgaaaaaatgccacagtggccattgtactcttttattttttgaaatttctttaaatgtatctgccactgcactccagcctgggcaacagaatgagactctatctcaaaaaaaaaaaaaaatgtatctgctacccatcaaacaaactgtatgtattggatttgaaactgcttgcccatgagatattcatttttaataaaacatttttaaaagactgattttattaaatacattttaaaactttaaactttttcttaatggtgactacattattgaggtttctctatcctctgttaaattccaaaagacacccaacaaattatgttagttcagagaatcctaagtacttaagaatatgtagcctgaaatcagtcccaaatttattaaaatatagcacccacaatagtggaaatgtcaatgatctatgaacagacctttcttgttcaaagcaaaatactgtatcggacaagtttcatcttgtttttagttttacccatcttcacaaaagctacatatttctaacacagggaaagtggaagtgacaaatacctaaatttaactgaatttcattttttaaacagaacttttcaggaaaaataaaagcaggatggttttttctaaatacctgataaactatattgaattatttgtgccttgaatgtgatacctttttaaaatgcagaactgtctatttctaaagtggaaaaacttttccaaactgcttcttcttgaaagttctacattctgcttcaaaagaaatgccaacgtgactcagggcccttgacatatcactagagtaaaaaagtaccattacagtgaaacttgtgtttataattctatcagcttttacatcacatgactgctatcacattatctctaacactggagtgttaaaaagcctgtgttcttattggtgaaataactgttttgactatcatcaagtatctgaatactgagtgtttctggcctttgacactgtcctataccttataaggtgtttacaggtgaaataggaatcttgctggcactccgtgcacttaatgattcctaagaactcacatgaactgagcaaatgagatagaaacatggcattcttaattatactaattacctgctttgtgattattcttgctacttcacagccttgccagacccctgatgactttgtggctgccacttctccgggacatatcataattggaggtttgtttgctattcatgaaaaaatgttgtcctcagaagactctcccagacgaccacaaatccaggagtgtgttgggtgagtaagtctcaaaaaacacgtttagatttcaagattgtcatgagactaggacatataaactgttaacttgtattaatatctaaatcatttaaaaaaataaactcatatgtatttttaagttgcatatggttaatcttgcaatccttctttaaaagagagctataacagccctctatgtataatgaaacaacctccaagtgcagaggatatgcatgcttttcattaatatattaatttagattttgcctttaaaaaacaatgcctgaagtcacttgaaaagacattgtggcctatttttcactacaagcatacataacccacatgtatttctatcacacacatgtattttgttttaaacacagatctattatttaatgctttgtttaaaatagactatagttgaattttttcttactaacattttttttcaacactgcattcatttcattccagaaatagtctaactctttcctgataaattaagaccctcctcaactcaaagtgctccttcctgctggatgaacactttgtgtcgtgagagcttacctatgagaaagacatttcactggcacagtataatgtggaaaagtaaagctgggtggaaggtgttgcaaatggattttccttaaggagaacaggatattctaattctcatttcagttttgggacaagctaattttgtaaacttaggtagatcacttaaactctgagttccaatttcactgttgtgtatattttctcatctgtaaaacaaaggcctggataacctctaaggacacag

SEQ ID NO: 10854 - DNA, 6000 bp, Homo sapiens
catcctctaaaacagaaagcaaggccaccaggaccttaggcatagtcatgggagtgtttgtgttgtgctggctgcccttctttgtcttgacgatcacagatcctttcattaattttacaacccttgaagatctgtacaatgtcttcctctggctaggctatttcaactctgctttcaatcccattttatatggcatgctttatccttggtttcgcaaggcattgaggatgattgtcacaggcatgatcttccaccctgactcttccaccctaagcctgttttctgcccatgcttaggctgtgttcatcattcaataggactcttttctggtggggaatcttggatgccctttctccacacaagtaggggcatgaattgaccagataaggagatccttccagttggcgtagtgaacatctaggtaggagttatagatgagccttccaggtatactaaagctaccaaagcggtccatttctgggctttggggaaagacaactccaataaaaagaatctctcccaagtcttactgactcctgagattccaaattagggatctagaattttagtcttttggcttaaatcatatagagattttcttactttaacttgaaaacatcagatgcaaaagcaaagttggtttccacaatcattgacagccatgtatatctgagtttatctaaatctttcttgagattgttgttgcttgttagggaagtgggagagagcctgggcatacaggaagtctgagttatggagcatgctagtgatgcggaaagggagaaagacacagacagttgtagttacttccaattgtaatgattttggctgaaaccccttttcagaaagaactgatgtgagatttgcaatatttgataaaattggactgtcttactaaatgagaaaaatgaataaagagtttgggaaaatatgctttctttctcccaatatacactttagatccatgtatgtatgcagcctgtgtgtacacatagtggggatgcgtccatgtctttcatgtgtgtacatatattcattatcctcccagactgaactttacaagggtgtccacaaacattagctcaatagtttttcaaaacagctccaaatgctcttcctaggctaggccaaggagagtgaagcagccattttcattcctaaaccaaatctcctcttcccaggactcatctaagctgagcagagtaaccattatctcagggggaatggtaatttccatgatacttgctgtctgtattaaaagtcactcggttcaacgaacatttattgagcacctactatgtgccaagtgttgctctgattgtggttcagagataaataaaactcaaaccctggcctcaagggaattttgacttcataggagggaccatagccactcagttacactacagggtaatatgtgttgtgacagagccaggcacaagaggccatgagagcatggcagaggaaaatttagcctgacatggggttgtggagagactgcctgcatttttgaccaaagactgtagcatcaggttttgtaagggaaccagagcctctattagagtcaagggaaagctggggaagtggagttagagcatcagagaaggggtcactaagccaacttcctgaagatcggcatgaggaagcaagtttgagcaagtactttcacccactgaagtgaaattgcaaagacagggcatatggcaaagtctgtggtaagctgttgcccctgggtagctactgttctgtggtccttacccaggaattcagtggtagatctgggaccactgttgcttagcaatgtcagcagagaggaagaagagccgggtgcagagtagagctaggccaagtgtaacttataaataagaacttataaataagaagttaactggcttatggttctgcaggctgtacaggaagaatggctggggaggcctcagggaatttacaattatggcagaaggcaaagggaaagcaggcacatcttacatggctgaagcaggaggaagaggcagaagggaggtgctacacacttgtaaacaactagatctcatgataactcattcactatcaaaagaacagcaccaaaggggaaatctacccccatgatccaagcacctcccaccaggccccacctccaacactgaggattacaatttgacatgagatttacacggggacacagacccaaatcatatcagacagattttgaggaatcaagaattattctgtcctatgtgctctcaaaggcaggcaaagaccgtccatagacaacaggctatagaaagagaatctctgaacctgagtgaagtctgccagtttgagcttgtactaagaacacttccatctggcttcataatttcaggttatcataattagcacagcctcattataatcgattttgttaaagttggcggtaatttgaaaacaaatttggtttctagtaagtaaagtgcagaggaggctacacatgatgcagcggggagatttaaaagaaataaaaatgttcttttattcaagacctttagcagcttgctgcaacattaatgaatccctaaggtaagcaggaaaccttagtagatccagaatccaattacttttgcctgtgattgttatgtaatggaatgtatttctaaaagtcagtggaagaagggataagagccctaacttgggaaggttaacagttatctgcactagatatccactcgaactcttgtctgcccaactcaactttctacatgccagagactgcactttatgaattttaactcattaatattcacaagattgtgacacagatcatgtattatattcaattaatagatgagaaaactggacacagtggtgttaagtaatctgagacatagagatcatacaattgtgttacatattacattttagtaggtctgatgtaatctatcccagaacagaaaacctttccctgtttcttcttcagccttattccagctacaggacatttgtttgtatttttcacaagttcttggtcaaattaaatataaagccataggactccttggccaattatatgtggattatgacttttaagctaaaggggtttcaaggtacctagtaatgcaatatccttccttgtgtctgattaagttctggagccagatatgtatttccacacatatgaagctggcataaggcaagattccagcggtagccaggctatagggagctttgccttgggaaacactgggtttagccatggatttgtagagaaaggagaggtgcataccaacctccttccttctttttgacctgccccacctcctcttccaggcccctctggcagatgtaatttggtgtcacctctagaattctgtcatttttacaactttagtttgactgatactgtgaaatggtttctctgtaaccataaagaggcataccagcttctaagatatcaagaggcagagagcagaatacgattcaacatgttatttaccttgataatatccctgtgaaatcaagttacacaggtataattgtacctactcttaccaatggggaagcagagagagaggttaggtatggcataagaaaggatgaaacaggaatttaactattcttcctccaggtgaactgcttcatctaccatgctttctttcaccatcacaaaatatagtgctcaaaaaacacataatgatgaatcctgtgtggaagtcacaaaccaccccttcatgaaccaaaaaacccatgatcaattattctcaactatttctcatgttgagagaaatatacacaaataatactaaagcagaagaaaaataagaaactcactaaaaatgaaattagaaaatatatagcagccattagcaggcaagaataccttcaaaacatcccagaactgaaaaattaaaaaagaatatatacatccaccgtctttaaattttatctctaattaattgtcagggtaagtgattctgtattgaggaggaaccttaaacaactgagacttgcaaatagtgcaaactaggtcccatggtgcctcttcacagcttatttgtatcatagcacatggaggagtagtttctattgagagtataaaatcgttaactaattgcacacctgtcattgtggccaacagaagagtactctgacattccctgtgtccacctgctccaagaaacattttttcccaggaagggattctgattcctacctgtgtaagtaacttagaaactctgaattcaatatattaggacttggttaataattcacagacttacattaagatgttaaatagataaaatcattttgcctatcaaatagttataccaagatgtgtaaacactttgtgttatcatcataaaatgtgcagcatttaaagctaaaatagagcaattttctactcttttaattattaatatttgcatgctgaattcttctcttgggaagagttggcatgtagctaaaaatcttaatctgctaactttattgtcaatgtatgtaattcttaaagagagaagctagaagttacactttttccaaggaataatttattaacaagaattaattggtcacttggttcagatctttgctttaaatttcactttacatttgacaaaaaataccttatcaaaacgtaagagacattctctattatttaatactacctatggatataatcaagctttctttgaggaaacattcagcttacatccttcttttctttctttaagaatactacctacactagttttaaagtgcctagtcatataaactagagctagcagaagtaactctcatgaaaccttgaatactatgctgcatttgattttcagggcacatttgattcagtacccaggggcactgtactatgttccaaactgtactttagtttcttcctcttcgtttcactctgtgattatttagcagacatattttttttttttttttttttttttttttttttttgccctccagtggagaaggtggccagttctcagacagaggaagagtagaaatcataaatgagagctgtcttcatccaaggtgctgaagagcaccctgcggcattctgctaccaggtgaatgggtcttgccccaggacagtacatactctgggcatccagttggtcatctacctggcctgtgcagcaggcatgctgattatcgtgctagggaatgtatttgtggcatttgctgtgtcctacttcaaagcgcttcacacgcccaccaacttcctgctgctctccctggccctggctgacatgtttctgggtctgctggtgctgcccctcagcaccattcgctcagtggagagctgctggttcttcggggacttcctctgccgcctgcacacctacctggacaccctcttctgcctcacctccatcttccatctctgtttcatttccattgaccgccactgtgccatctgtgaccccctgctctatccctccaagttcacagtgagggtggctctcaggtacatcctggcaggatggggggtgcccgcagcatacacttcgttattcctctacacagatgtggtagagacaaggctcagccagtggctggaagagatgccttgtgtgggcagttgccagctgctgctcaataaattttggggctggttaaacttccctttgttctttgtcccctgcctcattatgatcagcttgtatgtgaagatctttgtggttgctaccagacaggctcagcagattaccacattgagcaaaagcctggctggggctgccaagcatgagagaaaagctgccaagaccctgggcattgctgtgggcatatacctcttgtgctggctgcccttcaccatagacacgatggtcgacagcctccttcactttatcacacccccactggtctttgacatctttatctggtttgcttacttcaactcagcctgcaaccccatcatctatgtcttttcctaccagtggtttcggaaggcactgaaactcacactgagccagaaggtcttctcaccgcagacacgcactgttgatt

SEQ ID NO: 10855 - DNA, 6000 bp, Homo sapiens
acaacaaagaaggaaggaaaaaaggaaggaaggagggagggaaagaaagtagctttcttttgatagtgtgctatatatcaggcattacgctaagcctattcatattatatattataccatccatttaatatgttaagattcattaactttaaatatttgatagaaattgaacaatcaaaagaaatcaacagcttgggtaagggcaaaataattcaaggaaatgagaaacaatgattagctggcagaaagacatagtgaaatccattaagtcttaaaagtggttactaggcagggtgtggtggctcacgcctgtaattccagaactttgggaggccaaggtgggcgaatgatgaggtcaggaaatggagaccatcctggctaacacagtgaaaccgtgtctctactaaaaatacaaaaattagccaggtgtggtggcacgtgcctgtagtcccagctactcaggaagctgaggcaggagaatcacttgaacctgggaaatggaggttgcagtgagccgagattgcaccattgcactctagcctgggctacagagggagactccgcctcaaaaaaaaaaaaaaaaaaaaaaaaagtggttactaaagcagaggaatatttatttaccaatgaagcattaatcatcaaatataaagactaggcaaaaagaaaagacatcacaaagaaaaatcagaacattctgcttcctcctccctaccccttaaaaaaagaaaaaataataataataaataattagaaaaaatagaaaattctttgtcattgtggtcatggttctgtagtttgatcactttctcagggaatatagaaaacacttttattttaacaatttagtagaataaaatttatttattcacaagcagaatgggcaaacaattcattatgttacaaatctttatttttttgtgtctgagcttcttttagaaacgtaacagtaatggcgaaaagatctgacattccatttaactctatggcaatccatgtatctatagatgcttatgttaacaagtttaaaaatagaaaaaatgacccttgaaagctatagcctttaaaatactgcttttacatttagctttccttagacaacaaatatgaaagatatgaaagatacggtttttgaaaggttcaaactgatgatagatgtcacatgaaagaactatgtcaaataaattatgggggatgtgatatttaaatgggattaaaattattatttgatgaattcatcaaataatcatctgatatacccctccatactttgtggcatgtgtatgaggaattcaagtgtgaatgtagacatcatattatgtgtttcaagaacgttagtacttagaactaattatctaattaaagtttctgacagttaaagggaaaattagtcaagccctgtagcctatgattttagaattagaaagattctgcatgattttaacaagagtgggtgcaagatgattaataatatcaaagtgattaagccaggaacacaaagaagtttgcaggcaattaaatcttaaaatatactgttgttggaacagaaaaccaaacaccacatgttctcactcataagtgggagcttaacaagagtacacgtggacacagggaggggaacatcacacaccagggcttgtcagggggtggggggcaaggagagggagagcattaggaagaaatacctaacgcatgcgggtcttaaaacctagaaggtgggttgacagctgcagcaaaccaccatggcacatgtatacctatgtaataaacctgcacgttctgtacatgtatcccagaacttaaagtaaaagaaaaagaaaaaaaagtactgttgttgttaaattgccttaagcacaagaatgttgtatgtgttttaaaaggatgttcgttatttgttgttgtttttttttttttagctttactttctaagaagtaaagtgatttaaaaataaaccaacaaaatttgctttggatttcctacgctttttaatgagcatactgaagatggtcagaaatccttttttctttttgataatactgcattttctctcagtattttcttctctggtgatgcctaactggtcagtaggtggctaacaagaaatgacaagtagctaaaaaccttagtaccaagagggaggaaaatctctcgcttctcttcttttttctttctgtctttttttttgtgtgtgacaatgttaggaatagcaaaatgctatatgcacatattagaaacccctactttttaatgtgtgttttttaacttttatttttatgtttttttaacttttattttaggttcagggggtacatgtgaaggtttgttacatacgcaaactcgtgtcatggggtttgttgtacagattatttcatcacccctgtattgagcccagtacccaatagttatcttttctgctcttctccctcctcccgtcctcctccccgctctggccccaagtagaccccagtgtctgtcgtttccttctttgtgttcataagttctcatcgtttagcttccacttataagtgagagcatgcagtatttggttagaaacccccatttcagctgttaaaaatgaatatagtttaagaactggttgtacacattttagacagatctggataaaactgttctgatgaaactctttcatgaataagtcagctgtttctgtaaacagcatttagggcgtcggcagagacctcaaatgcagtttggtagtgtttctattttgtggtatgcaatcacccaggtggcagatataaagatgtttagttctattgctcaaatacgtcccatcatacaccaggccattagttctctgcaagtggggacgaggcccctgaggaggaagaataacgaggagaaaactgccttggagtcgccacttggcatcagttggaggaagcttttaatttcaaatctgtactcactctcttgtaactaacttaattactttaatttaaaaaaatcattacccaaatttaagaacaaaatgggaaatctcttttgactaatgctggctaagaacactggcttgaggaacaacaatgaaactagaagcactttcttctctccctctatactcccctccaccttgtattctctctgcggtgttttaggggtccctgagaattccttttagaaggtctcggaacacatacagccttgtgtcttttcttcatcataccttctgtgtagaacaggctttttctcttctgttcaaatcctactcacccattgagacccagatcaaaagtcatatccttgctggaacattcctgtgcagtccagcctgaaaagatcttgtccatttttgatcttggattgtacattttgcctggatctctttttggtcaggtgatcgccgctgttgctttcatctgaggtgcagaatcatgtaggttttaagtgttgatgtgctttgtctcttcagctgcattgtagaatctctgctgcagggttgaccttcatgctttcttcttcctttccttgtatctttcatattgtggacattcaagaaaaatgtcttactctctttgtgatacactcttatatcacagaggctggtaatttatttgtttatctcttggtaactggtaaggtctgatatgtgtgaggtcactgaaggccaaaggcatttcttcaatattaagagttatgctttgcatataggcagctcttttttacctaatgtactttttaaaaagaaaatcattctaactcatgaacgtgttacatttcaaatatatatggaaagaataacatgcagattttaatatgtaaaatgagcattctggcccaacacaaggagggcatgggcttaattttcttgtagtagagatggcttgctttctaaaagttctctagccctctgctcatagccttgtgtgtggcctacgcatggcaacttgtcaagctgtcattgcatagggctctgagttacacttgctcttcacaagtaactgagggtggtccagctttggtctgtgcccacctctgacttagctgctttggctgatgccatgcttgttaagaattcatgatttgccttatagattgactctaccagataattagaggtcattagatgattcttcccccttaaaacaacattcgtatgaataaaacaaaacacagcacagtgaaaataatagaacacaagaatgaaattgttttcaaataataacctcctgatcccacaggtaatagatcacaatcaaatcaaatctgattatatatttctgactccttggaggaagaagtacatgtattgtctaatagatatctattcttcctacacacgtaagatacagctcaataatttgttttttcttcttttaaatttcaaagcctggcataaagtaagagcttcctaaatgttggtagtatagaggaaagtatggagtaaataatgattttttttttttctcgagatggagtctctctctgtctcccaagttggagttcagtggcacaatctcggctcactgcaacctccacctcctgggttccagcgattctgctgcctcagcctcccgagtagctgggattacaggcacatgccaccatgcctggctactttttgtatttttagtagagatggggtttcaccatgttggccaggctagtctcaaactcctgaccttcagtgctccccctgcctcgacctcctaaagtgctgggattacaggcgtgagccaccgcacctggccaataatgatcttttaagccaattaggttacaattctacaaaattacaaataaagattaaaataagtaaatgggaaagatcatgagtaatattacagcataaattatcttccttgattcttctctgcctttcttgagtttttctatgaaagcatatataaaacatagaatatttatattctgacaaaattctatctgttcttgttttttgaaggaaaaattcaattgctctgaatatggaaatagatcttgcccagaaaatgaaagatctctgggtgtccgagtggctatgtattcatttatggcaggatccatattcatcacaatatttggcaatcttgccatgataatttccatttcctacttcaagcagcttcacacaccaaccaacttcctcatcctctccatggccatcactgatttcctcctgggattcaccatcatgccatatagtatgatcagatcggtggagaactgctggtattttgggcttacattttgcaagatttattatagttttgacctgatgcttagcataacatccatttttcatctttgctcagtggccattgatagattttatgctatatgttacccattactttattccaccaaaataactattccagtcattaaaagattgctacttctatgttggtcggtccctggagcatttgccttcggggtggtcttctcagaggcctatgcagatggaatagagggctatgacatcttggttgcttgttccagttcctgcccagtgatgttcaacaagctatgggggaccaccttgtttatggcaggtttcttcactcctgggtctatgatggtggggatttatggcaaaatttttgcagtatccagaaaacatgctcatgccatcaataacttgcgagaaaatcaaaataatcaagtgaagaaagacaaaaaagctgccaaaactttaggaatagtgataggagttttcttattatgttggtttccttgtttcttcacaattttattggatccctttttgaacttctctactcctgtagttttgtttgatgccttgacatggtttggctattttaactccacatgtaatccgttaatatatggtttcttctatccctggtttcgcagagcactgaagtacattttgctaggtaaaattttcagctcatgtttccataatactattttgtgtatgcaaaaagaaagtgagtaggctttttctgcatgaataaattgaagcaaaaaactagaatttagaagaatgaagttgtttaagatgtgtgtttttgtgc

SEQ ID NO: 10856 - DNA, 6000 bp, Homo sapiens
cattacagtgaattttaagagataggattagaggaattagagacagggagtataaatgactcaaagggttcctttctgataaaggggtagtcgataaatgaaagaagatgtgagcttcaataattcttttaaggtggaaagtattactgcatatttgagagtgaaggtatttggaagagaaccactgaagatgcaggggagagagagttggagggtatatcttggaataggcataaagagatgggtatggggcacatctgaggaaaggcctgtgatgggagagagtccattcatttacagtaatttgcagcaataagggagtgggctgaatatgtaaacaggtataggctggagggatgtggacattctcttctgattgcatcacttttttcagtgaaacagaatgcaaagtcattaggtgagagtaaggatgtgaataagtatttgagattcaagaaggcatgaaatagtcatctcagagaggagaggaatgaatgtaacagggaaatggagtaggattcctgagcaattgtaatggtccatttttgttacgaatttaaaagaaggctattgtgtgtttttctatgccacattcagtgtgccagagtggagtgagaggaaaactgcatttaaccagtgttcaaatttagccaggaaagtatgttaatgtgagagagcttaagataatgccaggaaatactggaatctaaactgagtaaagaggtagacatgagtaaatgaaggacagtggaaaggtgtgtaaaataaatgaattgagggcttcgagttgaaaaattgttggaaaggaagcactagtgaaaaattgttggaaaggaagcacatgggctgggaggacaggatgtgaagcttgaaaccaatcatttggatgactcttgtcattgataatgacatccggggatatgaccatggaaggtgagatgagatggaggcgagtctatgattgttaaaagatagaggtcgatgaactaagagtccattattggaaggatcatttaggtggacaataaaattgctaagaactttagcaggagtagcgttacggacagtgacagtaagccaggaactcatatcttcaagaagtacagagagatgacttgggagtctgtacatgcctgcaataggaggaagttggtatggtttgtgtccccactcaaatctcatcttgaattgtagttctcataatccccacgtgtcatggaagggacctggtgggaggtaattgaatgatgggggaagctacctccatgctgttctcatgatagtgagtgagttctcatgagatctgatggttttctaaggggcttttaccccacttcactctgcacttctccttgctgccaccatgtgaagaggaatgtgtttacttccccttctaccatgactgtaagtttcctgaggccttcccagccctgcggaactgtgagtcaattaaacctctttcctttataaattacccagtctcaggcagttctttgtaggagtgtgagaatggactaatacagaggtatagcatgaagacatgaacttcaaagcttgcaaggggttagaggttagggtggaaagatcttcaatggcaatgagtgtaagtggacacttactctttctccagatcatataatatgaagaggtacaaggaatgtaggaaagaaaacagccgccattgacaaggttgcaggggagaaggtatcctgaggagagagagttttagttagaacaaagagtgggaagcagatttaaaaaaagaattttaggaaatggaataaagaccatgagtccccaagggcactcttggaagggttttgtgagtaataccacaatgggaaattggtttggattaggaaatgagtagagtagtatagagatgaaattctgaacaattaggaatgggtggttaatggaatccgggacaaagcttatgatagggttagtgttcatgaccttctgttggaaagttgaggcactctgcccgggatttcctgccttgctagacagatctattttaaactataagttctatcaacatatttttaattcatatgtcattttcaaacattagatgattagatcatttacacagaactgtttacttagttaggtaatcaaacagcaatttgttaacttcccatattgctattgtatattcaacctggaaactttgtatatacagataataattatctctagcttgtaaattcttaaagctgaaagaaaagaaacaaaaacactattttgccaggtccttagataagctttcaactcacaatgttgtcatagagcacttaaacaaataaatctattcaaaaacaatttataacacttcaaaaagcactcatacaatgatgtttaatattctttaagttgggcagacaaattattctacagatgtggcattcatactatcaacaatttctaagatactgtgcctaaggcttgatgtctcttaaaccagtatgtgcaaatatgagcttgcggtaacctctgagtcattttggtcagagccacaaaaaacaaggcctatgaatttgccagatggcgttttcatcttctgtgaatttcctcttctaaaagtgaaatttgtattttgctttatttccaccttcccttacttctttttgaaccctagttcctactgagagtccctactcaatatgacatcaggaagaaatgtttttaagagtcaggaataaataaacacttctgaacagtgattttgagtgttgtgtggttcctttagtaagtcaacaaataagtaaaagaaagaaggaaaagagagggaaatagtggaggaaaagtctaactagaaaatatataacttaactgattgagtttagttaaatgcaaacttaaatttcatagtaagaaatccatcattgttttaatgaaatcataatcgtaattcaaatattgcttagtttaaataacagtttttgtttgctgtttagcttctatcatggaatgagcctgtgtgtctttttaaataaatcttacagatttatttggtataaatatgtttccttctgggaatagaagaccaaaggagattaggggaaaaatgttccaaatttattaaaatatacattttcatacctagatattgcatttctctcattctaaaccatcagcccagagggaagggaaaaagataaaaaggaaggcagactcctggaattctaggaattgttgctgttttctagcattttcctaccaaagtgatagactataggacttcattgccagaaatttgtactcttccccaagctctttctccttccttccttctttccttccttcctttctttcttctttctttctttctttctttctttctttctttctttctttctttctttctttctttcctttttctttctttcttttttctttctctttctttctttcctttctccttccttccttccttcctttcttttttctttcttccttccttccctcctcctctcctttcctccctccctcccttcctttcttccttcttcctttctttctctctcttttctttcttcctttctctctctctcccccctcttctctttatatatatgtacatgtctgtgtatgtgttatatatgtgtgtgtgtgtgtgtgtgtgtgtgtgtgtgcatgcgtatgtgtgtgtgtaagtccaagttctagaatttagctcagaattacagggtcatatagaaacaaaagggacagtttcaaactgagtcccctggaactttgaggttcttcagtgaagtacaagaagaggaggcctagtagaagatgcctactcataataattttttttacctgttttataaagtgagatttattggatttcagaacttaaaaactaaaaaggttgtgtgccttgcccacggcccacatggaaactcagcttccctgggctctcacctcagtgctctttgcaccatgccacttcacttcttaccatagactttagtctgtatatcaaaaatccttaataagtgggaccacaatatcattcttcactagtaggtgccattatttaagacatcataaattcttatatgaaaatttaaagcttaatttttaaaaattgacctcaagttggttctttctgcaatagagagaaagactggactgatatcaaagaaactgaactagtaattgagaccacagctcatattcaagctttaatgatttgtgaattaaacttcaatttcttgccagtaaaatgaggttaatgaagcatgtcatgtcttccttacaaaaaatgatgttggtcttataaatgtcaaataaaactgtaactgaaataatgcatggaatatatgtagaagtactttgcaagctgcaaataaatatatgtaagcttcttcttattacaattaattataaaataagaaatatataatttacgtatgaccaagtgcagaagtgggcatagtgcgtattaattctgcacaagaggcacatttaaaagacttcttgtctttttcataaacatattttaattccaaattttctggcaatttctttctaccctttacaatgtaagtctcccccactagactggcttcctatggacacagattgtttccatagattaagatgtgtgatcataatcatcatttgatcttctctgacctacaaatgtggcagtttcatatagttcaacctaataatttagcttcatatttctagaagaatgtccagctccaggtaaaagttttttaaaaattgctgtactgaactattgaatggaacttggaaataaagtcccttccaaaataactattcttcaacagagagtaataggtaaatgttttagaagtgagaggactcaaattgccaatgatttactcttttatttttcctcctaggtttctgggataagtatgtgcaaataaaaaataaacatgagaaggaactgtaacctgattatggatttgggaaaaagataaatcaacacacaaagggaaaagtaaactgattgacagccctcaggaatgatgcccttttgccacaatataattaatatttcctgtgtgaaaaacaactggtcaaatgatgtccgtgcttccctgtacagtttaatggtgctcataattctgaccacactcgttggcaatctgatagttattgtttctatatcacacttcaaacaacttcataccccaacaaattggctcattcattccatggccactgtggactttcttctggggtgtctggtcatgccttacagtatggtgagatctgctgagcactgttggtattttggagaagtcttctgtaaaattcacacaagcaccgacattatgctgagctcagcctccattttccatttgtctttcatctccattgaccgctactatgctgtgtgtgatccactgagatataaagccaagatgaatatcttggttatttgtgtgatgatcttcattagttggagtgtccctgctgtttttgcatttggaatgatctttctggagctaaacttcaaaggcgctgaagagatatattacaaacatgttcactgcagaggaggttgctctgtcttctttagcaaaatatctggggtactgacctttatgacttctttttatatacctggatctattatgttatgtgtctattacagaatatatcttatcgctaaagaacaggcaagattaattagtgatgccaatcagaagctccaaattggattggaaatgaaaaatggaatttcacaaagcaaagaaaggaaagctgtgaagacattggggattgtgatgggagttttcctaatatgctggtgccctttctttatctgtacagtcatggacccttttcttcactacattattccacctactttgaatgatgtattgatttggtttggctacttgaactctacatttaatccaatggtttatgcatttttctatccttggtttagaaaagcactgaagatgatgctgtttggtaaaattttccaaaaagattcatccaggtgtaaattat

SEQ ID NO: 10857 - DNA, 6000 bp, Homo sapiens
ttatcatgttcttctgggagaaagtgcaaggagcaccacattccacccgaacaagggtcagaagtgcctcatcatgggaacatctgctcaatatcctgccgggcgcacgccatagtgcccatacccctcctgcccatacatttacattgccccagcctgtaagcccgcagtgggcactggcattgggctggtcccccacttcttttggttttatgctggacgtaaagcctgcgtttgctgtcaagccaccctctttctatgtatgtgtctttctttaaccctcccctttccttcaaaatctaacactggtcacacacagtgggcagtcccctctgcccaactggaccttccctgcccagagcttcccccatccctcagccccttagctgacttctcttcactctcctctctccatgacacctctctcatgacacccacccccactgcagatgcaccttctagctaattgtatcatattgttctctacaagtctgttcccacattcatcttccccactagaacataagccccttaaagtcagagtgtgctattgtcagaggcatttgaaccagagcaactccatcttgaataggggctggggaaaataaggctgagacctactggactgcattcccagatggttaggcattcttagtcacaggatgggataggacgtcagcacaaggtacaggccgcaaagaccttgctgataaacggatgtggtaaagaagctggccgaaacctaccaaaccaagatggtaacaaaagtgagctctgctcatcctcactattcattatgcgctcattataatgcattagcatgctaaaaagacactcccaccagcactgtgagtttacaaatgccatggcaacatcaggaagttaccccatatggtctaaaaaggggaggaaccctcagtttcaggaattatccacccctttttcaggaaaatcatgaataatccaccccttgtttagcatacaatcaagaaataatcataaaaatagccaactagcaggccttgggcctgctctgcctatggagtagccattctttactttcttaataaacttgctttcactttactctatgaattcatcatgaatactttcctgcacaaggtccaagaaccctttcttggggtccggatcaggaccactttctagtaacactataagcatttgtatcctcagtataaaatgagtaacactcattgtgttctaaatttgttgaataaataagaaaagagctaaacttttcccaaaaggcaaagttaaagaggtccgatcttggccctcagtagccaggaggtcacctcccaggctttaggatatcatgcccaatggggatgtctttgtttgcctggggaccctcagccagacagacagtaataatgtggtttagggtgagggctttggtcctgcagctgtagctcagcccccagagcagctagagactaaacacagcctcacagatggccagctatgcctgggtgaggtactccaataaagactctggatgaggagacccaggtgagcttcccggtgtggcagtggtctgggcactgtcatccatcgatactgagaaagtaacactgtcctgactcacagcaaaaggacaatgggagccccacgcttacaattttcctggtctctgtcccatgcacctcttcccttggctgattttaacctgtgtcttttcactgtaaaaaatgatatagctatgaaagtaacagcttcctgtgagttctgtaagtccttctagagaattatctaacctgagagtggtcttggggacctccaaactttaagttaatgtcaggcagaaggtggtcttgtgggaattgtactgtctccctagacttcacggcgggctaactttgcaataagtagcaggagaatctaagtctgagtattcattcagtctttatgaataaccatctttctgattattgtaagatataacagaaaaattagaaaggaaaaatgcagagaattaaatttctgtatctgagtctggtggcacacacctgtagtcttaagtactcagaaggatcccttgagcctaggagttggagattacagtgagctatgatactgccactgcactccagtctgggcaacagaacaagaccttgtctctaaaaaaacaaacaaacaaaaaacctttaaatgtatgtttaaatgtatgtgtgggtttaagcaataattcagttttcatttaaagttaggcacacgtgtaaataaaatacacagcataaaaattgaaatgaacacagagaagtttcctaaacaagtagagtattgaagaaatagtagtaatgactgaaaatagtctctaggggtgataaggtttaataaatcaagatccctaagggagaagctcaaatactataactttaaaagagatggtctgaaaaacaattcaatgtctttcagaagtgaaaaagatgaatcaaagtactttaaaaaggggcagaagtttttaaaaaggaaaatacgtaattattaatgttcacatgccagttgagctaaaatatttataatttaggaagttattggtggtataaactgaaatctgaaattaaggagtagcttttaaggtctgttaaagtttttagtgtgttgcaagaaagatatttcaatccatttctttcctgcatttatgaaactttaatcactaaagagttgaatttgctgccagcttttctgagggtcattgtgtgcctgacaacattcgtccaaatgagactaactacaccacccacaggtcagcgttgtgctctatcctcttgttccccaggaacaatgtcgtaatgaacatgcaaccagagatcctcattcatagaaggtgtcactgtgcagagactagttgggacatttccacaattccagatgcttggaggactctccaaattcacctccttagaaaacaaaaaggcatgcggacttgtatgacatagaaatgggatgatatgtgggctggtagtcccatttttaaaaataatggaataatgaaagcaagaagaatgcaagtcaaattaccttgatatcatacaaatcacagccctatgggacttgaaaaagagtgaagcctgaccattagccataggactatagggaagctgtgaatccagttctggttgaaatttgggctgggagggtcctggtcccaccacttacctgcctgtgaccttgagcaaattacctaatcttaccatgcctccatttctttactcataaaatagagcttaacattgtacctacttcatctcactattgtacggttcattgaaataacttaggccagcactaacaatgactgacacgcaatgaacatgcagtatactttagtaataataattattaaagccttaaacttggatactataattgaaggcatcaaaacaccatagaacggatatttagtacaaaagtgttttatcgcgttaagagataacgaatagttttttaaagcctatgcatcagagaggcttaataaatactctagtaaaagcatcaagctctcacaacacccagacatggcgctaagtgctttacctgtaatagtaccttgactactcaaaagaactcttcaagaaggtgttaccatcttcacctctcaagtgaagagcctggagttcagagaagttaatttgctttcccaaaaccacactgctaataaatggagaaacaaaaaattataactaaagtttacttaactccaaaattcaaaccaggctgaatggacccaagataaattagagtcaacagtgggagaggaccaacttaaattagagtcaatatgggtaagacctatgatgaagtagggtcaccagttggtaaggatcaagatgaagtaggatcaagaatggttaggactgagataaattaggatcatcagtgggtaagaaccaagatgcagtaaggtcaaaagtgggaaaagatcaagatgaagtagggtcaacgttgagtgaagaccaggatgaattagggtcaatagtgggtaaggaccaaggtaaattagggtcaacattgggtgagaaccaagtataatagggtcattgatgggtaaggactgagatgtattagggtcatcagagggtaatgatgactgcacacgtttattcatcaaagaaatgcttgttgataatgctgtgtgccaggcattgtctgtcactagcgacacatggatatatggagtatgtccctggctgatgaacctaactttctagtggattctacgcatttttacaagccattgatttttccatgcttccagggcccactccaggccctgctggtccagatcccaatccaagtggtgtactaggtaggaaagactccagcagagaaaataaaataaatttgtatttaacaaaacacaagtacaagtgaaaccatcagctatggaatgagcaggttgtctcaaatcccctttcaagtttaagtgtggggaccacatctgaccagtgtgtaaaatcaagccccatgcagaaggatcccagcaagcgtcctttatgtatgaaaaggaagaagaaaatttccccatgaaacatattcaaagtagagaacaatctttttgattccattgttattttaattgtatacagacataggagtctttgcataattagacttttccttctttcaggactgtggatgcaaagccctggacccccagacgttataggacattactcctcagctttgcagcccggtgatgtgaagcgaaacaccatttccccttttttatggcggaagaaaacagaacacaactgcaaaggggcttttccctcccctgctcatcctctttccccaaatgaattttggtttgctgtggactctattctgctgaggaactgttcttgttgggcaaatgtagatcttgtctactctgtggcaggaaaaggccttttctttcattttgtaagaaagagcacagagttcctcctgtacctgctccagctgtgcctgcagcccctcacggccgggtgatgccattcccaaactgctcagcccccagcactgtggtggccacagctgtgggtgtcttgctggggctggagtgtgggctgggtctgctgggcaacgcggtggcgctgtggaccttcctgttccgggtcagggtgtggaagccgtacgctgtctacctgctcaacctggccctggctgacctgctgttggctgcgtgcctgcctttcctggccgccttctacctgagcctccaggcttggcatctgggccgtgtgggctgctgggccctgcacttcctgctggacctcagccgcagcgtggggatggccttcctggccgccgtggctttggaccggtacctccgtgtggtccaccctcggcttaaggtcaacctgctgtctcctcaggcggccctgggggtctcgggcctcgtctggctcctgatggtcgccctcacctgcccgggcttgctcatctctgaggccgcccagaactccaccaggtgccacagtttctactccagggcagacggctccttcagcatcatctggcaggaagcactctcctgccttcagtttgtcctcccctttggcctcatcgtgttctgcaatgcaggcatcatcagggctctccagaaaagactccgggagcctgagaaacagcccaagcttcagcgggcccaggcactggtcaccttggtggtggtgctgtttgctctgtgctttctgccctgcttcctggccagagtcctgatgcacatcttccagaatctggggagctgcagggccctttgtgcagtggctcatacctcggatgtcacgggcagcctcacctacctgcacagtgtgctcaaccccgtggtatactgcttctccagccccaccttcaggagctcctatcggagggtcttccacaccctccgaggcaaagggcaggcagcagagcccccagatttcaaccccagagactcctattcctgacaacagccagcgtcctcaacgcccgtgtttatggaactacctg

SEQ ID NO: 10858 - DNA, 6000 bp, Homo sapiens
attctcatattttctaaattaatcctgaatggatatcttataatttgccacttacagcgtgaaacaagggaaaaatgaacaaacttcaccatatcagtttttacaattaatagcttacgaagaggttattgaatccacatgcctccagttcatcctatttgaatttaaagcttcttggacacacaaatcatcctatcactaatgcttaaaatagaggtatgtagaacacatttaagaaatttattatataaaacctgctaaaatttgggtgttttgagcacttatggacgtttatgattatctcactcagaaaaatttgactaaggctccagtttcttaattccatttatttgttttatactgctatttgcaatgttttgttatctctactggaaattaaaacttgagagcagagcagtcttagatttgaaccttctgtctgcctatgaaaataatctagcctatgaaaataatctctctgaacctctaaattcagatttctacctgaataattaaccttttgtgaaacagacaaaaaatattggcaaacttttcatctattctaagccaaattgcactgttgtgtgaaaaattactcctagtatttatccttatactccagcaggaacatgggggttcactgtagtatatttaaagctttttatacattctcagaggtatgataattatagaaaacttagaagcaaacaatttttatgtcgaatggaaaacagaaaactctggtgttaccatagattaaactgcttcccaaagccattgagtaacttgcccagtagtgaagtgacttagtagcagcatctaaactacagctgttgtcatatttcttatctcaatgctcactgcatagtaaacagcttaaaataaagttttcaggactttgttgaacctcgtcattcagaatcctctgtcagccatatactgaataacttcagtatgtagctgatggatgcaatcccaactaatatacaagcaaacgggtggtgattgtatttattcagacaataaaattgaaatatcctgagttatgtatagataaaagttctaaaggtccaaataacccttttcaactgttgctttttacagtactcaattttgtttttgctttgtttgttatgttttgttttgagacagggtctctgttgcccaggctggagtgcagtggtgcgatcatgtctcactgcagcctcaacctcctgggctcaaacaatcctcccacatcagcctcctgagtagctgaaactacaggcgcatgccaccacactcagctaattttgtatttttggtagagacagggttttgccatgttgcccaggctggactggactcaagcgatctgcctcagcttcccaaaaatgctgggaattcccagactcaagcaatcagccccagcttcccgctgggattacaggcaggagccactgtgcctggcccaatactcactttttcttacctgcagttgtaagatagttgctatgcaatctgatcccttttgtctcacattatgaaaatatgttcctatgttgaccaaaggaaagctcgttaactcaaaatgagaatgatatcctctgaagatgctgtaaacagaattctattcaggaccagagaaatagattgtgtagccttttgcgatctcagccatgactgggcaccaccatcagcacaggtgtaatcaggtaaataattggttatgctatctgcgaggatttcagagatacaagattcctacttgtttccattgttaacaagtccttccaatccaatgatagtgataagaataacaattcaaattacttgaaacttctgtgtgcaagataatatttcaacttttttttttttttttgagatggagtctcactctgttgcccaggctggagtgcagtggcactatctcagctcactgcaacctccatctctcaggttcaagtgattctcatgcctcagcctcctgagtagctgggattataggtgtgtgctaccatgcccagctaatttttgtatttttagtagtgaaggggtttcaccatgttggccaggctggtcttgaactcctgacctcaggtgatccacccacttcagccttccaaaatgctgggattacaggcgtgagccaccacacccagacaatttttcaactttttaacaaaagttctctcttttagagtggatatgtaaagaggttactggatatttgaaagatggggaaattttgccccaaaagttagcaaagcagaatataagaatgagttgtactacagtctccccagtacttttgttctcatgcaggagaaatttggggcaaaatttccctcactgctgtggatcatggacattacctataacagaagtgcatttaatacttttgtaattgctgaacctcagtgagaaagagtagaagttaattgaattcctcccttctagaattttcattagtcagggcttcttggagagtttgtttttggctgtattctagcagagaaatgccagatacagggctggtcagggaaagccactggcccaagtaaggagaaagcatatgcagtgtcctcagtgatgaggtatctcttgaacaataatttgaaaattattttagtctccaatattacagctagagagaccttataacttatcacccaaacatgaactcttttgaagactgaagggttctattagtaattgtgtcagaacagcaggagtaaactcgcagtcctgtgcaaactgagatatgcagtgaccctaattatatagactgagggtattttccaacacttgttaattcaaggaaattgtgaacttgtgaaatctctttttatggattccatttgttctgcttttcagaattcctataatgagtggcaactctttttgatttttttttgtcaataagatgccgaatgcccaatgcccttgcattccagtctttagaaaatgtccatgtagattaatgtagatcctgttttaaaaatttgttgagataaaagtctaaattcatataagattgtttcagttataaagtctaaagcaatgcttgtctttatagtaaaacatacagtatgaatatgtcctcacttaaagttattatataatacataataatctttattaataataaaaagcattatatttgttaaaaattagaaaaagcaaggataaagttaaatatcaaaatctgatttttctccctctttccatttccattccccagaagtaacagcttttaacacttctgtatacttccaggtaattttatacatatatgaatactgaccaatatgattatattcccttatgtaaacacatggaagcatgctaaatacatgttcagaaacttgtttttttccttaaggatttgaatgtttttgtacatgtatatctatatctgaatttatatctataccacattcctaattttattgacagctgcatagcatgtcaataatatgcagctgtcaataatatgcagggactcatttgagaggctataaaagctttccctgccattttatactgagaactgtagaataagtgagcaaaattgaaatacatattgaataatagtttaaaatttatgatcctatccttaaattgacatttttacactaacaaaattataataaaacaatagagggtggtggtagcaagatagatgatttggaaatttttaactggtagcattgacttatattagtacttagcaaatttagggctctgaacagcctctgccccgaatgtctcagagttcctgtgtcatatgatactttcattcacattgctgtgtgccattataccaggtaatttacattaaagatcacatttatacttcacatcagatagttattattatctctgttgttaaagttgatggtattggagttgtggagagaacaagataaatattacctcacagagtcattttttattggcaaccccaggacatttaaagttctgaaaatcatacataatttttctctgagcatcagaagatgactacagttccttttgtctacactttgtaccactatcccaggaaggtattattatactcattttataggtgaggagcttgaagctcacaaagagtaagaaacattcccaggaggatgtaactaatgacttatgtagtagggacatggacccagacttgtctgcctccaaattccatgctactaatatctttttattctaatttgataaggtcttagaaggcaaaagatgtttccctgagatgtgtctaatagcttgctacagcctatatgcatagtttttgaggcggtctaaataattttaattgtttcacatcgtatgttcccattcataagtgggaactaagctatgaggaatgacacaatggactttggggactggggggaaagggaaggagggagctgaaggataaaagactacacattgggtacagtgttcactgctcaggtggtgggtgcaccaaaatctcagaaatcaccactagagaacttattcatgtaaccaaacacctcctgttccccaaaaacctattgaaataaaaaaaaatttaagaaactaacaaattgtttgtttcagatgacaaggcagtttccttaacattgagaaattagagtgaaaaaaatgtgttagagattatgaccgaatctaataatagctatctatgtggacagtattacaaaaattaaccaaatgacaaaaaatcaaagaagaaattttgtgaaagttgtttaaaatcaggaatctactttttacattttagctttcacttttgcagtgatgatacagatatagaaagattaaattttagaaatactttggtaattatgagcattttcaactgtatatttttcatgtaataaaacaagcaatatcaattctgtaaatatcttcaaacaggtagtaaaatgactataagtaactgaaatagttaacaaatatgtgttaattgacttcctgaatttttctgtttcaggaaaccaagagttgaaacattaatcatgaattgggtaaatgacagcatcatacaggagtttattctgctgggtttctcagatcgaccttggctggagtttccactccttgtggtcttcttgatttcttacactgtgaccatctttggcaatctgaccattattctagtgtcacgcctggacaccaaacttcatacccccatgtatttttttcttaccaatctatcactcctggatctttgttacaccacatgtacagtcccacaaatgctagtaaatttatgcagcatcaggaaagtaatcagttatcgtggctgtgtagcccagcttttcatatttctggccttgggggctactgaatatcttctcctggccgtcatgtcctttgataggtttgtagctatttgtcggcctctccattactcagttatcatgcaccagagactctgcctccagttggcagctgcatcctgggttactggttttagtaactcagtgtggttgtctaccctgactctccagctgccactctgtgacccctatgtgatagatcactttctctgtgaagtccctgcactgctcaagttatcttgtgttgagacaacagcaaatgaggctgaactattccttgtcagtgagctcttccatctaatacccctgacactcatccttatatcatatgcttttattgtccgagcagtattgaggatacagtctgctgaaggtcgacaaaaagcatttgggacatgtggttcccatctaattgtggtgtctcttttttatagtacagccgtctctgtgtacctgcaaccaccttcgcccagctccaaggaccaaggaaagatggtttctctcttctatggaatcattgcacccatgctgaatccccttatatatacacttaggaacaaggaggtaaaggaaggctttaaaaggttggttgcaagagtcttcttaatcaagaaataagaaatatgcaaatgataagctttgctaaagacaaaatgtttacttagcttactaactt

SEQ ID NO: 10859 - DNA, 6000 bp, Homo sapiens
aagagattgaaatttgtattttaaaaatatgttggagaccagcctgaccaatatggtgaaaccccatctctactaaaaatacaaaaaaattagccggctgtggtttgcacctgtagtcccagctattcaggtggctgagacaggagaattgcttgaacctgggaggccaagtttgcagtgagctgagattatgccactgcactccagcctgggctacagagcaagactccatctcaaaaaaaaaaaaaaaagggtagattttcctctaatttggttttaacgtctctctttgaagagtggctagaaactctagcctggctctgatgggctccagtggaggtggttgtggttgtggatgttttcggtgttcttttcatggaatacttccttatcctgatggagagctaatgcctaattgtcctatttatgaccaggtgtccctctcactggaaacttgttttcactggcagacaccattgtggcttttgtctgactagtgtgtccagttcattcctaccaagattgccactctctaagggagccttgtccagaaaaaaaaattaatttcaggtgtgtcaggtgagacgccaagaagacacataaaaaaaaatagtataagtagttttattacttaaagattccagagagaagagggcaacttgcctcacaggcctaatgggagaaagggcatcccttagagacatgcatgtgcaaccagtgggtgggtagcgagagagagtgagtgacagaccagaaagccaaagcccttattggagtacacagcattatccaagcagggagtaactggttgctgggtttagagcaagcaggcatgatttcttgggagttaagttgtattgagaggtgttcactgctgcaaatctgcagtccatgtggggtgtggggatcagtgggataagtcaagtaggttgtatctaggtgtcccacacggaggtggtaaccaagaggccaaatatctggattgaccacctgaagaaactgggagaggagaactcaaaattgtgataagggtgactaagtcctgcttctggcatgaggaagttcaattatatattgaaaatgaacgctgaggtaacataaactcataagaattcactacagatatctgcactaccatgttcattgtagcatttttcacaatagctgaggtatgaaaggaacctaaatgtccatcaacggataaacagataaatatataaaagggatataatgtgatatatatgaaccacattatctatataaaatggaatactattcagccttaaagaaaaaagggaaattctgtctttacaacaacattcatgaacctgcaggacattatgcgaagtgaaagaagccagacacagaaggacaaataccacatgatctcactcttatgtggaatctaaaaaagataaactcatacaagtggagagtagaatgatagctacctggggggcaggggatggagaaaggggggattttaaacaagtagatttaaatgttctcactataagaaaaataagtatgtgaggtgatgactgtgttagctggacttaatcattccatattgcacatatacatatatcaaaagatcacattgtacctaatcaatatataaaattatttgtcaattaaaataataaaagattggagtaatatttaagatttttttaacattttgcaggaaaaatcttggaattgaatttaaaagacaactgggaaggcataaataatataggtcagtctcaaagagcccctcattaataaggaacagatatgcagtttagtctttatgtattctagtttttctgttgaatgactctcaaatctctcctttttttccagttgtcttgtacatttgagccttagccccacgggaaactgaaaaaaaaaatcggacggctcagtaaaacctcttcctttcattgtaaatgttactcacagcatcttttcccatgtttgttggtgacaaattcactgtcatctcagtaagagtataacatcatgctgaagatatttctgtgaagagttttgtactgagaacatcataccaggacaactccttgaagggcattaattgcagctttgggatttatactcccaaaggctgcagtcaatgaaagagtatcccgttattctttttgtttccataaagattacatttgctctgggataaagggtccatcccgtgataccttgaatgccctaaagtattcccacattctgctaaaaagcagatcttttggacaaactcaggctctcttttctgtagcaatgacaatcacagttatttccagactctgttcttcatagttagatttaaaacattggcaaaaatgttataagaaggcaattaggttgatgtttttaggttgtatggcaaccagagagccccttcatcagtttatacctgatgaggttgtaggccaggtagagagtgacagggaacagggacaaacacaggaaggtcagtactgaaagaagttggtgcacttcttaaggggtagacagcttccatatttcaaaattgcagaaagtgtagattttaaatgttcttactacaaaaatatgatggttgtggggtgatggatatgttaactagcttaatataatcattctataatgtatatatacatcaaaacattacagtgtactccataaatatatacaattattactagtcaatgaaaaattaagaaaacaaaccagatatagtataaaggaatggatgtgacacaaattggcataatgtctcttaataataattggggaaggaagagacactcagccatccattttccctatagtatttgatttaaaaaaagagagaagatattttattctacaactcataaaagctacatttgatagggtcttcatttccctcttttccaccaagaagaaaattgaagctgagacttttctctacatgagttctgggggtttttttgtcccttatttcctatcccttttatcaactccggaggaatgctgaaagatgggtcatataacagatagttatcagattccaccttttaattactgtaataaggaactcaggcagctgcattcggaaagaaaattaggtcggcatcagcaaaagtatccacagcatttgagttcaagtatcttatggcatattacctttcatcttagggagatttaaaaaaatccttggaattttcccatgatttctcaaaaggttaatgctcattccattaccaacaatatggaaaaatgtacagtatctttgtaccagtctggagcatttgcacagatttggcccaagttcaatgttcctagctctccagctgtaactcaaccagttaggcaactccttacatctttttcaagagtcaagattacaatacttgagttattaaaagtttttcaaaacactgaaggtgagtcgggtgtagatattagttttttgagacagagtcttgctctgtcacccaggctggagggcaatggcatgatctcagctcactgcaacctccacctcctgggttcaagcgattctcctgcctcagcctccagagtagctggtattacaggtgcccactaccatgcctgcctggctaatttttgtattttttagtagagatggtgtttcaccacgttggtcaggctggtctcaaactcctgacctcaggtgttccacctgcctcggcctcccaaaatgctgagattacaggcatgagccaccacgcctggcctcttttgccaaatttatcagagagtataagaggaagagttggctgtggcaggaggggagcagaagggggatggcaaaactatgtaggaatattgaaatgctgggttcctgtattttattgcaaaaactatatcataaaagagtgtttatctttctcatgcaagattggtaatgtgcaagagaaaataagcaactgaaaatcaagctatcaaagcatatttgaatttcttcattttaaaaaaataactacaaggtgaattttctggattttatacaatgttcacgtatctttctactaatattagttaatgtctgttcagaagctccattaaaaattgtggaaaacccagaaaatacaaattataaattgtgactcagaatttaaagtatagttcagttattggcctaaagcatatacagttttgtagaaaccatgtttaagtcttcttgtccttgtctaacaaacttgttatacattctttcaacttcgcataccacattcagacctctcttcactgttgtgcatccaaacactctccatttctctcttaccaacctatgtttttgttagactctgtaatctttatgtcttccagtaatatagtctcatttacctttggaagcattctatcaccgatcactctattttgctgtattaatcagctttgtgtatattgtgaatttttataagttggtgtgtgcgtgcatattctctttaaactttgatttgtgcattattttatttgtctagaaataaactgctagcataaatagcatttgattctttctataatcatattcaattatttcttttcagttaatattttaaagtgactatctaattgctttttaatatgggaaattcctatctataagtaagatcagtaagactgctgttattcctttctctgtaattgcaaaattggaaatagcctgaaaatataaaaataatttgactttttaaagtaaaaaatcatttttcataaatattgtgttcctgattatggactatcttagtcttcattaatccaaatgttaattcagggatgtatataaagaactcagtaacttgagaagctattgcttgtatctgtagctggataaatatctcaatgaagcatataaagggaactgtataaaaattctactaccattatggtgcacactctctggaagtgggatacttttgtcttcaatctgtttgcaagtgagcggttgacaatgcatggacagactttgagtttatgtggttctttctttaggtataagaaaaagatgaatgatgattaaaaaaaatgcaagttcggaagacttctttattctacttggattttctaattggcctcagctggaagtagttctctttgtggttatcttgatcttctacctgatgacactgacaggaaacctgttcatcatcatcctgtcatacgtggactcccatctccacacaccaatgtacttcttcctttcaaacctctcatttctggatctctgctacaccaccagctctatccctcagttgctggtgaatctccggggcccggaaaagaccatctcgtatgctggttgcatggttcaactttactttgttcttgcactgggaatcacagagtgtgtcctactggtggtgatgtcatatgatcgttatgtagctgtgtgtagacctttgcattacactgtcctcatgcaccctcgtttctgccacttgttggttgcggcttcttgggtaattggttttactatctcagcacttcattcctcctttactttctgggtacccctttgtggacatcgcctagtggatcacttcttctgtgaagttccagcacttctgcgtttatcatgtgttgacacccatgcaaatgagctgaccctcatggtcatgagctccatttttgttctcatacctctcattctcattctcactacctatggtgccattgcccgggctgtactgagcatgcaatcaaccactgggcttcagaaagtgtttaggacatgtggagcccatcttatggttgtatctctctttttcattccagtcatgtgcatgtatctccagccaccatcagaaaattctcctgatcagggcaagttcattgccctcttttatactgttgtcacaccgagtcttaatcctctaatctacactctcagaaacaagcatgtaaaaggggcagcgaagagactattggggtgggagtgggggaagtgacagggaaatcatgttgtctgttgtcattgtttttcctagggtcttagccatcttgaaaggt

SEQ ID NO: 10860 - DNA, 6000 bp, Homo sapiens
gtctcatttccttctcctttgcttttggtgcttcctggtcacttctctgctgactttcggtgttctctcttagatgatctattcaacgtgtgattattgactggttattttggttactttacatggaagggccaagtaccagatgtatcaagtcagccatgttggagcctctccagctccattcaaggggcctgttttgagttggccctaggcctttccccgtaagcaaactttctataacattgaaattacttgggaaaaaaagctgtcaaaagactttgagggtgttttgttttgttttgttttgttttgttttgttttgttttatggcgtctcacgctgtcacccaggctggaatacagtggcaatctctgcctcccaggttcaagcaattctcctgcctcagcctcctgagtagctgggattacaggcgtacacccccatgcccagctaatttatgtatttttagtagagatggagtttcaccatgctggccaggctggtctggaactcctgacctcaagtgatccacctgcctcggcctcccaaagtgccgggattacaggcgtgagccactgcactcagccaacttggaggtattttggggaaaaaaaagaagtaatgatttttcctaacttatgagatattaagacctacaataacatcatattacttaaattacagcttattcaatggaaaaaatagtaagtggagaaacaaaccatgtattgaggggaacttggaatagtataaagatggcctcacaaatcgatgaagaaggaatggttagtcggtctacatagagacaaccagaaccaagactagctgattatctcacaggatatgtaaatataacctctagaagactagagtcctaaatgacaaatataaaactctaaatctaattaacagaaccagttacataatctttaagtttcaatgcaagataaaaaatgataaaattgaagtgggggacattttgaaaaaatggaaattacattgcagtgatccctaaaactaaagagccttattttgaatcctagtttcacaatccattgcaaggaaaaggaaactttacttaaatcctttgagccttggttttcttgtagtaaaggaataattttaatacttttacattgggtttttgtgagaattaaatgagctaatatatgtgaagaactcagaacaataacttatacataatgagcatgcaataaatgttatttatttataatatattagcagtatataaaataaggaattatttgtatgtggaatggctcatacctataatcccaaaattttggggggatgatattggtggattgcttgagaccaggaattagaggctgcagtgagttatgattgcatcactgcactccagcctggatgacagagcaagactctgactcaaaacaagaaaaaaaattaaagatttaaaaaaaaaaacaaaattaaaaaattaaaataagatattattgtgataaatatatataataaacttttgccaagcaacaaaaatggaaactcaatagaaagacggaaaaaatacatcacagttacaactgttagtagaatccttggattgatggaaggtcacgcatagataccctggtgtaattcagacagaattttcttacctaaaaaatagcaaaaagtaatgctacacattggtaagaccaaaatccttatcccaaacagagaaaaatgtgagcttttggaccccaaaattaattatttaaaataatttagtattattagcaacagtgaagagtaagatgtagaaggtacaaaagtaatactatttctctttatgtctctttctttggttttcatagaaccacagtagaatattaaagataatcatctttctgtactgatcaatggaatgtgggtgaccatatttattaatttttattgccaattttctttcactttatataccaaaatattttccaagggagccctcaagaagagaaagtgaatctgaacctctaccataggaaatgaaaggaaatttgactaggaaaaagtattttaaataaacaaataaatattttaaaaaacagtattgtgaaaggtcaaataaaatattgggttactattttaaagaaaaaatccagcaaatatattaagctattgaaaactgtcttgtccatggttatgaaaccaaggaacaaacatattaagaaaaaaagataagaagaacgacaacaacagaaaagtggaattctacagagaaattccatatggctatccccttatgctgcaggtgcagagagacctcctgtttattctcacgacaatccttctcagcacccaggggacagtttctctcaggtttttatgtctagagatctgcagctcattggaaggcaggcagattttcagagaggaaaagatttttgaagataatttatgctgcaatcccaacatcaaccatcacttcaaatatttttctatttataatcactgggagtataaatctgaaaagctcttttacctgtgattctgaactctcaatccgggtgagagaatagaataggagacaggttgggaagctgctcgtattttttatctgttaatgagtgacctgactgcttgcgagtattaaagttagatgcccaggatttagagctggtttcctatttttatgatggagtcttcattgtagttgtagattatgaaagcattttgttttccgcacttttattgccatatctccttctctattcaacatgcctggctctctagatattcgctaaagcaaatctgaaatccctaaatattgaaattgcagtgaaagaaatattttcgtacagagaagttggctaaacaacattctttaaacgttaggaaaatgttgttttattatttattattttttaaattttctttttaccaaatagatttttgatacaattttattttatgggtcagagaaccaaaaataatattttatctatcatttgtacttttaaaagacatggtaaaagttttgaaaaatatgcaacatacatggctatcaaataaagctactttaaattgtttggaggcagtccttcatggaggtgtggtaaaggttagataatctctcaaaatttcctctagctgtaaagccaaatatcctatgggctccctagagatgtttcctagttcattattttttttaactttagtcacaccaaatccttttcttctctcatcagcaatttttcaacctcgaattattccccatttataggaaacactctaatgtctgcatctttcttctgatttcctattggttcttattcttttctaagtgcctgccatttctatggatttcccacacattcttgcttcttttctcctaatatgcaaaagttaatccactacatttgtacaagaaaggaacaaacaggaagctatttcacaaaattatgtctgcttttgtcagtgcacctatagaagataatcccaagtactttgcaaataatgttagaaaaaaccttcaaaatatatttctgcctttcagtaaacagtataaatttagtcaaatattaaacctcattataattatcttacttataatccctcatgtgttttaacagttactgaaaaaattctattatttcaattctgcaaaagaaagaaaaatgaatacatttctttcatagaaaatggaaattttatctgatggaaagaaggggcaaatagagaaaacacattttacaaatgaaaaaggctagaaatgtgtggcaactttggagagaactggtatgaagccaacagacctctgggttgatggaggagaacctgactgtcagtgtcacattgatgaaactagaagaaaagagaaaattcacttggatacaatgtttcttcacatctaaaaagtgagcttatttcaggcaaaataaaaataagacttaagaaaatgcatcacaagagaagacagaactttcagtggtctaaattcttagatactttagaagaagacactattgggtaaaatgaaggaagaattgttgagtctattggaagagtttttcttattcagagattcaggggtgtgaaaaaggaaaaagtctcagtgcaactggaaactaaaggaacaataacatttgtcatcaagtaagtaatttgggatttactttgaaaaaatttaaaggcttaggtagaagaaactaagcacattatctgatatagcagtgataaaacttcaaatatacctcaggctaatatttgattgatgtattattttttcctttcccagtagagctccatgacattgccagagatgtgggttagaaagagatcagtaagagaacatctccagcctcatctacgttctaagatgagaacaaaataattactactattttaaagaggtttttatatctctttaaagactttgtgattataatgagttcatttttatcttcctctctttttttttttttttttttttttttgagacggagtctcgctctgtcgcccaggctggagtgcagtggcgggatctcggctcactgcaagctccgcctcccgggttcacgccattctcctgcctcagcctcccatcttcctctcttaagtcaaaaaatttcaggagccattttcctgggtcaagagatatccaagtggtggtgcacttaaaaactgccccctattaatgctgacttgggataggaaaggaaagttgtaacagaatacggatgtattcttctcaaccagagaagatgtaagttagcaacatgttctaaatccccagaagaaagaaatacgttaatgataaacttaattttaaaaagtggttaagtcatagtccataatatgcatgaatccttaatattgaagagaccaacagctaagcttctatacaacttctgaggtttggaagaagtacaacagtactctccttccaagtatctttggcttggtgagaaaattctgagccggaaggattctgattgcgattagtgttccatagattattttgtcttttgtctgaagtgatgctgaatacaacctcagtcaccgaatttctcctcttgggagtgacagacattcaagaactgcagccttttctcttcgtggttttcctcaccatctacttcatcagtgtgactgggaatggagccgttctgatgattgtcatctccgatcctagactccattcccttatgtatttcttcctgggaaacctgtcctacctggatatctgttactctacggtgacactgccaaaaatgctgcagaactttctctctacacacaaagcaatttctttcttgggatgcataagccagcttcatttcttccactccctgggcagcacggagtccatgttgttcgccgtgatggcatttgacctctctgtggctatctgcaagccacttcgctacactgtcatcatgaaccctcagctctgtacccagatggccatcacaatctgggtcattggttttttccatgccctgctgcactccgtaatgacttctcgcttgaacttctgtggttccaaccgtatccatcattttctctgtgatattaagccattgctaaagctggcctgtgggaacactgagcttaatcagtggctactcagtactgtcacggggacaattgccatgggccccttctttctgacacttctctcctatttctacattatcacttatctcttcttcaagacccgttcttgtagcatgctctgtaaagcactgtccacttgtgcctcccacttcatggtagttattcttttctatgcacctgttcttttcacctatatccatcctgcgttagagagcttcatggaccaggaccggattgttgccatcatgtacactgtggtcactcctgtactaaacccactgatctatactttgaggaacaaggaagtgaagggggccttgggtagagtgatcagaaggctttgatttgaataaaccagagaactctactgaggcataaataaccagcaatgaaaaagtagagatgtgtaattttactgct

SEQ ID NO: 10861 - DNA, 6000 bp, Homo sapiens
tccaacttagttgatggtagttttgccagtcaggaatggccatgaaaatcaacaattacactattaaagagggttgagatgatttggaacaaagataaaaactcatgcctagggtttatgtcagtaaaagtaacaaactcaatcgtgtttaaggctcaggtatccagaggttacagttttaatgaggcgaacagtgaacctatcagaaatgtaatgggaagatgctgggaattagatagctatagaagaattagataagatctctacacattcctggctgactgggaaactacaggtatgtacagaagaaacatgagagaaaccagcatgaagtaaaatccaagacaaacttaaaagctctctgaatttgaatatggtcccagcacaaaggcagatgcattagcagagaatggaagccttttgaaatcaaaagtatttgaccaaaaccttcacccaatcattgactgaacactaagctgtgcaagaacaagggaaacttctgggatccaagattttaaaatatgaatttttaagagctaggttgagaccatggaagccataaatggtggaagatacacagtccacagattatgtccaataatgttaacaaaataattcttagaaaaaaataagaatataaacttgtcaatatagtatctaaaatgagacatgcaaagaaacaggaaagtataatcaagtcttagagaaaagactgcagttaatggaaactgactgtaagtgggactgctgttgaatttagcaaacagagattcaaaacatctaatataaatagttaaattaaaaccatttttaaagaattcatggacaatatagtctttcattgggtagggaagatccactatcaatatagatgggtatcatccaatcagctggggcccagatggaaaaaaaaggcatgaaaggatgctctttatcattggttattaagaacatgaaattaaacacaatacttacaagtctactagaatgactataataagaaactgatggtataagatgttgacaaagatgtgaaatactgattaagtgttggcaagaatatgtcaaaattgacagagccactttggaaaacaatttggcaggttttttataaaaaaaatttactatacaacccaataattccactgtcaggtaatatccaagacaatttaaatcatatgccttcaatgactcttcataagaacattattagtaacacccaaaaagtagaaacaatccaaatgtcatcaactggtgagatcagtggaactgaatagaaagtgcagaaatagagccaaacacataagatctattgattttacacaaagacaccaagataattcaatacaggaaacgatattctttgcaacaaatggtactggaggaaccagatataggtataaaaactgtaccattatgatttgtttaaaaaagcagccattttttttatcgcttctcggccttttggctaagatcaagtgtaaaaaagcagccattttcataatattttattatatgtatgaaaatgaattatgactcctatatcacaacatacaaaaaaattaacatgggtcatataaataaacatataagctagaaattaaaagcttctaaagaagaacataaaagaaaatatttatgaccttagaataggtaaagatttcttaggattcaaaaagcacttaactgcaaaaagataattgatgaattttgagttaatcaaacttaaaagcttcttctcctttgaagacgccattcaaattgaaacatcaaaccacagactgaaaaaatagcacagtgcatttatttgacaaaggacttttatgcagaatatatgaagaactcatatacttttatcataaaaggaaacactataaaatatggacaaatgacttgaacagacacctcacaaaagaatatataaatgaccaatgaaaagatgctcaatgacttagttgttggataattgtaaatttagaaactactgtgagattaataagtctagagatctaatgtatagcctgaggactacagttgacaacattgtattatatactggaaatttctaagagaatagattttaagtactcttaccacaagaaaagtaactgtgagttgatagatatgttaattggcttgaccatagtaatcatttaactatgtatatcaaaacatcatttgggaggccgaggcgggtggattgcctgagctcaggagttcgagaccagcctgggcaacatggtgaaaccccctctctactaaaacacaaaaaagtggccgggtgtggcagcatgcgcctgtaatcccagctacttgggaggctggggcaggagtatcgcttgaacccaggaggcggaggttttagtgagccgagatcgtgccattgcactccagcctaggagacagaatgagacttgtctcaaaaaaaaaaaaaaaaaaaaggaaatcctgtatatcctaagcatatacatatacaacaaaaaattttcaaaattagcctggcttggtggcttacacatgtaactcagcactttgggaggcctaagcaggtggatcacctgaaatcaggagttcgagatcagcctggtcaatgtggtgaaacaccgtctctactaaatatacaataattagctgggcatggtggtacatgtctataatcccagctactcaggaggctgaggcaggagaatcacttgaacctgggaggcggaggttccagtgagccgagatcacaccactgtactccagcctgggcgacagagtgaaactcagtctaaaaaaaaaaaaagccgggcacggtggctcacgcctgtaatcccagcactttgggaggccgaggtgggcggatcacgaggtcaggagatcgagaccatggtgaaaccccgtctctactaaaaatacaaaaaattagctgggcgtggtggcgggcgcctgtagtcccagctattcgggaggttgaggcaggagaatggcgtgaacccggaaggcagagttttcagtgagccgagatcgcgccactgcactccagcctgggcaacagagcaagactccgtctcaaaaaaaaaaaaattaaattaaaaagctataaaagctataatgagatatcacctgatatccactagaatgtctatcacatgaccctgaaattccacaaataggttttgaccaaagagaaatgaaaatacacatacacaaaagacttgtacatgaaagtttatagcagattgattcacaacagcaaaaactggaaaccaccccacactgtttctctattacagcataaaaagttatcccaaaacttaatggcttcaaacaacaaatatttattatctcacagtttctatgggccagcaattcagaagcagctaaatagtagctggtgattctagcttaggatctttcttttaactttttaaaaactttttgtgaatacatagtagatgtatctattttaggatctttcttgacattgtagtcaagaagtcagctgattgtatttctaagatttggatgaagctgaaggattcacttacaagatgtcccagtcacatgttgcacgtttttagtagggagccttagtttctccccatatgtgtgtttccattcactgctaggatggcttcctccaaagtaaacaatccacaaagaagaagtcacaatgttactgtgacatagtctttgatgtcacatcccatcgtttctaccagattctatttgttaaaactgagtcactcagtacagctcccatgcaaaggtaagggaagtaggctctactttgtgaaggggatataagaaaattgggggccatattttaaaacaaccacaaacctgaatgttcatcaacaagtgaatggatgaaaaaattgtgatatatttaggcaagagaatactactcactgatatttttaaaaaagaattggactattgatacacaaaacaacagggatgattctccaaactgtggtacagagcataacacaccaaacacaaagagtatgtgctgaatgaatcttttatgtgaagttctggaaaaagcaaaacaaaatgatagaaatcagagcagtggttgcctagagcatggggagaattattgtaaatgggcatgatgaaatttctggagtgatggaaatgttctatatcttcagtagggtaatggttgtctggatgtatacatttgttcacattcagtgaattgtccattaaaatatgtgcacttcattatgtaaattataccttaattttaaaaagagaaaggaaataaaccaaagtcaggggggattgaatgagcacattcgaggcttgagaggaaggctggaaatatgggacactcagaaggtgtggatcaggagagaatagtgcccttttactccccagtgacacggagaagcagtggtgacctttttatatgccaaagggaactcagttgctggcacacttcctttgaatcttcacattccttcttaaccattagtagctgtggccaattagctgtctataggttatggggcacctagtcttggcagaattaatgagctacttctctctatgggatgggagtcttgggattcctccccccatcatctcactatgcctttttttctgcctttaatgtcactaaaagagaggttaacttactggattgaggaaaagaagtcgttagcaagagttccatagtaaagcgctaactctagctcatgtgtctggcagagcaatggtggaatgtggttagcgcatagcttcttcagccagcccacctgggttaaaatttggtctttggtgcttactagctatactttccagaacaagatattcaacctctacatgtcttcaattattgatctgtaagggaaggtaataatagtacccaccttttgaagttataaggagccgtaaatatgaagcgcttttttgagtgcccatggaagtaagcactagcaatcaatactcttaactgaaatccaagttccaataatcatcaagagtataacattcctctttagtttgcttttagttctcattgtgagatcacaagtggaggctccaaccagtccagaagttcctttctatggggaagctgtggcagcaaggccgtgaagagagtctgacttaattgcaagtaagtcacaagtttattcccctacagcccatcaatttccacatgttcttaagacagttctgaatcaaacagggtctacaatcctggcactgacactcattggcagggtaaccctgggcaagttacttaacctctttgagactgtttgttcttctgcagagatattaactgtctagcagggttcttttaagaagcagatattccaggaaattatttagcacagtgttagtatataggacatcaacagatagtaactgtcaaaactataagtggttattattattgaactgtagggcagaatttgtctcataactttgtagcagttagtacatgactggctctttgaggaccaaaaaagaataaattaatgtgcttctgtgtggagttaatgggatgtagggaaagtagtgcttgcctattattggtgtcagagaaaaggaccagaagaaacagggtaaggaaaaggcatgttattaaagatagaaaataggagagtgcagagggtcaaaggaagatataaactgaagagattaagaaaaaacatacagtgagacaagttgccaagagagtaagaatgtaagaaatgctgcagtttatggatgaataaaactctggacaattgctgagacacaaaagatatgaggctgcaaagtttaaaaaggaacgatacatttaaaataatcagaatagtgtttacttcttcagtgggagagaaggagatgtgatcagggaggagaacacagaagacttctaagataccagtaatatttgatctgttcttaaatcaggaggagattcaggtacaccatgtgtttattattccataaaatccatagatgtgttttatatactttttgtttatatgatttttaaaaaattaaggg

SEQ ID NO: 10862 - DNA, 6000 bp, Homo sapiens
gaaataggtggaaaagaacatgaaaaagaaaactgacaaatacacacaggtctcctcaagatccatggacttctggtctgagcctaataaagactgtttgtttattcctcaaaaacaaacaaacaaaaaaaaaccctctgtattataaattattctgtgtaatggtgtgttaccatacatttctctacaactctgcattttcagtaatctcacattgacagtttaaaattggccatggtgagaatatttacactgcagaaatcagcaaatgatgtaaatcaaggcttttttgcctggacttgcagcacatccatgtcccattggaccctattatgacgggagagttttaacatggtactgaagcaaaaatgtaaatgtaaatgtacacttatatccatacctgtaaattcaaactgcctttggtctttcttcctgatagtatttgaaaagaacacattcagccaggcacggtggctcacgtctgtaatcccagcattttgggaggctgaggcaggcagatcacgaggtcaggagttaaagaccagtctgatcaatatggtgaaaccctgtctctactaaaaatacaaaaattagccaggcgtggtggcatttgcctgtagtcccagctactcaggaggctgaggcaggagaatcgctcgaacccgggagggggaggttgcagtgagccaagatcatgccattgcactccagcctgggcaacagtgagattccatctcaaaaagaaaagaaaagaacacattattcaccagattaatagccatataacatggacctgaaaccgtgctaatcaggcacaacagctgtaattacagctatttcttggttgagtttgtgctagtctggtcatctttcaagttgcatctgatatttgtagtgaccagactggtgaattaaatgtgaaatatgatagaaacaaacccccgcaccctttaaaggtggcctcaatcagccatttcccttgaattgtgatattgttcttgattcactgtctttgcggtaagaggtgtagattcagggcttccacttcaatctgtagctcgtactccacagactaaagaactatgtggggattctgccaatggccaagcatgtgcattccagttacagatttagagactgcagaaatgactactgggtagatccatggacctagtacatgccatttattagctgatctcataggctccctttctaatggaagagaagcataacgattcagttatatgaagattggctaaatgttctaagtactctccaaacccagagctttataattctctgttactacagtgtgctccatctcagaataactaaatagaaaaggaggaagctgagaactttaaaaactgaggtcctgaatagatgaatcataagcctgagaggactatcaggatgcccgggactcactggaggtgggagtagagacactgtcctttttcttcctgttgacagaaagaagcaatgagtgacctcttttacctaccacagtgatgactattgttggcatatttcctatagatattcccctgccccttttaccataatttgtggctaatgaattgtctgtgggctatggaccctagagtctcagcagaattaatgagctctttccctccgtgggatccctctaccaccataccatgtcaacatttctacctccaatgccactaaaacagaggcacacctctgcctagactgagggggaaaattgttggcaaagaactcaatggcaaagaactcgatggcaaagaactcgatggcaaagaactcaatggcaaagttctgaccttggcttcatcctccctgcagagatttggtgggctttggttggtgcaaaccctctacagttagcagatttgggttcaaacatcagctctggtgcttactaactatactgccttgggaaagttatttatatttctttgtttcaacttcttcatattggaaggaagagaataatatgtagagttgtgaaggataatcagcagtgtagagtaaatgtttaataaacaacttggttggtggcagatggggagagccctaatttgtagtgtttgccaattttcatagtgtaaatattcctgccatggctgtctcaagccactgatggtttaataactgtctcacaaaattcctaaaaatttactaatcaagagataatctgagccagctccagctcatcacacacatgtgtgcttagaaaagtgccagatggtcagcattagcaatccctattgtgaccagagatgcagttgcccattcaaggatgcccattcctttttatttttttgtttcttcctgatgtacaagtggaggctgggcaccagttaagagctctgtcatggggaattgctggtaccagaagagatttttatttgattgaaggtaagcagaacctttgctctttggctgtgagatatcagtttccgcctatcctcaacactggaggaccagatttggagttaaacttactctaaaatcctagtcctagcacttattgactaggtaaccttctacaagtctcttgtcccgtctgtgactgttcactttttggtaaaattgggataattttatctctttgtagggtcactgtgagaaccagatgttcagggagttgtttatcaccatgctttgatggtagctactaacagcaagggtagctcatggtcactagactatcataaacccctttcaaaggacctcccaactccttccccagctcctaacacaatgctggcactttggggctcaagaaatgaataaatgcgtagaccaatgcatgaatatttcagaaggaaaaggagtaggagaaaaataatgagagtggaaaagacagagaacaaagagggaaagggaaacagtcactaagaaaggtgtaatctaaagagattcagcgatatagcagagaaaggaaaggaatgaaatgccaagataatgacaaagttagaaatgtagaaaattaattaggatgacacatgatggataaataagaaacaattggctattgtttaaggttacatgcaaagaattttatattacaaagaaaacaaaggagggggcggcagccaatgagcatgaggtttcttttgggagtaatgaaatattctggaagtaaatggtgttggttgcacaacttgtgaatatactttaaaccactaaattacacacttcaaaagggcgaattttatggtacgttaaatacatctcaaaaaatgaaagcgaaggcataattaaaaatttagaggccaggcacagtgactcatgcctgtaatcccagcactttgggaggccgaggcaggcagatcacctgaggtcaggagtctgagaccagcctggccaacatggcgaaaccccgtctctactaaaaatacaaaaattagctaggcatggtcttgagtgcctgtaatccccgctacttgggaggctgaggcaggagaatagcttgagcccaggaggtggaagttgcagtgagcagagatcgtgccattgcactccagcctgggctataaaacgtgactctaaaaaaaaaaaaaaaaaaaaaaaattagaatggtggtgacatcttgaggggtgacaaattgagaaaattgagagatcagggaggggcacacagaagcttctaagatacttgaaacatttgctcagttccttaacctagttgtttaaatatgtaacaatattttgaaaattaaaaatatattttaagtgagaaaagaataatgggaaaaacaggaagaagacagagacaatggcagagagtcctggcaaaaagggagatgtgatagagcttaatacaagatggggaccctgtaagaggaagacattcctgccatcctctgagctccatggcacgtttgtggtgtggcccaccatctcatctcctcccctcatggccttcctaaggtcctgtaagaccctgagtccttgtctctgacctgccagagtggcttcagtctcccacccccagccctcaactgaccttctatgccccaatacatctctattttaaggaaaaagtccagtcacctcctctaggaagctttccctgatatacccaaccaaattggtcagtcatcctacagaacctttactctcattcacccagtacattggtgttactggcctttaaattttggactctctttttggtggtgtctgaaagactacaagatttagggagagtgattcttggagtctttcgataatgttcctgtgaaccctggtgattttaacatgcttgtggccactcttgcctcctacttgtaagctactcatggcaaggacgaagcatgtggaccaatttccacccctccctgaaagtcagttggttcagaaacttaggttgctaaaaaggccagggcaaccaacctgatctctctataagtagggatatcttaaaacaaaacaaaatctctctcatagataaaacactgtctctgataagcttacttgcaaatgaaaaaatacaaaataaatggaatgtacagagttctataaaattcattcaaccaatagagcaataattgagcctacagagacaacttatcagaaaattcattcaatataccttacgagatcatccaatagataagagacaactctagaacagcattcagaacatagtggcactcaataaatttcccctgaatgaatgaattaatgaattagtgcatattttaatcagcctcctttgccctcacccaggaagtcagaggcaccagtgtgagtatccatctgctgtccagtacattcatggattcctcactctcactagacaatgtttgaccaggaagaacagggaatgagaaggagctgctggatggtgatgagccttggaaagggaggctgggcgagcagagacagaagagaaacacctacctgctgtgacctcacaaacacccaggctgagttttgataagacaggttgaatcacactggagtgacagcctcatccctccaggtacaaacaagaacaggccatggttaaccaaagctccacaccgggcttcctccttctgggcttctctgaacacccagggctggaaaggactctcttcgtggttgtcctcacttcctacctcctaaccctagtgggcaacacactcatcatcctgctgtctgcgctggaccccaagctccactctccaatgtactttttcctctccaacctctccttcttggacctctgtttcaccacgagttgtgttccccaaatgctggtcaacctctggggcccaaagaagaccatcagcttcctggactgctctgtccagatcttcatcttcctgtccctggggacaactgagtgcatcctcttgacagtgatggcttttgatcgctacgtggctgtctgccagcccctccactatgccaccatcatccacccccgcctgtgctggcagctggcatctgtggcctgggtcattgggctagtggagtcagtggtccagacaccatccaccctgcacctgcccttctgccccgatcggcaggtggatgattttgtctgtgaggtcccagctctaattcgactctcctgtgaagacacctcctacaatgagatccaggtggctgttgccagtgtcttcatcttggttgtgcctctcagcctcatccttgtctcttacggagccattacctgggcagtgctgaggattaactctgcaaaagggcggaggaaagcttttgggacctgctcctcccatctcactgtggtcaccctcttctacagctcagtcattgctgtctacctccagcccaaaaatccctatgcccaagagaggggcaagttctttggtctcttctatgcagtgggcactccttcacttaaccctctcatatacaccctgaggaacaaggaggtaaccagggcattcaggagattgctggggaaggaaatggggctcacacaaagctgagggagagctgcttaatgtgctttaaaagagaggagattctatgtgcttttatcagaaagtt

SEQ ID NO: 10863 - DNA, 6000 bp, Homo sapiens
aggtggaggggtagagcccttacctaaagaggcatcctctcgtgatacccccctttgcccccaggacttgctggcagccaggttctcctggcagaaagtggattcctggcccactgctgaggtctctgccttctctcagcagcagatcttcagactgtctggcaagggccagcctgagggcgatggtgagcattagatgaaataacacatatacagctcctaaaacagtgcctggctcaaggcaaatgctcggtaaatattggttcttattactggacccattttataccaaggtttagtgctattaaggatacagagtaagtgactgagatggatttgactgtcagactctaaaaatctgtgtttaggtatgtgtatgcatgtgtgtttatatcaggttgaaaaaaatgctggctctttccttatttcatcactcagaagatgaatgtggtcttgaactttgggaagtaaatgagtttcttagggacatggagcttggaaagaaacctgaactatgcgtgcaagagatacctgtcctggccgggctcagtgactcatgcctgtaatcccagtactttgggaggctgaggtgggtggatcacttgaggcgaggagtttgagatcagcctggccaacatggtgaaaccctgtctctactaaaaatacaaacattagctgggcatggtggcataagcttgtaatcctagctgcttgggaagctgaggcacgagaatcacttgaacccgggaggcggacgttgcaaggagctgaaattgcgccactgcactccagactgggtgacagaccgagactctgtctcaaaaaaaaaattaaaaaaaagaagagacacctgtcttttctagcaattccctttccttccctctcctcctctccactctacaacctccctctcttttcctgcctctctctccctcctgcctcctctcaagtgaaagatctgtcctgggccgggcgcggtggctcacgcctgtaatcccagcactttgggaggctgaggcgggaggatcacaaggtcaggagttcgagaccagccaggccaacatggcaaaatcccatctctactaaaaatacaaaaattagctgggcgtggtggcaggtgcctgtaatcccagctactggggaggctgaggcaggagaatcacttgaacccaggaggcgaggttgcagtgtcgccactgcactccagccctggtgacaatatgagactctgtctcaaaaaaaaaaaaaaaaaatctgtcctgtccactgacctggtcttcctgctagggacaaggttttcctgttgaagacaaaagagggccgggtggcctgctctcaggtctgcctccttggcgaatgggccttacagcaccttttcctcaggagcacacatcagttgctcccattcctatttctgaagacaatctcaataccacattttcttagtggaagctgagggcaccccacgctagggtcactggagaagccttgggcctaagggtaaggagcaggacccggagctctgggctgtagagcgaggtgctcccggacaggctggctgagctgcagcctgcatcctctgtgctgccacaaattcagctgcctattgggggtgtcggcaccagctctcagggcaggtggacctgggatgaatgccctgtttgcttttatgggcaactcacttttcatacctgagcctcggtctcctcatccataaaattggcacaataacacttgtgcataatactggatgagatcagggtacaccaagcattcagcagctcctggcccaataagtagtagctattgtctttgttttcaagggtttttgcttgtttgtttgtttgagatggagtcttgctctgtcacccaggctggagagcagtggcatgatctctgctccctgcaacctccgtctcctgggttcaagcgattctcctgtctcagcctcccgagtagctgggattacaggtgttaacagtttaccaaacagtatgccatccattcaaatctctgctcttagggagctcatcctttcctctgctctaaggagcctgagtgagaggccctggtaacagcaaggggaaagaaggaaactgtattcccgagtccatactctgtcctagcatcacagcaaactcagaggtttttggacccccagatgttaagaggagggacaggccctgagcttcctaaataccctcatatgcccactgtcttcagctgggctctcccagaagcagatcctgagataaggatttaaggacaaattatttatttatttttcatttattttattttttgagacggagtttcactcttgttgcccaggctggagtgcaatggcatgatcttggctcactgcaacctccacctcccaggttcaagcgattctcctgcctcagcctcccgagtagctgggattacaggcatggaccaccacgcccggctaattttgtatttttagtagagatggggtttctccatgttggtcaggctggtctcgaactcccaacttcaggtgatccgcccaccttggcctcccaaagtgctgagattacagacggtgagccaccatgcccagccaaattgtttatgtgaggtgtgaccccggaagcactggtaccctactgtgggaaagtgggacaagtgaggaaatgaagccaacacagggtgcattactgagcaggtaactgctgtgggaagctgggctccatcgcacaggggacctctgggagactgtggtacacacctctggatggggtatttatccatccactcctgtccatccatggttgacagctgctcttaggggtacctaccctgcactggctgaatgcaaaaatgttctccaagtcagagaaagccccctggcagagaaaacatggccttataagtactgggggcatttgcttaccataatagtgcttacacaattataaatgactccaataattatttaatgtttccctcctgtattagaatataatctctctgaagatagggacagcatcaccaattgtatccccaggacctagaatggtgtctggcacatggtaggttttcgatagatacttgctgaatcaatgtaatctggaggctgacaaattcatgataaagaccccagttctgtctgaatagcttctctatctcttcctttctcctctctccaccctaaacttgatatagcagtgcctaaaactcacttccagtatcttttttaaaatttgccttcttctagagtataaaagcccagtatttaaccttgcccatggttgcctggaatagagggtgcttttcccaccctcctttgcagctagcagtgcctatgtgactaagttctgagcaagaggtgtggaattgatggctgccactttcaagatgtgtctttatgggtggaggtgcacccatctccttcccattcctccttcctgctggttggaatttggatatcgtggctggagcagccaccttggatcatgaggtggaaatcttggaccaaaggatggtggaagctagaagacccaggcaccctgatgatcagggagcagccactccaaccttgggctgaacctctggccttgctttacatgagagagcccttggttatgccattgttgtttggggtgggattttctgtcactcccaggtgaacaacctaatcctaagtgatacctagaaggtccctgctagactgacctcttgggaggggagggaataaacgagtctcaggtggtggaaccagagcttgctggagaggagagtctctcctggtgaatggaagccaggggcccctcccactggctgtctccttccctgggctcaggcaggtccagccttcctcaggactttgagaagttcagttctctccccaggagtagctactttcacaaacttcctgtccctttagtcgacatgccccacggcaggtccgaggctgggctctgccacaactcatctttcctaagagtggcatcaaggttctttggtgggggatcctcttttcccatccccacttctcaagagcattagggaagatacagtcagtgccctcttagcattctctttccacttgttgggtgtaagaagggaacctgagggccctgcagtgtttaggggtgggagtggaaacagacaggaaagatccagagtccccaagaagcgaagcagggagagagataaagaaggcaggaacaaccatggacacacattatcacacatacacaggttacaagagcaggaggctggagctgcaagaggtggcagggaagcttccagaaaggcagaccccagcctcatccctccctgccctgcaatgctgaagtttccaggtagaggggaacctctagacccttgcgactgtcagagttctgtggatccatttgtcagtctccccacccccaaccttgactatcctgggcctgccttcaggacagaacatgggaatgagaagaggacctgggaaggggtaatcctgggaaaaaaaagttcttattagtcacccctggctctgaggatactttccaggagtggcctgccaagccgtgtgaccttggacaagtcccgtccattcctcaggcctcagtttcctttgagggaccctgaatgggcgggggttgctgtagctttcctcagctgggagacccgggaggaggtccggggtgccagggtgggaggagggcctggcttgtcgctgaaagccggccaggcgcactgtcggcgctcagagctggtggccgcctcctgcgcttcctgattcccagccgcgctcgctcggagagcagtgcccgctatctcctggcccgggaccggcagaggggtgcggcggggcgggcccaggggtctctggcggccggaagaaccgggaccctgccaggcccctcccgcgggcagggcggcccctcgccggctcctcccccaccgcccgccaccagcccgggatcagtctccgcacgcggttccgcaggtggcagcgatggcccagtcctgaactccccgccatggccggcgcccccggcccgctgcgccttgcgctgctgctgctcgggatggtgggcagggccggcccccgcccccaggtgagatccagggaccccgacgacaccgggggaggcgggtggctctgcgggctgcaggcgcagtgtcctggtggagggccccgggacttgaacgaaactccgagaccgctggcgggggcatccgaaagcctcggggggagtagggactggagacttggtgcccctgggctggaaggcccaggtgagggcttggactacagaggattccccccaaccccagcgaggcgccctcttcctcgccacccgggtccctctgcccgggcacccgctgccccgcggccgccctgcgctgacttctgctccgcttctcctttgtccccagcactttcccaactccttctaaaccgtgtcagcggccctggcacagcccggcatcctcccggactccctctgccccacagtctgacccagacccctctcccgcagtgcctccccagacaatccacctgctcaaagaccctgagaagaccctgggaggagctgagagggccagggtgcggagacccggctcctctccctttctcatcagcccccagcacagcctttgattcatggctcctggggccctgcggtggcagcttgtccttcccagtgacctcccagatggaacctaccccccgtcccctaccagcctctgtagcaaacaggcagaaggctcagtgcccccctggaagcagccaggcgcccccactcacccactctgctgacctcccattctcatcctgcactgacagcaggccccaagagaaggcatactgggacacgcaagaacacctgggctccttggtgccaccagagagcaggccacaggtggaccaccgcagcccctctctcttgcccttgttgcttttcctgccctgggatcctgggctagggacagtggtcagctgcttttgaagaggggagctgtccaaagatgctg

SEQ ID NO: 10864 - DNA, 6000 bp, Homo sapiens
tttgacaggacgacagagactccctctcacatgacaggaaagaaggaggagaaggctggagcacatgcagatggaacgtgggtttaggggcgagaagaagataaaatcctcatctggtggctttgattttctctgtaaaatattaggtgaggctggggaagagttgcatcaaccgtttgaggagagccaatgaatgtaattagtcatccaggatcatggaaaaacgagccggccagtgaatcatatcagggttgaccagctgtgtggaattttgtatttattattttaaagtgaaactaccatgttatattttatcaattctaagatgcacatgtttcaacctcagaatttgggatgcattctagcactgttccatagtttcctagtattgttggtttcctcgcattgtttcatagtttaattgccaccgttgttttctttatggttcataaaacaatgggaatatcataatcaatggcaccttacggtgaatgaggcatggtagatggctttgttctgtaattttatacctgccaaattcaactgcttgtgtacggacatggagagggcatttgtttcaggtttgggttttaaagatgaataaacttgagagaggactgtaaagttgacagtagctgtcaataacaaacaggcatattttggcctacttagggaaaaatacaattgcaatgtgactagaaaaattgcctcctgtggagatcagctattcattactggaagagtttaatctgcaattttggtccacatggctattctaagatgttttgccaggttaagatcatatcataaatttctcttgtaagctaaatactcatgaaacaacagttcagaattcctttatcaatcaccttttccaatagatgtccaatactgaatgaccacgagtcatatgctgggtgactattgaagaaaagatagggaacatgtgtattcattcatagaacatttaataattaccagctatatgccaagcagtctattgggttttgaggaaataaaaatacaatatgaattctttgactttgaagagcccacagtctgatttaaaaaacaaagaattgacaacagaagtattctttcatccaatcgcttatgtaacatatatttattggactcctactgagtgccaggcattgttctaggtgacagaaatacagcagtgacaaaattacaaagtccctacctccgtggtccttaccttctagtgagatacatcaattgaccaatagcacaccactaaacatgatacttttgactagtgatagattgaggaaaacagtgaaatgttatagagaatgacgggtgttaccttagattgaatgttaagagtataaattaagctatatatttttttctttggcacggagtttcgctcttgttgcccaggctggagtgtagtggcacaatctcaagtgattctcatgcctcggcctcctgagcagctgggattacaggagtgcaccaccaagaccagctaatttttgtattttttgtagagatggggttttgccatgtcagatctgatgacatcaggtgatccacatgcctcagcctcccaaagtgctgtgattacaggcgtgtgccactgagcctggccaaattaagctattttggccacagtaacagaaagcctaacagtggcttaagccctcgagctattaattatatattttaagagcgcagagattattgatcccagtgtggatttagtaattcagtcatgtcatcaaagatcaagagtttttccatgtctctgttcccccatttgcaacacattgatgttttcctcatggctgcagaatgactgccatagctgcagatactacaccctctcaatttccaaagccagaagagaaaaaggggtgggagaatggggacaagataacattttttcttcctagtgtagctgttttaattatcagggaaaggttctttctagaagctttcacaccccctagcagacttccccctaaaattcatcgaacagaaatggtggcctgcctacatgtagtttagtgaccagcgaagaagatctatattaccacaattcattcaaaataatcatgggtcatccaatctgagttttgggcaaggaagaaggcagtgtggactggggtaggtaaataatgattgccacttcagagaatgcttccctgaggagatgacatttaaactaaaacctagatgatgagatggtgccggtcttgtgcaccatgtcccatggtggcactaagggagaagctaggccagagtagatggccaggaagggctgacaggggaagaggcacttgaggacgagaatgagtcagccaggtgaagttatgggtagagaggggcggaggctttcaggctatagcaaaggccagtggagaggaaaagaaatgtgagccagtttgtatggctggagcaagatgagcaggacaaggcaggccacagccttcgtggagatgattgcagaggggatgatttggattctagcattacaaaatcagcaataaggcagatgtatgcaaaaggaccggtactcagtttcacgtagggctgtggaggagacttaagacagctaggttgaatctgactgagtacaaggagtcagccagggaacagaggtggcaaggatgtcccttaggcacagggcacacacggcaggcatgaaggcttggaggcttgaaacaatgtgatgaaagccatcagtacagcatcaccagaggatgatgtgtgagtcagagagtgaccggggatgaggctggagccatggctgggagccctgcttcatttggtttaggccagtacaagcatctgccttttcaaaagttgggagtcccagctctggaaataatagctgggttggcttcctgatttgtgctgtgcggggctgggcttggatgatcttcaagaacacttccactttttacattcctgatctctggtagatgctcaataaacctttactgaacaagtctctcctgctaccaaaacgttgctcatcagtgtaaatcagacgtgtcctttaaggcctggtctgtccctgtattctccatgaagtgactcctgaccaggccagcctccatcaactcctccattgttgggagtgactgtgtcagctattagtagagaagatcttgtatgtttttcatatttatgtgttttcttcttccaactagaagtgtgaactctgggaggttaggggtcatattttatataaattgatatatccacagatgcatggcacactgggcattttgtgtataaataatgacaatgcgactgattaggacatgttagtgtagactcaccagttgtgacaaatgcatcacctaccgcgagatgttgatagtgggggaggttgtgtgtatgggggggcagggatatttttgaaatctctgtacttttgcctcaattttgctgtaaacctaaaactactctaaaaaataaagcatatatatatatgtgtatatatatatgtatatatatgtgtgtatatatatgtgtatatatatatgtatatatatgtgtgtatatatatgtgtgtgtgtgtgtgtgtgtgtatgtgtatatatatatatatatatatatatatatatatatataaattttttttgagacagggtcttactctgtcaccctggctggagtccagtggcacaatctccactcactgtagcctcaatctcctgggctcaagtgagcctcctatgtcagcctcctgagtggccagggctacaggtgtgcaccaccatgcccagctaattttttttgtttgtttgtttaaagtagagacaaggtctcattatgttgctcaggctagtctcgaactcctggcctcaagcattcctgcctcagcctcccaaagtactgagattacaggtgtgaggcactgtggccaacctatattttttaaaagatagaattttcccatctgaggagcagacttgagtggatttcaagagggtactattcagccctcaaggggattcacagacctagaattagagaaaaatagcagcacagcactcacagcagctgggaactttcccatccttccctggccacttcctagaagatcaagactagctaaggaaacaaaatgaggaagggggaatgctgagattaaaattaaggggtgcctttcagtatattaggagaacttcgtgaagattttgaaaaatgccacactctagataaatatagatatagcttttcaaacatgggattggggaagctaagaagttcataaatacaaaaaaaaagagtttttgagtgtttcaaatttaaaaaaagatatgtcactgaccatgttgctttttgagagtctttgtccttgtatagggtaggttatgctgaggtgacaaatagctcccaaatctcagggagtaagaatagtaagaagtaatcctttcttatggttgtcatgtgttagcagggacctcttcttatcacggtcactcagggacccagtctcatggagtaactactattctgaattgctggcaccatgcagaattacttaaatgccccactgaccacaaggaggtgaggaatcacaatgctaccttgtgtttgcaactggagaccgataggaatgattagggaaccataccaccataatcctagtaaccagaaagccagccagctagtaccagagccccaagcagaggcacttgtggtttccaaatttcatctttaggctcaggctgatttgtaagaacaaatgagctacagccatgcatcacacatcctgtgctgccaccacagtcttaaatcccttgcccaagacaggagcctttgctttttgtgagagtccgcgtctgtcacctggtgtgactcatccattctccagtgcattgcccctcccactgcaggagctactcccatgcaggacttgtctgtcaggctgcagcactcctgcacatggggctgactgcctatgggaaccgcagggtccagcctggggagctgccattcggggctaacttgactctcatccatacaagagcccagcctgtgatttgtagcaaggtatgacagaagagagccagtaatgcccatatctccagctgccagggagtggggcaaatttgccggtgagtttgtctttggccagccacagtgagtagtcccaggtcctccttctccttccagtgacttcctttggagaggaatttcagagatgagcagccactcatgattttgtgtttgtgaggctttggtaatttgaggtttaattaataacatatgtagtgaataagtgaatttatacagtgaataagggaacatgtacagtgaataagaaggaatttattaactttaaggcactttacgtaataagagcacaagtctgtataaaaatatttttgttttcatttattcttctctgttcttctgtgctccactaattttatccaaagatcagaatacaggaaatgggaacctataaataacctttttttctgataatctccaaggtactaggtgtaaatgcagaagttaatgaacatttttatgattattttccctcatcagaccttgtcatgttttatctacaattttggcttattatgaaggcatcactagcctcaaacccttcttgaaactgagtaatatttttgtactttctcaaaaaatcctgcaccaacgactaacctatggcaatgaaaactcttggccttacacattcttcttctcagatgatactttctcaagaggaaggcagactttggggagatttctctgggttcttaagcttgtctccattgtgtcattctttgtattgtggggatgtaactacagttccattgttttttatactattctttaaaatagtgtaattgatgcttcattcctttcttttttctgattctttgtcagtatttgttgaatatgaattttaaaagtttagttttgcttaaaattgtttatcctttgaaatttgacaaaatgtgtttttccctcttaaagtgaacttacagataaaagtga

SEQ ID NO: 10865 - DNA, 6000 bp, Homo sapiens
cttctgaattatcttgtcatcccatcaaaggcccaagttaacaaaccaggctacatccctaacctaggaggtgagtgcaaagcaaggggttcccatatatgtcatatatgtgacatttcttttaaaattgcaatttgattaattataattagaaatgattttttcttcattaaaaggattctactatacagtctattctcacctagctatggttggaaatatattcacacttcaaattcttaagctactgaaattttttttgtccctgaaaattaagcaggcgtgtctgaaaatgcttttaaattagcctgggtgatttttagatgggagtgaggagagctgcctgctttacttagctgctccctctcttcaatcttctctctagttctctatcccaggacatcctatatgatatcagcagtatccccagatttcccattgtggcccctttcttttccctagcctgaaaagatcaaggtattatgataaataatagctgtgagaggcctcagggatgatggagacgtttatttacatttgagatctcagagatagacaaagatatatagaaaaatagaagtggagaaaggagccacagggagaaacagaaattcagatacacaaagacagagggacatggtggctcacgactagaagagagccacctagacacaaggacatgtgcagacacaagtcttccaatcctgtgtctcgatgtccctctggatctagagacagaaaagagaggaagacagaggaacccacatcgagatacccacattcatagggagacagagacagagagatgcacggagaggataagagatgcattgggagatcgagagaaatgcagaaaaaaaaaaaacccagagagatggactcacagagacacatacagcatgacagagacagaaacagagatagatgcactcagctatgtagagagggcctcccacccctcatcccaacacatccaggctccagcagcctttgtggctttctgtagcagtccagggccttgtataaaaagtgggtcttttccaagaagtgttacactgaaaaggaggtggcccagcttagagaaagacaaggtgtgtaattcagcatttgttggcaacagaaaagactgttctctggattccaaagtggcttaaagggaggagactctccatcggccataagggatgtacccaaatgggctcattgttcaagacagtgagcttataatgcagatgttgtaaagcctatgaatcttgctacctgtacattaaagctgtgatcttctgttcttgacagggttgtatatttcaggaatggcagagcccaaaggagaaatgtgctcattcctgtcttcttgcttctggagaatatgtaggaagctcacacatgtggtgctgatggaggagggcgtgatgtgcagaaaggatgaaaggctcctctgtctaagctgttctgtgctactaaacatttctcgtccatcaactgtacatagctacatatgtcatgctgggcagccacagcaaacaaaaagacaaagggggccacaaccgtggtttttgttggggcttccatctctatgctgttgggtcacatttgtcttcagaaagcaacctctgtctcatcttggaaaaggcggcctgagatttcacctggctggattctgtgtgttgctgagggaggagcctcatgaatagtcacaaagagttgggctgactctaagtaggacattgcagattatttttttttttcaaaaggaatccactgccagtatatccactttttcaaatttaaatagattggattgtcaacttggtttaggcttagatacaacttccttggccatgaaccaaggggaaaagcatagagcttttgagacagaaagatgaccattttcagttaaggagatggaagtctggagttgtgagtcaatgctaatcgaggactgagccagaggtagaaacccaagtgtgctggctcccagccctgtacttcctcttcaagaccatatagacactgaaagatcttctgcctacactgacaatgtaaggtcaatcctcaccaacaatatgcttttttgatacctgggattggagagaggaaatatcacatttccaattcagagctgctctttttcttaacctgtatgtaaacaaattcaacattcaaaccaggtgttacctgatagaacagtattgtaggtagaagctctttgaggaaaaaaaaaaaacctctttacaaagcaaggacatagatgactgcagcagcatctaactagtggatgaaggcaaaggggcaatgggcagcctttaattatcccaacaagaagtcagtattgatgacgtttcattacaaaggagaaagtggggctcaccttaggtatgagtgcagtcccttccttccttccttccttccttccttccttccttccttccttccttccttccttccttccttccttccttccttcttccctccctccctccctctctctctctctttctccctttctctttctttctttttttctccctctctctctttctttctttctttgtttcttattacaaataatcttcctataagtaggaaagtttgagcagacaaaaagcatcaatctgaagttaaaaaaaatgcatcaacctggagaaatagtcatttttcaaatggcattgcttatcttgggacaacaaaagcatccttcacaaataaagtcagagagtggttttaatttaccatttaccaatagatttgtatgttcttttcaagagaaggggtgagatagacatagtcctggttttcctcaatgcaggcttaggtacaaagagatgtcacttacccagagtccatatattgaagtgaaaatggaatttcatgaagcaaatatagttataggatggtaactctggacaaattttataaaagatgaactccaattgcttcatttcacagataacagctctgagcactagggagagagggagggattggcctagcatttgctttgtgtcttgagcagtcacatctattatggaagtactcactactcagctatactcactccctgagacaggatggttggaaagaaaccccaccttagcttcatcattaaccaagaaaccccaaggatgcttagagaaaaactctggaattatttgggaattcctggaagaagctatgccctctctcctgcatcccaaagcccactctacaccatcttgaaaaatgtcaaggaactgcatggattaggttgactctggatgaccctgggtagagacacattcagtttcctgctgacaccgcaccaagaaagtgatttggtcaggtgactctaggagaaattggtactgatagtatccaaggcagatttttaagtatcagacttaatacataatgattcttgggaaagccatttaaatccctgagactttaagtggataaatgtaggtaaagtagtatagtacttggctcataataattgctcattcaaattcacatgttagttttagttgttttttttaaattagagtcctgtgaatacatgaacccacccacccacatgcaaacacaagcaaacacacagccatgaccccatgcataagtttggctgaagacaccctcatgggaactagttcactgacttccaaattaaagagttaagcatttgatttggtctgttcaacattaggggtatcagccagcaaaatctgttgagcttaccattgaaaaatcctttcattcattactgtggtcataatacacagttacctggccaggaaagagtacacatcacagggatctgctcactgcacgtgtgcctgagctctccctcactttctgccttcttcaagaattcttccctgattggtccaaccagaagcgctgattctccccacctgatttcctgtaattttataatctatgtccttcacttttgtgttatattgtttatttccttttggtctttttgtgtgcatatgtatatgttttggggaatggggtattcacttttgttactcactgtgttactcacttttgtatgcccatagtgcagagcatggtgccttgtacatagagtatgttcggtaaatatgtgcaataaaaagtcctttgattacacaatggcttgatattggcttttccacttcccaaatgagccatttcttaactactgacctaaatggagctgacccatttccataaacagcacctccttgaccttcattgctataaaacccataacaaaactgcctcctcacttacctctccttattgtccacatttctcctggaaatatctaaatgagggtttgctttagatctttggggaaggaaggcctgtgagtagacaacagtagaactaggatgtgtgggactgtttggtggttagcagaacaatgcaaactggctcccctgtccaaagtcaaaccgtgtgcattccccacaagtggacacagtgtcttctgtgtctgaattaccacagtcatgtagtggctcagtgagaactccttgtcccggtcattacaaaaataaaacagaaatctctctgttgctaggttaggaattagatcacaattgatgcaccagtttatcagccaatttcctccaagttcaacatcagaacaggcaaaaaaaaaaagtatcagcctttaaaaatcatcaacaatagtggcataaccttgcattttatcaccctccttccaattatcccagtgcagcagatgcaagcagagtctcatgcaatcatctgagataaggatgaagaactgaaagacaaacaagtgactcactttaatggatttgcttcagacaggagaaacctgtaatttctcttaggcgtgcttcatggacccatagtggagtgaatcacagacttgcacaagccttgaaactgtgggtaactttacagttctcagatcggcttctcgcaacaggcagtcagttctcactgggccccttggactcccatttcaaaaatggagaagacagatcacagccactgaccagggaccgtgggaggtgccacgtgatggtgaggcatcatgctagggagctgagctctgaccttcctgctgggtgattctccacctctgggctgctagatctacttcctggatgccgtgagtagatgtcctacaccagcaccattttcctgttgaagaaaggcttgtttttgcacatattccaggagggggaaatgcgtgatatatgatggtattttctggaatgcttgattcttctggaaacttctctaacatgatttagaaattggctagctcaaggttggagtatttcctaagcctcttttacgtttgtttttctttaagagttgtttgtcaggctttaatggctcactcctaggagtgaaaatgcaaagtatcctgtcaggcaaataaactcactgtccctgcattgtccccttgcttgataaatttcaatacctgtcttttagactgaatgtaaagctggatgttgttttaaaagtgttcttgattagtttcttcttttagtgagcctgaaaaagctatcattgtatcaatttaaaaaaacatttctccagttactgccaaacacgtttttgcaaaggcatcttcccttgtttcaagtggccaattctatgctacttgaaggtctatattccttatactctgaagacagttgtgagaggtctaaagtgttgcatcattaggtgctgtttatttgtttgtttgtttgtttttcagtgtcagcacatcatgagctttcttcatggaccagaggcaattgctgggcgtataaatttctttaaaattttataagtatcaagatagttggtgagatatctagatgtcttctaactctgaaattgtcttccaactctgaaattatgtgattcttgaaacctatcagaatctgaatccagattccaatttttagaagagatgctgggctacaaacagattggctggaagccatctaaagtagctaaagatgagatgtttctgattctaatagttcttttcta

SEQ ID NO: 10866 - DNA, 6000 bp, Homo sapiens
tggggatccttttgcttccaaactttcttgggaagcggatttagtggctggcttttacctaacaataattggtaagcttccttaattcttctgtgcaaaggctgcatttagaaaattcatgggctgatatgttaattttgtgaaaggattctgatacttaagtggatagtttagtggaggcgaagagtggggaaaggcagaagatggaatggcattatggcattcaataaatgtttcctagaaatgactctttattatcattattattaggaataaaattccattgataatccaagaactcttacagcaaaattatttatccatttcattttggttactttgggagtagatttactttctgaataccaaaattaatgataatgatattttatttaaacagagtgctttttaaataatgtttttgacataatcataagttttaggttgagaatgggccttaaaaataatctaggtcagtctcctgttctcacaactgtgcaaaactcaattgtgctattgtgctatagtactatagtaatggcagaaacactgagtttacttcacctaaaagtaaagtcgcatcaaaatagctaagccattttggtgacagttgaaaaatgtgttggtgataaatggaagaaagtccggggtcaaaagatttttgtgcataattgacgaaagggtgcacctgcttctagactgcatgatctcattcattcagtagccacatgtggcttttccaaattgaaagttgctgtagtgtaaatactcaccagatactgaaggctcagtacaacaaaaagtggtataaaatatctcattaataatttttaaaaattaaatacatgttgaacatacaacattttaggtatgttaagctaaataaaatatattattaaaattaatttactgtaaattttaaatttataaattaaatttttactttgtaaatttttactttgtttaatgtggctaccagaaaattttagaatccatatgtggctcgcatttctggcttacattacatttatactggatagcactaatctagacagttaggatttaatttaaccacctatttaaatttaagaaaagaaaccatacttttcttaaatttaaaattgttgttttaactttgggtgaccagtgtgaaggtgggttatgtctttaggtttgtttgcctttaattttttcagatgttgggtcaaacttgctctctctctcttttctctttgtttctatctttctcttccacccttcttcccttcctccctttctctctttttctccctctctcatctatttattactggctaagaatttcatttaacctcctgaaagtagcaaaactcattagaaaatacttgatatccctctatggtcagtacttgaggcaaaaggaactcatgtgattcaaccaaattctgctgtaaagtgattccctgggtctttgtctttattgttgttagtgttttactagtttaaattctgtttcttataaatgagtccccatctcttttcaacataaatatatattgagcgcccactctttgccactgttttaagttgctgggaatagagcagagaataaaatgggcaaacattctgctggaacagaaactgtcttatctctgtaaaatccacattgcatttttattaaacttaagtactttcaattaacagaaaaggcagaaaaataagcaacttgatcaattgtatttagcatagctccatcactttcaaggaatgaattaaaaaagtaacatcaataacctgacaaatctctccagacaacacaaaacagagaggcctatcagtccattcccaatcttaagcagggaggattgcaggaggattgcaaccagggtgaggaaatcaggagaatttcccacctgatacacatggagttggaaggaaagtccacaatcatattccagtgggtttgctgagatggagccagaaaaacaggttgaaaaagagtccctggacagggggagcttcaggaggatcagggcactaggaggtggagccaatggtatgttagagaacagtcacgcagggtgaggagaggggtcgactggaggggtttggactcaccctagatccacttcttggacttggccgtgtgtctggttttcactctcctagaataggctagtgtagatgttgcaagattccttttttttttggacatagagtctcactctgtcacccaggttggagtgcagtggtgcgatctcggctcactgcaacctccatctcccaagttcaagcaattcttgtgcctcaacctcctgagtagctggggctacaggtgtgcaccaccatgcttggctaatttttgtgttttttagtagagacggggtttcgccatgttggccaggctggtattgaactcctggcctcaagtgatttgcccacctcagcctcccaaagtgttgggattacaggcgtgagccaccgcgcctggccaagatgtgtgtgtccagattgcttttaaggagccagagtggaataaacattcttggtgggctttgttaaatactagaagtcttaagagacaatggaaagataacaatataaatctgagtttgaaatacaggagacataaattacaaacccattttctaccttccacacttttactattattgtaaatactgagtttattaacagttaatatatatgatatttttgtatccataaatgatataggatttgataatctaaaagtgtccccactttggtctttatcttcttaatctggttgtcttttcagtaatattaagaataaatttgctttttcctgacactcatctataacatatatatattgcttgttagaataatttacatgcaatgaatagagaggtgactattttttgataatgctttgggcactgggtgaaaccttatgaagcagggtcagtaaagaaaatttaaggaaggaaaagtaagaaaacaaatattttcaaaagagatgtagacagatgaaaggtgtttcaatgagccttgtgtatcaaacgaaaatggatacttgtttttactctttttggatacaaagtaggtggcattaagtttatactttttcaagccacgttttcacattttgctttcctagctggtttccttgagtgagacctgtttcattttagttggtttgctctggaactccgtaatctcttttatttttctcttcttctgctttatgaaagctaaagaggttttaatggaccattaagcagcactgactccagggagtcagaatttcctaagagcacaatgcagttagttcctggtggtttcataccatcagctgaatcacacatttctttctttgcccccaaaatgaattgtggtggagaagtagaaattaaaatagaaaactctgggtttctcctgttaatactctccttattccttactactaaaggcagctgtaccagattctcatttatacacagctacactatgaagcaagaattcctgaagaaatctactctacatgttaagctatggaagtaggtgtattcttttcttaaataaagtcagtagggattgggtctttttggatttaaactgggtttgtaagaactttcgaacagtttcattgtaatgccaaaggcaactagtcattaataaaaggatatgaaaaagtgggaacacacttatggcattgttggtaggttcggtgggttgagggtcactttctctccccttggtgggagggacagtgcccaggttctcgattgtcacccacttacccttgatatctagtccagtagcagctgaaggctgtcctatctgccagacactcagtgtccatgtctcccaaagaggcggaagtcctggggcgtctctgggagatgtccattttcttgaagggagttatgccagtcatacctggcctctgcctctcctgaacactggtgctcccttaggagttgacagtgatactgaaggcaccttctttggttggcttcatcttcagaatttatcaagagctaagggtttaaccctactgatcagagggagggagttctataaagccaataatctataaaaatggctgaggaaagtactccactctgggggccaggacaagaactgaccattgggattcccacactttcctgagcctcgcggggaagttagcgatgcctttttctgggtaagttcagtcttataatccctgactcctgccccattggcctgtcactcacaactcatgctttttatttcatcttcttaatttagatttttttatttagagtcctctcactaccctctaaatctatggtgtccatttttgaagttgagaagtgtttcatatctgagtgaactcgaaatcttagttttaacgattggaatttttatttttccttgtagggattctgtccacatttggaaatggatatgtcctttacatgtcttctagacgaaagaagaagctgagacccgctgaaataatgactatcaatttagcagtctgtgatctggggatttcaggtaacacaaccatgctgtgttttctttgtgggtttaaactactccccattctaaagtactcactgtctcaaacgtcaccccctgacatctcttcccttcacatctccttccactcttcgcttcacaaatcaactttcagagttttgtggtaagtcaatggggtgctgtccggctgacaagattattcatttaatatttattgagtcttttctgtgtgtcaggcatgttagatgctgaaggcacaatttgaaataatatgtgatacctcagatgtctcaaagtgtagtgggctaaatgattcagaaatcagaaatcaggaggcaaatcccaggtcagtattttaagcttctttacacctcttcaacccttatggaagtctgattaaaataaacatcaacaaaggaatcttgaagggtaaatgacagttgaagacagttgaaggcagttgagaggtgaatgtaggaagaggaaagaggtgccctgctgatgatatatgtaatcatgacttagtgacatatcacaagcataggaagcttctggttcagtggtcctcaaatgcaactcacaaaatatcatctggggaagttctgaattaagtcgttgagagtgttacctgggcatcaggatatttaaaatgagaatctacaggtatgttaatgtgtggccaaaattgagaaccactggcttctttttcacttctctaataacatggcaaggagttggaaaaaaatttctccttcactataattcaatttaaaaaatatgaaccattttaagtaaatcattcttcactttcttctatacaacttcagagttgcttagatggactctaatctgtctttgaatcccaacatctgctatttagcttatggttttaggtcattagagtagggtaatttgtttgaacagtacacagcagctcctcttaccattagaaacttgttagtagtttcccgtcaaaagcctcctttaaaaaatatttcgtgtctgggcacagtggcttgcacctgtaatcccaaagctttgggaggctgagatgggtataaagtttgaggccaggagttcaagatcagcctgggcaatgtagtgggacttcatctctacaaaacaaatttatccttgaagtctgggtattgggtaaaactaaacaaaacaaataaaaaatagctgggcacttgatcaagttcaggagttcaaggttgcagtgagctatggtactaccactgcactccagcctgggtgaaaaagtgagaccttaattaaaaaaaaagagttttccgatatttgtttctctcttcgcaagtggatttttctgccgatctctaaaaacaaggctcaataataatcctccgcattctgagtcactctttagcacacagcagatgtgtgcttactcagagtttggatggtcttggttatctgggaaggctttattcagtatggacctgcataaacattatgaacgcttatggtgaatgcacacgcacatta

SEQ ID NO: 10867 - DNA, 6000 bp, Homo sapiens
aaataccatatgatctcattcatgtgtgggaacttaaaaagttgatttcatggaggtatggagtagaatgatggttaccaggggctggaaagggagggggaagtgaagagaggttggttaataagtacaaacacacagttaggtagaaggagtgagttccagtgttcaacagtacagtagggtgactataattaacaacaatatattatatatttcaaaacagctggaagagaatatttgaagtgttcccaacaccaataagtgataatggtggctcacgcccataatcccagcattgtgggaggccacggcaggaggatcgcttgagcctgggagtttgagacaagcctaggcaacatcgtgaaacctggtctctacaaaaaaaatacaaaaaattagtcaggcatggtggtgtgcacctgtagtctcagctacttgagaggctgaggtggggggatcacccgagcccagaaggttgaggctgcagtgagctgtgattgtgccactgcactcctgcctgggtgacagagtgagaccctgtctcaaaaaaataaaaagtaaattgaaataaaaaaattaatttaaaaatgtttttaaaaagatagatgtttgaggtgatgggtactctaaataccctgatttgatcattacatattgtatgcatatgtcaacatttacatgtacctcataaatatgtaccattattagcatcgattaaaaattttaaaataaataaattagataagacttttaaaataatgctaagtccttttatcatttattcttatagtttgccatctgaaactcttcaactaggaactagttacattagagaatgagagatcagatataaggcctcaaaacctcacatgtgcccagggcttacggagggcccaggagcaatttctacatctcttttttgtctacatgggttaatttatttgctccctgaattgttattattaaaagtaaacaaaaaggaaaaaatggcatgagcaattcctaatgaaaatcaaattagctttagtgagcccctaccattccaccattaaatggataaaatagacagacagtacaagaaaatcatgatttttatttttaatctgactaaccacagttctttagcatcctgtatgtgaaattagtatcatggttacttttcccagttggccatttggcaggggatctaaatagaaaaactaagtatggatggctatctgatcatggaatgtcaaggaatgatggatttgacttcacggtaaaaaaatacagacattcaagtttccccaaattcttcctatgtagtccactgggatagtatatcttttctgcaagtagaaagcattgaaacaaagatcccataaacaaccacctaagctgggcacggtggctcacgcctgtaatcccagcactttgggaggctgaagagggcagatcacctgaggtcaggagttcgagaccagcctgcccaacatggcgaaacccctgtctctactaaaaatacaaaaaaatagcagggtgtggtggtgggcacctgtaatcccagctactcaggaggctgaggcaggagaattgcttgaacccgggaggtggaggttgtagtgagccgagattgcgccatcacactccaacctgggcgacaagagcgaaactccgtctcaaaaaaaaaaacccacttaaatgaagtcattgtcttttcacccatttaatcaggccttcattataagatatgtgggtacaattattatttttgtgttagagataaggattctgaagtatagaaaagttaagttactggccaggcatggtgcctcatgcctgtaatcccagcactttgggaccaacatggcaaaacggcatctctactaaaaatacaaaaaattagctgggcgtggtggtgtgtgcctgtaattcccgatacctgagaggctgaggcacaagaattacttaaaaaaaaccccgagaggccaaggttgcagtgagccgagatcatgccactgcactccagcctgggcgacagagtgagactgtctccaaaaaaaaaaaaaaaaaggaagaagaaaagttaagttacctactgaaggctcttactcccaaggccacacttttaaccactatgcaaagtgcctctccttttctctgacaagatagtgaagaaattaatagtcctcagtcctttcataagatataaaaagaaaacaaaaatagtacagcttttaaataactcttcactgtagcagttttcacaaacaggtctacttttagtataaaccagtatatataccagaatgttccaggcaagtggttttaactatttcacacttccatttctccatgttacaataagactaccagtttttacccctttcctacttcatataagtgtatgaagttgagtaatatgatgtcatcaaacatactttgagcttcttggaaaagtgatatgtaaacacaaagtagagtgtttataaaaacagtgtcaatgtggtatgtatccaatgtaaaatagatcaaattattttattagagattcggacaaaaataactctttaatcttatctattttttcatcattttgcatactgcctgtgtctgtggctttcaagggcaatctgaaagggaactaggtctgatacgtgttgattggattcgcagtttagcattctccttattgaggaaatactgcagtacccaagatcttggctgtttccaggttttggaaaaatctcaggtcaaaattgtgttgccagatgggattattacatagaggaaagttggctgtgaatttccatataccaaaggccatcctaactgtcttttatgaaggacccaacaggcttttattataattcaaaaatagccaggtcaccctaggactttttccagtgttaccaaaacatcacttttactgcccaaacggaagtaggccattacctcacagtagaaaataaaagaagctagcttgagaccaaggtagttttaaaaggcatgaaggatgagaaccaccattcttatttagtggctctggacagcgtcacttggaaacagaactgcctcatgcacagataacaatgcctgacacccattacactttacatgcacgttcacatctgccttttggataaagggcaagaagaaaggaacatttaccattgagaaagaattagaagccttgttagtctccttttaagacttcttcacattccacatggattaactgttagggagaaaaacactgcaaaaataatcagcaatgcatttcggaggctcatcagctcccggctgacagctcacgttagttggatgaaggctgtggataggcttttagatgtgctaacctgtaattttgtttctagagtggcccaaagtggaaggagttttcactccctctcaataagccctcttgtacggttgtgacctctggcctatcataggtttttgacgataaaggagagcccgggtttttgaggttaagggagagttccctgacatctttggggtgaagaagagatggagggagcaaagctgccaaagacctcctgtgacatttccactagtatccacctataagtaagtgctggactatgattccctggggagatcagtggctctaaagacaggcccctgggctctttcctggctctgactcagcttcaaacctgccgtgcaactgctcagagtctaaatgtcttcatttatggaactgaaataatcctgctaagattactttctttgcttcgtgatgtttgcctgagaataagtagctgggactacaggcgtgtgccaccacgcccatctaatttttgtattttttgcagagacagggtctcaccttgttacccaggctggtctcgaactcctgggcttaagcaatctgcccactttggcttcccaaagttctgggattacaggtgtgaaccatcacactcggctaaaatgttttgaaaaatggaaacattgtacaaatgtgagatgttgtgcaacatgtcactgaaacacggtggtataagagaagttttgggaaccagcagaccagaattaggcctgagaaaatcttacagtaagcagaccagaattaggccgtctgagaaaatcttacagtaagcagaccagaattaggcctgtctgacaaaatcttacagtaagcaggccatcttcccaggccttctcttttctccagataatgaagaaggctttttaaaagcaaagccaacttgatttgttaattgatcatccaacttcttaactgtctttttctcatggtaaaataccgagaacattgtgggtgaggagcaagtcgggaggtggaacccacccccgcaccctgcctccaatagattgtatgtgtgggtcgctattgctgggacccacgaaggctgtggattgaggacacagggtagaagtgggatcttctgcaggtcagtgtcagatgtgtctgtgtgatgtagtcatgggagaggcgcgagtcttgggcgggtgtatcttaggggtgtggaagtgtctgcaagggcctccgtggtatgtcatcacattatttatatcatgggcatgaccctgaacgttcacccgagagtggtgagagaaaggccaggatttaaatcagtcttgacagcgcagatgaagtttgttattgttttccgcccttcccgagggacttcggaaatggccccctgagaggtgaattcttggaaagaatatgagggcggttaaggcgtctctgtctcaaactctccggattttttgcagctaccagggactgcgagggtctgcgtcctgggtggaaggaagcggcgtcagtcaacttcctcgcagcggcggcagcggcgcgggctgcagcggagcgcgcgggtctgcgcatcccgcccccgggtcgggaaggggcggagctgggcgtcacccgcccccggcggtctcctcctcccggccgctcccccgagccgagcccgccgcggtcacagccacccgcgggaagctcgtggccgggaccccgaggcgggagcgcgggctgggccgggctgggctacgcgcacgggctcggccgccgcccctgccggtgagtcccgccgcgggaggcgcggaacgggtcgagttgggtattgggaccgcgaggtcggggagccccggggcccgagctcgggaggcggggacgtcaggatcgcggcgttggggagtcctcgcaccccgagctcagaggggaggtccagagtcgcagcgttgggaacctgaggccaggggccggagtttagggccccgatgttgagtctccgaatccaagcccggaaggggggacgacgggttaggatgctggggagccctggagctctgaacggctgtagtggggtggccaggactgcgatgctggggagtcatggagcctgagcctggagagctggcgggggtgtggggaccgcgatgttgggaaggctgagcccggagggcgggagattcaggaccaagacgtgggggagtccgacagggcagaacgaggggcgtcctgtccgcatttgtggggcgccctccgcagggcggaggggaacggaacctgggaggggagtgcggaggagaggaagcccggggcggtagggagagcccgaggaagggcagcccgaggtaggggaaccccggaaagagtagggtgggtctaggcatgtgctttcgccggggaaagatggagggggcttctctgagagggtgggcgcgaggagcggagttgtgatgggaaccgccggcagctggctaatgggcggatgctggggcttggctggatgggaacgccgcggtggggtgtcggaggtggctggtggggctggaacgctgggaacgtctgtctaggctatgagaacgcagcgccctcggtggaacagggtcgtagataactcgagagggaatctagtctagggagcaagaccgggcatccccagacggaggcgggtggggacctcgcactcagcgcgcttggggaatattcggagcctgggtttgggggctgctgcaccttgc

SEQ ID NO: 10868 - DNA, 6000 bp, Homo sapiens
ccttaatgaggtatatacttagtgtcagtttcgtgagtaaaaatgaagaatcttgatttctagtataattgaaatttcagggattaaagataatggtgtaagtatagtaactttatatgagaaaataactagctgaaaaaggtcaaatttgggggtgaatgtatgttcgattgcaaacccatattttgaggttttaaagtccatattttccaagatacttctacagcacacaaatatgacattatgtgttacctacttacagcatttccttaatatcaccaatgaaatcttgaaaattgatggccaaaagtatttaccgacttttttttaacttgtatcgttgtatagggaaataatgataaaaaatggaaacctgatgcaactgggatttttgtaaccttgactttgcctagcatggaataggactacacttgaactaacccaggatagctgttctatgacatctcccttaaccccaagtctatccctttattttttagtacttcaatgtactttctattctgggatgtccaagtagaaaatgaccaatttgtttttttacatagagactagaggatatacagcttggtttctgagagacttccttttttaataataataaaataatgataataaacaggagacagaggagaagaagttgtttaactttatagtaaatatgctaatattaaggataagttctcataacaatgtaatcttgtaatattttgatcatttaattaacattccaaagctttgtgtatgtgtgtgtatatatatgtgtgtgtatatatgtatgtgtgtacatatatatgtgtatatatatatgtgtgcatatatatatatgggagatactaaatactaaatactaaaaactaaatactaatactaaatactaaaaaattaaggcatatttaacaagaaataacctacaaacctatccatgcttcttaaagccttactgaaaataacaagtcacagagtttagaatgtggtaatacagtaatatcagaaaaactatgacagaaagaaggaaagagaaaatactttctaaaattgagtaaacatattctagaaacattcttatttgagtatgagaattctgcaaatgatactgaattttaagcaatgatcctggattatagggttattctcaaagtggagggactaaacttagcacatacagacaaaaagatgaaacagaaataaatcacacttataacctcatcattccaaagtaatcttaataaaataatagcaggagagataaatttgaaaggctttaatattagatacctgggtcaatttaaaatgccataccagactatattttgatgtgctaacactgacctctcaatagttcttctgtaaatcatcaaggaaacttatgtaataatcaatttatacaattaatgtggtagttttggaattaaatgcattaccttataaaagagaaatacaaagcaatgtagtgaaacttcccaagcaaatatatgtgtatcaactgaaatacacatatacatatcatatacatatatatacacacacgtgtatgtgtacttacaaataatgcgtgcatacatatacatatgtatgtataaaatatgtgtatatgtgtttatatatgtaaacataaatatagacatagacttgtgaaagagaccaatgaaagcagataattataatttgaaatggtgattttaatatgtattcagtcataaaagtggaccaacatcaatagaaaggaaaggacagagagctgagggtgtgtaaactgctgctctctttttgctgttgggtcaacatgtcagcaatgctttcatatggagcagcttgcagacatgaaacaaggtggttcctcctttctttgcctttggattgtgctgttgttagtgtccagagaccagactgtccatatagggttctttttgtgattctttattataatcccctgaggaagtcagacgagcctggggttactggagacagtgtcttgcttggcgtagttatcatccacaaatcatctgctataaatatatctcagaaggatcatcatcaggccagctcagtagcctgcaatttatgaaggttatgagaaacaatgtgaagggtgaagcgctttattaagggtggctttcttttctgaccctgccctgacttctacttgaatataaatgatcctgggagtaagtgaacctttccatttaggatttaggcttttaaattgtccctttcagctgttattcttatgccactgtgtcatgactttaagaatttctaagaaacatcaaaatcagtgttacaagataatatgagaaatcactagatgcaaaatagaggtataactgaacctcacattacattctttcctttttatgtataaaccatccaaagcattttttcctccgtttttattccacatctgtcatgcttttttttcctctggataaagtaacagaactgaccaaattgccttgcgaaaatcataattacgatctctagggaagttgaaataaataaaatgtttttctcctttgtgttgctcaatgttctttgtttttaaaagaaaatgtgttgcttaaacggtgtttcaaaatttgttctggacataaaccctaattatttccttttaacatttccttaaatgaataaaaaatattgtaaagaaccaaaatgacacaaaaccaaaatgccacccaggctgctctcttgccggtgatttgttactgggaaaatagttaaagcctgctggggaattattaactgtttccccttacagtgtttatcccaggcattcgtttaagacgggaaagccttgaagagggtcactctattaatatgcattaagaagtaaaggaccaattttaatatttcaaacaactccagtggataacagaccataaacttcctgttttcactatcaatctcttttaaaatggtgttcttggctatccataatcgccccaggggagagaaacaagcggaggaaaaaaatgcaagagtgaggggaacaaatgatggaaaattgctttattcaacttcacctgccgctcgagaaactcacccttacgaagattccagcactttatatgaattacccattatggtttcctcccaccacatcactgcactattttagcacttgttttgcaaaccaccaactgcgtttacaagtagaaacataatcaggaggcgaatgaccttttgtagcatgtatctgaagctggtttatcagacacttcgtcagccaactgtccaggaggcaaaatgactatctatgatgatagatagacagacagatagatagttagattaaaaggtggggaaacatcccttttccctttttcctttctatataatctggttttttctcttcaccccttttctcgcttcttcccaccccgtccccaaacctgttactagggaaacttgaaaaagaatcagatacattaagactacaaaacgaaacaaaagtttagaccccgaaaccatgattccattgccaagcacaaagcaatgcaagagcccaacgtcggtcgccgcaccgcgatcctgacaaagcctgtatggagccagaacaaataagatgttaattgcagcctcgcagagaaaaaaatactattgttccagccagagacactcagcagctcggtagctgggatgtgccccctccgctgcggactggatcaattctgaatcccggtactgaaatgacagctctctggctgcgacaggtctgcgctgaaagaaagagaaagacgatcaagtccagcattcacttcccacccttcagagtcgccttcccatcctccgcacccccctgcctcgcctcccagtgagtttctcttacagttggtcgccgccagccccagcggtgggaactgaggatgcaaaaacctcccagacgcagaaaataccgctttcgggacgtgcttgggtttgagtagccgtgacgtgcaggcgaaccgcggccctggctggagctccgtggagcccccctcccgccagcctctcccccgccctcccgccgggactccctcctctcccaccccgcggctcccttcgccttctctctcacacacccgcccgcgcccccggcaggcagaactccaggaagtcgcagcggccgcgccgcgcgagccgagcctctggcgggcggcggggcgcaccgcagctgtgcataagaagggcgcgcggcacccgggacgcgcgcgcacacgagcacgcgggaggccgccgcgcggacgcgctcccgggacacgcgcaccccccgcgcgcgcgcccaagggagagcgagcactgcgcgccggcgcgcacacccgagacagagctttactatctcgctccctctcgcgcctccctcctcgctgggcattcaaacagctttccgacatcaccagccaaggatttttttccccgctctccttagtcgccgtccgtccatcagtacctgcaggggggaggaggaggagggaggaaagcggaaagaggaaaaagcataagcttgagccttccgatccgaccacgaatactcctgtaataaacccaccgccccaacaaatctgccatagcagccgccgccgccgccggtcacttctcgtctcagcgctttctttgcttcttggtttgttgggggtagcttttatgaaacaaatctttgctattaagccacttacattttggggggttccttagagtctcccttgggggggcttctccctccctttagcccccctcggtttggaggttggattcagttggatacggcgcaaggttctgggctcctgctggcttttttttcctctctctcatcgacccccctttggttcccaccccccaccttttgcttttcgtatgtatgcatttttaaaaataaatcctgattttggaagctgagccggggaaaatgggcaacggtgattgggaccgaaggggagtctctccgtcactgttgctgggacgcgtgcctgtgctggtgtcttagagcaagagcctccctgagctttcggagtggaaggtaaggaagggggtccaggggtcaccttttctctgccgggggtcgccaccgtggagctttgggcttaatgtttgagaagggaggaaaatgaaaggaaaggctgttgctggcggatggggaggctgtgagcagatccgactgtctgcatttacttaaacgccgcagttgaaaagttagagaagtctggttttcaagagatgtgctgggtcagaaggaataagcggagagacctagaaaatctggcagttttgtgtgattggggtaattttatgaggggaaaattttaggttaaaaggaagttaagagaaggcagtgggtcttctattggggggaaaaatctgtggagtgatggcgccgtctatgttcgactaaactaaagtgtcacccagaaaatcagttttgagaatagctaaactcaatgctggtttgcttctcagcaagagataaataaataaataaataaataaataaataaataaaacatccttgacacctccgtggccagcctttgcccccgcccccaccccttctttaagagggaaacacggctttttgaacgggccctgcagtccaaaggggggtgagggtaatgatttattttttattatttagaacaaaataagactgtgtactccagactgattaaaaataaagagcattatattgagtgcgctctcttgagcaggcattaaagtgaattcagagctatttcctcactctctgatcattgatgagcacggcattgcagacatgcactgtcaaataaatgaaagcaaaagtaccaatttcattaggaaaagacatacgacctctttttgagttcctgattataaaatgaagtcccctttcatggatggaattcctaatttagacacttattgtcacattggctctcaacgcctacactctatcctgaagaacactgcgcagacctgcattgcctgcaaagtgcaacaccaaaaaaaaaaaaaaaaaaaggaaat

SEQ ID NO: 10869 - DNA, 6000 bp, Homo sapiens
acaatgtagtgtattcagtggccctttgtgatttctgtctcttgtagcaacaatctttcttaataaacagcttcatacatctcaccaagcacttgctgtcttcctgagatgtcagcacaagcacctggataccaccagatagacttacacttcccagttgaacactatactgcttatccccaagaatcaagaacagggagcgtgtgtgtgtgtgtgtgtgtgtgtgtgtgtttgtgtgtgtgtgtatgcgcatgcagatgcccagagagagagaaagaaagagacagagagaccagaatttcttgccagtgtgggtcttttcaacgtagttttgtaaggttctggacagcttggctggctgcagtcctgatattatgaaacagaattgatttgcaaggatttgagccaggagagggcacacctgggaggcagctgtgagatcagccagagcaagggtgcaaatgctgaggtatcttgaaacctacagcagaataaagggttgggacaacctgaaccagagccagagtttagtgctccctaatggggctattgaattcatcagggccaagagagaaccatgtgccagcctttatcttgagagaggaaggaggttctgtgtgtatatggaaaattaaaggtctgcagaggagatgtagtgaatgtgttaaacctgaaattacacaatgatttagagctggattctcactgaaatttctttattgcaactattccaaaaagatatccactatttcaggagtttcactacacactaaactgacaaagggattgtttagatgagtgttctcaaccctgagttttctttcgggtctttagaaaatacccactccagacaaaatgaatcagaatttctgggtgagggatccaaagatgggtagttttaaaaacccttccatgtaattctaatatgcagccaggattgagaactgctggcttaggctgagatgggaatgagatatcaaaggaagctagagaaagaaagattgtggttgaaaggctctgattcctgggcttagcctcagacaagaaaagtgtcctcatgtttatgcttaaatagtgctagaacagaaagaagcaaggcacctcagcctgtgataagttggtcaaagggttggcaataatgaatttaatctgtgactaccaatcagaagccaaactctgaagaccccaaaacataaacaaaaccagacaagctggtggatgaataatacatttggttgtatgtttcagtcaatgatcaaggattcacagaatagaaaccattcaaggtagcgcaagattaggaaggtttgtggtagagacccaaaatgtaatttcaaggcatcaagggatttgggctcccagagccaggaaccagacactcagggactgaggtcactcctttcacctcttggtcatttgatcttcttcatctctgttcctcttcacacatctgcttcattcttccagagcagttggctttctctgattaaacacttcacacaaggtccaacacacaagtggttcagctctaatttatcactgtctttcatgtccagagcccaacactgactcaccgttgttaacgtgtttcttagttcaaattttcaacagaaaaggatctggtcactagcccagcaaaggatggctgatcgtatctagcttcagttgaggtgtcaatctcctcccatatactagggtatgtgtggaaaatttcatgtagtttacaggctgaacactttaggagaccattggaagggcaggtgcttatatagtagctataggcaaggcaagtaaagaagtccatctaatttccatccataactgatgaaacagacatattttgctttcccatcttctaccttccaaaatatgggtggatataggggagataaggaggagtttgaaagaacatgctctgtctgcccaggacctagtctagcatccaaaagaggtaaccacagattggcatcactcaaagtcagtctacatatcctcaaccatcatttatgtacatgattctacatgtgttgtcttcctctggaaatcactgagaaatccattcttggtaatgttgaagcctaaggatattcagagatcctgtggtaggttcaattttaacctcatactttctgctacattgtggcatgtgaaaatggaacatacttagatattaaggaggattctcctccccttgggcttttatctgatcatttggaaaatcctcagttaacatgctgttacagtggtttgacggctcacttgacagctctgaaataacattcttgactcttagatgacaatcttgtaccgaaacacaaaacggctcttttcagaaatttagaacttcagccaagttttgggttcaagaaaatagtggtgtgtggatttttttaagctctccaaatggataaattgtgtgtaaactcactttctgtccaacatcagctattgcaccaaataattgaactgtcatatgtcccttgttcttgtaattaagttggctgcattgaggcaggaatagtctggacttgggggtcatgtttaaaggcagcaacctagggtaaacttatcctccaacccatggacagtctgaatatcttttttcccctctttggagctagaggcaaagtgaagggaggaaagggtccacagggagaagtagggggagcactagcaacaaatgttgccaattttcacttttcccagaccatgtggtccctgaaaagtatggctgtggcctctgtgcaatgccatcatgccaatgtgcaatcatctattttagaacctcagatggcatcaactattttagctcttgcccaggtacagctactgcacattctgggagaagaaagagaataagaagactaatattcgtatcttactgacaaaacaaaacacctttaaaacaaaaggatgatttatctgggctgaaaataaaactcctgcctactgaagtctggtgcagctgagttatcacgattttcgtcctgtaatttgttttatagggtactaattaacagggcaaagtctgaagccaagaaagtaaatcacattttgctgttttccttttctctagcaagatgcagacctggtctttaattaaagcgcaagttccaagggcgatatcagctaccgaaatcgggaaaacatgggccgaaaaggtcacagtgaaacctgctgtgtagagttcagaaaagataatgggaaagagaggaattgcacaggcaacctccaaaagaagagattgttttcctcagatgtccctgtcttatccatcttttaactgctccccataactcagaatttcttccctgactctactcaactgagcatgtaccacaaacatcctttttaaaaattggatttcaggcctggtgaggtggctcacacctgtaataacagcactttgggaggccgaggcgggtggatcacacgaggtcaggagttcgagaccagcctgaccaacatggcgaaaccccatctctacaaaaattagctgggcgtggtggcgtacatctgtaattccagctactggggaggctgaggcaggagaatcgctagaacccaggagacagaggttgcagtgggccgagatcgggcgactacactccagcctgggcgacagagtgagactctgtctcaataaataaataaataaaatttttaaaaagtgaatttcttttcccagataattcctgtttcgggaacggcatttttttttaaaggtagctactttcccatcaaacacccctgtcccaacctcccccttctccggggtttcttttttgacctgatccctcagtgatctttgacgctgggctttgctgcccggcaggtgtcactcatccttcacccctcccctcccagctcaccctcttcgccgcctggtctcagggtcttcttcactcctttctacctctccttgtctctctcccatcccattcctggaagttctggactggaggtggttgctctggcttctcctccctcctaggaccctcagatagtgttgggggcagggggagtgcggcggggagggcacaggatgggctggcgaggagagtgagtgctgggctcgcaccgggagccgggagcctgacgtcaccacgccctgcctgtcaatctgcagcgcgcgccgctcgcagccgccttttctgccaccaactgtatctctcactcgcggagccggcacagcgacaggcgccccgcgcttgcctcctccccggcccggccgcctcctgcaggcagctgctctgtttgcgcggggagctcagcccggcgccccgcctcggcgcccatgaccagcgacttccagaagtcctgacgccccaggtgagtggccgagttcccagggaactttgaggatgtggggagaggaggggagaaagatatccaggggacaggtctttccagaagaggagaaatggagccaaccttgactcccaccctctgctgcccccatacacacaccctagtctctcctcccagacccccttcgcaggggtctctgggctccaggactctccaggcttcgcaatgccagaaacttcgctttcagcaccgcggacagcgtctctgctgcccagccccatggggatgtcctggtcgcgccgccacaacccaggcgggactctcccaggatgacactcctagcttggtgcactcgggtgcgtgtgcaaatacaggcagccttggagaattgatccttgtgcatgtgagtgcatgttgtcctggtgtatatctgcaaaaactcagaagtccgcgtgggcatttcactcactcactcaacaggtatttattttgggttcgcacttaacccatgattccccgatttgctctggggtcccagggtggggtgggcaactcaagtggggcaatgcgagaggaggctctacgcgtggggaagtttcctggcagcctgaagtgtacacctgacgcctgcactccctccctatgcagggtgcaaatccggccgcgatgaacgcgagcgccgcctcgctcaacgactcccaggtggtggtagtggcggccgaaggagcggcggcggcggccacagcagcaggggggccggacacgggcgaatggggaccccctgctgcggcggctctaggagccggcggcggagctaatgggtctctggagctgtcctcgcagctgtcggctgggccaccgggactcctgctgccagcggtgaatccgtgggacgtgctcctgtgcgtgtcggggacagtgatcgctggagaaaacgcgctggtggtggcgctcatcgcgtccactccggcgctgcgcacgcccatgttcgtgctggtaggcagcctggccaccgctgacctgttggcgggctgtggcctcatcttgcactttgtgttccagtacttggtgccctcggagactgtgagtctgctcacggtgggcttcctcgtggcctccttcgccgcctctgtcagcagcctgctggccattacggtggaccgctacctgtccctgtataacgcgctcacctattactcgcgccggaccctgttgggcgtgcacctcctgcttgccgccacttggaccgtgtccctaggcctggggctgctgcccgtgctgggctggaactgcctggcagagcgcgccgcctgcagcgtggtgcgcccgctggcgcgcagccacgtggctctgctctccgccgccttcttcatggtcttcggcatcatgctgcacctgtacgtgcgcatctgccaggtggtctggcgccacgcgcaccagatcgcgctgcagcagcactgcctggcgccaccccatctcgctgccaccagaaagggtgtgggtacactggctgtggtgctgggcactttcggcgccagctggctgcccttcgccatctattgcgtggtgggcagccatgaggacccggcggtctacacttacgccaccctgctgcccgccacctacaactccatgatcaatcccatcatctatgccttccgcaaccaggagatccagcgcgccctgtgg

SEQ ID NO: 10870 - DNA, 6000 bp, Homo sapiens
aaacagagcatcaatacagctttggagcacagactcatcttcatttttgcagggaaatcaatagaatagcaaaatgaccattcaaatatattgcaattttacattctttgttattctcaaagaaatcatgaagttaccagaaatacaaatatctacattaagtcttacactttggcagtgaaattgtagcattatattgaaatgagactgcgtctgaaagcttttcacgttgggagtaatggtgttggggaaagcagaggttaattgaggcagagaacctgaaccacagtttgtagagttttatttgggtgtggtggtgggggtttgcgagtggcttgcacaagatgatgaatggacaggatatactaaatactcagtttttgaatattgctttttgtaaaaggaagtttttatctggaaataattttaaagctacagaaatttgtgcaagattgtgcaaagcacatttatattccctttacctagattcacctatttgaactttgctccatttgctctaacatttgttctctctctccatctttatccctgtgtatgtactgtggcaggaagtcagggaccctgaatggagagactggctggagctgtggcagaggaacataaattgtgaagatttcattttaatatggacatatatcagttcccaaaattaatacttttataatttcttatgcctgtctttacttcaatctctgaacataaattgtgaagatttcattttaatatggacatttatcagttcccaaaattaatacttttataattttttatgcctgtcttattttaatctcttaatcctgttatcttcataagctgaggatgtacgttacctcaggaccactgggatgtatctaactgtacaaattgattgtaaaacatgtgagtttgaacaatatgaaatcagtgctccttgaaaaagaacagaataacagtgatttttagggaacaagggaagacaaccataaggtctgactgcctgtggggtcgggcaaaaagagccatatttttcttcttgcagaaagcctataaacagatgtgcaagtagaagagatatcactaaattcttttcctggcaaggaatattaatattaagactctaggaaaagaattgcattcctgtggggaggtctataaatggctgctctgggagggtctgtcttatgcggttgagataaggactgaaatatgccctggtctcctgcagtaccctcaggcttactagggtggggaaaaatcccatcctggtgaatttgaggtcagactggttctctgctcttgaaccctgttttctgttaagatgtttatcaagacgatatgtgcaccactgaacatagacccttatcaggagtttctgattttgccctggtcctgtttcctcaaaagcatgtgatctttgttctcctttttgtcctttgaagcatgtgatctttgtgacctctccctgtttgtacaccccctccccttttgaagttgttaataaaaacctgctggttttgtggctcagaggggcatcatggtcctaccaatatgtgatgtcacccccagaggcccagctgtaaaattcctctctttgtactctttctctttatttctcagctggccaacacttatgaaaaatagaaagaacctacgttgaaatattgggggcagattcccccgataatatacagtttttttggagtcatctgagagtaagttgaggcctaaatatttcagcaatttaacatttttttgtttatacaaggacataaaaatcaagcaatcagcaatttaacattgataaaatatctttaccaagtaccacccatattctaattttgtcagttgacctagtaaggcactccattctaggatcacatacttctttttttttgaaacagagtcttgctctgtcacccaggctggagtacagtggcacaatcttggctcaccgcaacctctgcctcccaggttcaagcaattctcctgcctcagcctcctgagtagctgggactacaggcacctgccatcacacccgactaattttggtgggtttttttttttttgtatttttagtagagacggggtttcaccgtgttagccaggatggtcttgatctcctgacctcatgatctgcccgtcttggccccccaattctcttgctctttagtctcctttattctggagaagttctttaggcttttacaacattaacatttttgaagaatataacttcaacccccactgccctccacccttctaaaaataggatgtttctcaacttgggtttgtctgaaatttcttcatgattaaatccaggttatgcattcctgactggaataccatgtacagtatattttgtgcatctcatagtatcttatccagaggcatacctggccatctgcccttcattggggatattaattttgatcaccttgtcagggtcttgtttgatgtctccactatatagctactattttttcttttgcagctaataagcaatttctgggaaacactttaaaccatataagtactacctgattctcataaaactccacccctcctcaatttagcatctagtgatgattgttgcctaaatcaatattaacgtgacggttccaaaacaataatgtttcaaatttatactctcttcatatgtatcagttagcactttgcattctattgtaagaaagagttttcatttgtcatctatctatctatctatctatctatctatctatttatcaatcattttatctatatctgattagtgtggcatcattgattctttttcagtgttttatactttttattccccctaatcatataaggacccaaattgtcccacattcagtcagtaggagctcatttatgctagcaacatcgttcttatgaaataccccaacatttaaaaaaactttcttaatttttggcatccaaatgtgttccagtttcctcctgtagttccttccctgtcccatgcaggaatgaatcatttctttgaataataaagaagccctagttgctcttactggataaaggtattaaacaccaagatgtggggcttagggatgcaccttgctactcaagtgtcttggcttccaggaatgggccagttttaagacactctacgagactaaaggctgctattttagggctcaagtataaaaaactgaggaaagtggtcactatctttttgcacaacagcatcctcaattgggtgttagggaagtggggatttttaaagtttaggaaaatagcattctttaaatagacattcagaatctcaggcagggcaccacgtatgtggcagtggtggaatttttttagccattttgagagtaaaacaagagatgcagtggaccttaggagacctggggaagaagaggagaacatgggggtatggaatgtgattttattgggtagactgacttgtgtgcacacagatgcacttttctgaggaatcctaggagtaacaaggagacattttgcaaggaggagattaagtcttgtgccatcaaactagtgagggctctggtaagaaagaactgggaaataaaagtaaaaataaattgatttaaaactcatagatcagtgaagccagaaaatactagagaaacctgaaaatacctgtacacacacctgtatacacacaaacacacacacacaaaatttaaaattcacagactagtgaagcctattacctaaaaactgtagccttataaagaaaagctcagtcctcctcagagagttacaaggaaagagtagccatttatttaggaatatatttgacttatgtgtatgcatgtaaccttttctaggaatctgtactttcaacagagcccagacccatggcatagggttaatgccaataaaagtagttcagtctctagctcaaagattaagattccaatgcaaggttgcacttattcatggttaaatgaagtaaaaccattcactgttgttaggtgaactctttaaaccttcttaagaccctaagcttcagtatacgaacagactcatacacctagagaaatcaagttggtctctatttgcaccttggatgactcagcatgaatctattcttcaaggatatggcttatttaaaaacatccctccggtccaccccagtttttgtctattcttctgtgataggtttaaaactacaccgtttttctaaggatgggaaggtaagatgttaggtgagttattgcttattttaattattaattttagacacctaacactgcctattagcctggaaaatacttttacactgactaatatcagttcaataagattttttctctaaatcatctcaagctgtctgaatcgtgaaagaatatgaaaagaaaaaaaatacaaattctgaaaacataagtagtagaagaaatgtgttcctaaagtaagtttaaagctattatgaggaaacttttccttaatcttcacactccataccatagggattttgaaggtatagtttgaaggagatgtaatttacctcttccttcatgaataaatgaagcatagtttgtcattactgctaaagtgctgctcaggggagataatgtaagaaataaagctcagcctttgatagcctaattacttctcaactgtggtggttatagatgagatttttcagaagataaactaacacacaagaaaataattttttaatgattagtaaattttatatatatatctcattggactaagtgtattgccagccatttaattaggaatatatttgactatatttttaatggctttctgcaacatatttccactctaaatatattaaaatgtgaatgtgggaacactttttagaaagatcaagacgttatagttaatatggaaaagcactggtagaaaaatcacaaacttttatcattttaactggagatattttcccctcctagaagactttgaaattgcttccttttaaaaaaatttttgaaagcaggaatttgagaactttaaaatagttcaaacaagaaagcaatggtgaacaatttctcccaagctgaggctgtggagctgtgttacaagaacgtgaacgaatcctgcattaaaactccttactcgccaggtcctcgatctatcctctacgccgtccttggttttggggctgtgctggcagcgtttggaaacttactggtcatgattgctatccttcacttctaacaactgcacacacctacaaactttctgattgcgtcgctggcctgtgctgacttcttggtgggagtcactgtgatgcccttcagcacagtgaggtctgtggagagctgttggtactttggggacagttactgtaaattccatacatgttttgacacatccttctgttttgcttctttatttcatttatgctgtatctctgttgatagatacattgctgttactgatcctctgacctatccaaccaagtttactgtgtcagtttcagggatatgcattgttctttcctggttcttttctgtcacatacagcttttcgatcttttacacgggagccaacgaagaaggaattgaggaattagtagttgctctaacctgtgtaggaggctgccaggctccactgaatcaaaactgggtcctactttgttttcttctattctttatacccaatgtcgccatggtgtttatatacagtaagatatttttggtggccaagcatcaggctaggaagatagaaagtacagccagccaagctcagtcctcctcagagagttacaaggaaagagtagcaaaaagagagagaaaggctgccaaaaccttgggaattgctatggcagcatttcttgtctcttggctaccatacctcgttgatgcagtgattgatgcttatatgaattttataactcctccttatgtttatgagattttagtttggtgtgtttattataattcagctatgaaccccttgatttatgctttcttttaccaatggtttgggaaggcaataaaacttattgtaagcggcaaggtcttaaggact

SEQ ID NO: 10871 - DNA, 6000 bp, Homo sapiens
aggtgatccacctgcctcggcctcccaaagtgctgggattacaggtgtgagccaccgcgcccggtgctggtagttttgaagttgtcttgatctagccctgaagtttccccaaatacgaccctgctctacaatggtgttttcagttcctgttctgctgtcatacaggataagtccctgatccagggagtcagccagtgggtagctcagcccagtgcctggttatgaatctgtgtctgtgtccttatatctccctagactaagatctttctaaaagccgaagtcctgggtggaattggggcaaaatcacctggcttcagcatcctttcacgtgtgctgcaaggttataagcctcgctccagcccctgactttaagcaatgagcatgtactatttcctgtctgcacagagcacttttattagacctctttaaaggagccaagatcctgggttcctttgctggttccgaaactgcaaaactcatacgtcctcattttcagctctgctcacatgttgtgtttgtatcttttcttgcacacagagaagatggtctgatttatgaactttgctgtactttcttcttttttatatgcctgctctttccatattttcatctggagcacaggggtagatgaatgaactaactgaaccatcttgactgaaagtcctaaagaaatcttcatcttgtctgggaagaaaatgtggaaaaggaaaaacctgttttatctgagcgtgtatattttctaatcttaacttttttacttcaaccagttctttggtctcaaaaggtaagaacttgatagttttgttttctagcttctctcctgacaaataatgctcatccttcttacttttctgacttctgacttctatgcctgaggggatcaaaaaacctggagacaggcatctcacagaggtgacaggagcagcgggacaccgtcatccatggaccacatttcttgccagcagcagaagcaagtgatgcctgtggtaggtagaaaaatgcacactccatcccatccccaccgtgatgttcattttcgaatccctagaacctgtgaatgtgttatcttacatggcaaaagagactttgaagatgtgattaaattaaggatcttggatgaggagattatccaggattagccaagtgggcctaatgtaatcgcaagtcattagaagtgtaacagggaggaaggggagtcagtgtcagggtcagagaaaaacttcaagatgctatgctgctggttttatgaatggaggaagggacaacaatctaaggaatgctaagaagcttaaaaaggcaggaaggagattctcccctagatcctctgaaaggaatgcccacctctggcaacttgattttagttcactgagacccatttcaaatttctaaaatccagaactccagtcatgtaagacaacatgacaaaaaatttgtgctgtgattaaccactaaatttgggttaatttattacagcagcaatgggaaacgaatacaatgccataatcccaaggcggatgccccatgtatggctacagatacctccagtggttctggtgcttacctaaccaatgagcctaggtatcagcagccaatcagaaacattcagagacttcacttttctaatacaggacagaggcagttcatggccctctggctttaagtaactgcgctatttctactcccctgaatccaatctcccagagcttagatctgtgcttggttccctgcttggcagtaaaactttcccagttggaactcagtctctggtctcatattttccactagtttttctttaacaccccagaataaaataacaaataataaaaccaaatccaaacactaataacaacatgaatgttctctgaacccatgtctcttgctatctattatataggtctcttccttttcacagctgagcagtatcagtcattgtttattatttcacttgccttccttctccattctcattcattctcaatccactgccatctagattctgtctaacattccatcagaagtccagtcatgctcatcattaacctggttgttaatgacaacaaacaattctcagtcttcatttaacttgacacacctacagcattggacactcctggctatgcctcccttacctgaacctctttctttccacgacatctatgggaccactttttcctgtttttctatctgtatttctggctactctttctttttgcaggcataactttgaacttggtgctcctctgttccttctattttcactgtgcacactctaatccagtcaacaaatactgagtagcatcctacaactctataaaacacatttcttctggaatgtttcatgttttggttgttgattttatttatttattattttcattcaaatgagtgggtgtgtttagttttagtttttatttttcttctattctcccctcacccaaaacacacatttagtgcctggtaggttttttatttttatttatttttatttttttcatttaactggacacatttacagcattggacatcctggctatgggcaccaggcaatcaaatttctttctatggtttcaaaacagcagaatgtgagcaaccccaaatgactgtttctggcacagtttctttcctgagctgaaaactcataggctaaattccctactgaaggactccagtgttatgtccctctgaccagtccaaacctaacccatcatctttcttttctagactcactctttctcctgcttactgtatcctgcctattggcaagttgaaaacctgggaatcatccttgactcttacctgcatcatgcagctctgaaccctgaatgcttttggtctttaaattgcatgtatcacatttcagaatatagagaagcaaggttactcagtaagagtagggtgagatcaagttaggtttgagaattaaaggaaaggtaaaatagcattgccaaaaagaatttggtagatgatcaactgaatgattgtttttatgtcacacctttaatacatgtattaatttatttctatatatttttagtacctttatcctaactggcatatcatatctgtattttcaagtcctatatatactgctgtggaggaaaaaggtctttatcatttcctacttagtaggtgccatataggatcaaaattagctatttttttcccccaggcctgaaattctttttatggagcttcattccttaatctcgcttcttaatcccctaaattactgttagtattatggggacaagcctgtatgtcaagaaaggctgttattttcagaactgcctggacctcagcttctacaccctcttgtctggaaatttcgcagttacctccacatggggtattctttgcctcatcattgagctgctattacaaagagataatttaatatctgaaatgaaacaggcagttattccatgggcatatgactggggcagcagtgcagagacctactattagggtttcatgctcatagttgctgtcttgaatttctgtctttgaaattcaaatgtgtgtgttgttaagtgaagagacaatggagcatgtgctgggtgcttggaacttcagaccactagtagtcttgcattacaccttgttccttcttccctgggaggggtattcagcctcatgttcccctgccccctggcaccttgggctccatccagtctcctcctacccgctctgaccagggaccactgccatcctcttttcatccctgcagaggactggatgcatcacagggagagttgcagccaggcacatcctccacagtctcagggctaggcatagactgttgcctccatctcccgctggcagcgtcacagcacgtttgatgagctcctcagcagggccaagcccctcatgaaccccaatccaggtatcaagtgctttctgctgtgcaggttgtaatcccttgggggtcattggtctgccttttgttgaggtagcaggcctgtgagaagggcaaatccctggctcagcttctcacccccatcctgactatggcatattacttcagcagctggtaggagggggaatctggcagtgggtggaccatgtgcaagctgagttgcaaggcagggaatgcagacacctgtgagagtcctcacttgccctgcaaatacctctttgtccaagggcattccatagcaaatatcgaacactatgacaggccaagaaagaccataaaagaaaggtaaaagctttctatttcagtacctttaatgacactttttgtccatacttttgaacaagggtctctgcattttattttgtgctggatgctgcaaattatatagatagtcttgtaaataaggaataggtaatactattgtcaaatcttgggttaggctatttcaggacagttgaacttaaagaaatctcatggttatgaaaatcataagtgtttctaccaagttgcagagcacagagaaacagttctcctattgtaggtgaacttattaattataattatcaaaagtgggattcatttcatgattcacaccttacactatggggattccttgtgaagaatttataatgggtacaatggattggctggcttcctaaaatgtcctaggagatggaagcttattaaaaggtgacttctcaaatatgtaattatattatacatgatcgtcctttgaaaagaaggattcacatgtatataaaaccaggtatttaaattacatttcttcaattacttggttaatgtgattactcagctgatgaaaattcatagtagatttgcttggggttaatgacgaggtttagacatagcgacagaaataattatgagattaaagacagaattatcttttatgtttttgaatttaatttctctttataattaaaattgaaaaagaatataatatgaaacaaaatttgtaagtactcacatatgcagtttgtttttgttttaattttcagaattcaaaattataattccctatcacaaggaaggacagaaatagcaaacaacaaacagcagaaccatgaccagcaatttttcccaacctgttgtgcagctttgctatgaggatgtgaatggatcttgtattgaaactccctattctcctgggtcccgggtaattctgtacacggcgtttagctttgggtctttgctggctgtatttggaaatctcttagtaatgacttctgttcttcattttaagcagctgcactctccaaccaattttctcattgcctctctggcctgtgctgacttcttggtaggtgtgactgtgatgcttttcagcatggtcaggacggtggagagctgctggtattttggagccaaattttgtactcttcacagttgctgtgatgtggcattttgttactcttctgtcctccacttgtgcttcatctgcatcgacaggtacattgtggttactgatcccctggtctatgctaccaagttcaccgtgtctgtgtcgggaatttgcatcagcgtgtcctggattctgcctctcacgtacagcggtgctgtgttctacacaggtgtcaatgatgatgggctggaggaattagtaagtgctctcaactgcgtaggtggctgtcaaattattgtaagtcaaggctgggtgttgatagattttctgttattcttcatacctacccttgttatgataattctttacagtaagatttttcttatagctaaacaacaagctataaaaattgaaactactagtagcaaagtagaatcatcctcagagagttataaaatcagagtggccaagagagagaggaaagcagctaaaaccctgggggtcacggtactagcatttgttatttcatggttaccgtatacagttgatatattaattgatgcctttatgggcttcctgacccctgcctatatctatgaaatttgctgttggagtgcttattataactcagccatgaatcctttgatttatgctctattttatccttggtttaggaaagccataaaacttattttaagtggagatgttttaaaggctagtt

SEQ ID NO: 10872 - DNA, 6000 bp, Homo sapiens
tcactccataattcatttatagactcaattttataccaacaaaaattccacaggtttttttgagcagaaatcggcatggtgattttaaaatttatatgaaatctcaaaagaaatggaatggactaaagaattttgataaaggatagcaaagtggaagccttatattaatacaacctgacttactagaggccaggagcagtggctgacgcctgtaatcccagcactttgggaggctgaggcgggtggatcatgaggtcaggagatcgagaccagcctggcaaacatggtgaaaccccgtctctactaacaataaaaaattagctgggtgtggtggcacatgcctatagtctcagttactcagaaagaatagccttttaaagaaatgctgctggaattgctgaatattcgtatactactactatggctactactaaaccccaaacccttcctcacaacacattcaaaattaatatgaaattagatctaaacattagaactaaaattgtaaaaattctagagggagcatagaagaaaaagttgggataatcgggacaggcaaagatttcttagaaaataaacaaagtcaataaccatacaaattagttaaattttttgaaaattaaaaccttctacttttcaaaaacactgtcaagggactgaaaagtagacatttacagcatgtatttggaaataagatatatccagtcaactcaataataaaaaataaaattcagtgaaaaatgagcaaacgtttttacagatggttcactaaaatgaatacattagcagctaataataacatgaaaagatgctcaacatcattattcaccaacttaaaaatgtgagatactgctacaccctgtagaatggatacaacaaaaagaaatggcagtaccaagtgttgaagagggcttagagcgattggaacattcaggttgctggtgggagcataaaatggtgcaattattttagaagatagttcttagcttcttacacagttaagcataagtttcccataaaatccatcaattctgcatctagatatttacccaaaaatataaaagcatgtgtttatgcaaataattgtatatgaatatttacagcactgctatagcagccccgacaggaacactgtccaaacgtctatcaacggggtatattaataaatcaggtgtggtatattcatgccatgcaatcctacttagtaataataagaaatgaacaacgaatatacccaataacatgaatgaatctcccagatactgaactgagtgaaagagctggtcacagaggagtacatgctgtgtggttctcttcacatgtgattttgagaatgggcaaaaataatctatagcgatagaaaggagatcagtgcttgcccatggcaggagaaaggaagtgggggtaagattggctgcaaagggcaattaatgtgtctaatcgcatcatcttacacagataaaatttgacattgtagtttctacaaaatcctaattagtctgcttaccataattataacataattgacatagttgtcaatttgagtttaataaatgaataaaactgattcttatactttgatccacagcactcgacaattacttttgtatacaaagtttcagagactgtattgtgtaatttgtaaatcaggaaatatttaactaaagaaatatgcataaaatttattttaatatttcaaaatacaaagtaatatggtttttaggattgtagttagtgataattcgtattcgtaagaaaaataagttttgttggaattataatggataagatattcacaaatttaaaattatatagataaaatgtcctagagatttatggttgttttagtataatattacatcaatgtatcacaataaactgggttttgaaaataaataaattaattcaaaaacaaaaacaatagaatccaaggattccagtgcatgattcattttccagtggatctaagtgtcagtgtgttttacaaatttgttttgacaaaacacttacctagaattctttactttaattacacttgtataaattgatatagcaaataaacgaaaaaatgaagaaaaatgactggacaagtatgagttctacctcagatataaaactaaggtattaaaaaaggaagatttgctagagctcatttggaggctgtgattgaagaaaaagtactttcatactgtttctcaccctactcaaagtattccacaagctgttaatctatatttctaagaaatacttgtcaaacacaaatggattatggaatgaatcaacctgagcactgactcagctatgcactaacttgaagaattacttagaccataacttagataaattgattgcatataatcaatgcccacttcttttcctttacagttgaacacttcgaccctgctttgtgtttggttgcttttagcctctaatccaaagagacaagagtacaaaacatttgtctcccctttctcttattaacaaacttctgagtttgggtactgcaacaacagggcctcattatcacatctttctcccaccttagtcataatgaagaatgtttcacactctggatcactggggagatggtttacttagtggacttttattttagaaatgtctttaaggagttcacaacctgcaaactaaagagcaagtgtagaagtgagactgaaaactttagctgatgcaagacactcaaaagtttgcctccaaattcttccccgggtgttagaatcataaaactctgggaaagaggatttctgcttactctcgatcttatctgatccaaatccatttatgatgatggttttaggagcaagattgaaagagttgtatatgtgcaataattttagaggccttgaaaacaccctccaattgacatcccatgtcagcactggactagggctctttattcactaatccagaacattaaagtataagttaaaacagaatcctctagtacgtttaagtggtacaataaaaaaatagaatatctaaaattctataaatattaaagtagaatttttgttttctcatgtttttagggacccctttgtctcatctgcctgtcattgtgcttactgtagacgctattgtctttcgtctgtgtagtacttatcacaatttgaaattgtaaatctgtctttctatttccttaagttttgttttcctcttaagattataagcttcgtgagtatagtggtcataacagttttgttcattacttgaatacacagctactggaattcaataaatatgtgttgaatagatgaattaataaatgaatatcagaatgatgaagggatataaagttatttttctatttgaaatcgaggcatcacttgacacttttttattgcctaagacaattgtcttaatggaggaagggggttgattttgtcccttgaggaatttggcaatgtctggagacgtttttggtatctcaactagaaggattttactgacatctcgtagcaggggtgctgctaaaagccacgtgattaacagaataatttatcatatcaaagagttatctgaattcaaaagtccattgtgctcaagttgagaaagccccgcacggggttttgtctatataagaaattgacaccatttcacaaaatcagacatacagaaaatattaagaagcatctgaaaactacttggttaagagtgttaattttattgagtaggaatcagatagcgagattgattaataataatacttatcactctttataacttgaaaagcaagttcacaaatgtctctaaagtcacagccctgtactggaaagagagttgaacccttcttcaggaagacaataatataataataacaatattttcttcactctgcagtgtctttacattccagggttgggaacattactgaggattctcttcccattttccagtttcctgttcattattcttatttttttgactgcttttagcatcgggagcacaaaggccagtcaccaggaattgcaaacaaatgcgtagtcagagagagagggctcactgcccatttgtcatgtggatgcagacacattgcagatgtgttcccagtaacaatgtcttgagaagaggactggtctttccaccagcatctcagaaatgccggtgtgtctaaacagcatgtcgttctttaatgctttcatgcaatatattttatcaatctcaagttcccctcactatgtattataataatttctgcttgttggtaaccaatgcagatggaaaattgattcttaacagaagagaaagagccaagtattgatgcttactatttacaccctattgtatctttgtaacaaaaacccgggtggctaagttatgattgggaacaagggaatggttcaagtctatgcactaaggaaaaacaaatctttggcctaaaacaataatgataatagaatttaatatagagtagagacctgttttgtagaataactttcctagtaatcactgttgaaaataatcatactagttcacaccgcgcactacagggattccatcgagggattttcccattgaaggcatttatttagctaaaaggacttcatctttaaggcggtaatgcaggacagataacagagataaagataacaggaggtgatctttcagctccataattacattccatatcagcgactgttgcacagagaaactcaaaaggtaaaaataaaatatgaaaggatatttaaaatcaaaaggaattttatcaaattaagagcatgagacatttatcagttgaaacaatctccaataatcttgtgcaatataatttttgtcaaattttattttgtcataaacatttgggatttataataaaaatggaaacttgaaaaattatattagagataatatctgatcatttcctctggcatcctggtgaatatgtgtttttttccgcaggagcactgaaaatcaggaacaatcctgtattttttgtgataatcaacaaggacaaaacttctccatatgtaaataacagcgttatgagcagcaattcatccctgctggtggctgtgcagctgtgctacgcgaacgtgaatgggtcctgtgtgaaaatccccttctcgccgggatcccgggtgattctgtacatagtgtttggctttggggctgtgctggctgtgtttggaaacctcctggtgatgatttcaatcctccatttcaagcagctgcactctccgaccaattttctcgttgcctctctggcctgcgctgatttcttggtgggtgtgactgtgatgcccttcagcatggtcaggacggtggagagctgctggtattttgggaggagtttttgtactttccacacctgctgtgatgtggcattttgttactcttctctctttcacttgtgcttcatctccatcgacaggtacattgcggttactgaccccctggtctatcctaccaagttcaccgtatctgtgtcaggaatttgcatcagcgtgtcctggatcctgcccctcatgtacagcggtgctgtgttctacacaggtgtctatgacgatgggctggaggaattatctgatgccctaaactgtataggaggttgtcagaccgttgtaaatcaaaactgggtgttgacagattttctatccttctttatacctacctttattatgataattctgtatggtaacatatttcttgtggctagacgacaggcgaaaaagatagaaaatactggtagcaagacagaatcatcctcagagagttacaaagccagagtggccaggagagagagaaaagcagctaaaaccctgggggtcacagtggtagcatttatgatttcatggttaccatatagcattgattcattaattgatgcctttatgggctttataacccctgcctgtatttatgagatttgctgttggtgtgcttattataactcagccatgaatcctttgatttatgctttattttacccatggtttaggaaagcaataaaagttattgtaactggtcaggttttaaagaaca

SEQ ID NO: 10873 - DNA, 6000 bp, Homo sapiens
gcatatcttgatccccttcactagtttatcttacaaagcctgttctattgctcacaaggtacataacttggcctactgcattctcttaaaaagagaaaaatgagaagctatctcttctctcatgttaggaaagaggttgggtgggggaggggcggtttgtgagatcagggagttgagtggtttccaagagaagctgtgtaccctgcccctcagatagaggcccaggaaggcggcaagcccacaaagagagaagggctgcttggagggggccaggcttatgaagactgtgataggccatcaagggaatcaagaaagagcctgaaagagcctcacttaccagactgacattctatgtggaccaacggccagcgaccaaaaaggttgatatctactgacacaagtaagccaaagaccactttcttctaccctctctgctgaagaaagcaagaaacttgatgaaacaggaggacttggattaaggcagaatgaaacataaacatataaatttccaattgggttgaattatttacaaatatatatttattaatctacttgatttgtagaataaaatttatatatactccctggcacacagaaggtcattatagttactattcctgctatattttatttcatgtgtatgtccatctctttttggttaatctgatgcttaattgtatgtgtcaacttggcttggccacggtgttcagatatttggtcaaacattattttgcatatgtctgtgaaggtgtttcttggatgagattaacatttgaatcactggactttgcataatgccctctaggttcatccatgttgtcacaaatcacagaatttgtgttgctgaaacaattttttgctgctcaaaaagtcaacactaatttttatttacacaacagtaatatccagttcaggaatggtaagaatctcactgtcatcagggctgaggtttgaaatccactttgagtacattgcaaagagggctgacgttgactcacatgcacacaggaaagggcaagtcacatgtgtggtgaggagccagacactgaatggttaaaataactagggctgtcaaaactgaatgaaggaaggctgaacagagagatgataactgtcttcagatatttgaaaggcttattgtggatgacagaatgtgcttgttctgaatgggagttgaaagcatgaatgtttgattcaacccacagaaagaggaagcttctcacagttgagtgtgcatcaatgttaagggattcaaacagatgttcaatattcattttgtctggaatgttgtcagaggattcctgtatgtagaggaatgtggtcttggcacttttcagtttaggataatgataataggtcgggcagagacaactaatattagcaaatttcaggaaatatgctgagtgcttcatgtcattagaatgtctaatgacatcagaatgtctcactgaatctgcctaacagctctacgagttaaacactataagtattattattcttattttacaaatcaagcttagtttacatagtaaactgccagagttcacaatgctgagaaatcacagggtcaagtttagaatccaggtctattgcattaaaagactatgtactttccactatacactccattttcctaacatgctttttcaaaagaaaagaacaaattcttagtttgaggacaaaactgtcaaaatatacagattttattaacaaactgaccaatgaaaggcactgattcattgaaatattttagctatgattctgatcatatattaatttcaatgcataaaattatgaacattttaacatataataatggcacgtgtgaaaactactatcttcttgatgtatgtccattttttttcggttaatgtcatggttcattttatgtgttaacttggcttggccatggtgtccagatttggccaaacgttattctgtgtgtgtctctgatggtgtttcttggatgagattaacatttgaatcagtgggtcttgcataatgtcctctaggtccatccacgtgtcacaaatgacagaatttctaacttaaaggttgaacggcattctgatgtgtatatattccacgttttctttacccattcatccactgatggacagaaagagaaatagcaaataatctcacttatatgtggaatctgaaacaaactcataagagtagagagtacaatggtggttaccagaggctagagggtgaggtggggtggaatggtgaaatgttggtcaaaggatacaaagtttcagttagaaggaataagtttttgaaatctatttcacagcattgtgaatatagataataatgccttgcatatttcaaaattgctaaatttcaaatgttcctatcacaaaaatgatagacatgttaattagcttgatataatcattccacatggaataaaaatataaaaatatcacattgtatcccataaatatatacaattataatatgtcaattaaagataaatgtcaaaaagaaaatcggaataaaaactattaaaaaatcagtggacaatgtacaaagaagattattctccattctgcaggtaggcctcatccaatcagttgaaggccttaacagaacaaagactgatctaccctaagcaagaaggaattctgccagactgcatttggagttggactataacttttccctgaatctccaggctgcctgactgtaaattttgcactagtacctccacaataccttaaaactaaaatatatatatctatgtgcatacacacatctagctggctccgtttttctggagaacactgaataatgaagttatttatatgtcttttctttttttgaggcagagtctagctcttttgcccaggctggagttcagtggtgcaacctcagctcactgcaagctccacctcccgggttcaagtgattctcctgcctcagaaaaggtagctgggattacaggtgtgtaccaccaggactaattttttttttttttttcagtagagatgaggtctcaccatgttggccaaactggtctcgaactcctgaccccaactgactcgcctcagcttcccaaagtgctgggattacaggcatgagccaccgtgcctggcagttatttatatttatttgctcttatgtttccaggtttcttctaactttaaaattctatgactggaacaaatacatatgtgaacttggaagtagatctttcccctgtccagccttcagatcagaccacagccttagtcaccactccaattgtggcctcctgagagacactgagctaagggcatccaggttcttgacccacaaactgtgaaatacatgttgcttttaaaaaattccaagagtggcccttaaatttctttgggactataccgtgtaatagcgactgactcaaaagggtagtctggaaacctaatcttagcccctggtcacctctagctagtgtgcacagacctcagatcttgtcagtctcatttccctacctgttaacgtgagacagttgggcagaagaactttagcttcccttaaatgctacaactcagcgtctctattaatcataccgtttattcatcaaaatgaatactgataaaaatgacaagtagaacacaccctagatgttcaggcctctggaattggtggcagcgttccagcttcctttctgcctgtaactgtgagtaagtcctgctttacctccttcccaccccccgcacccaccaacagctctctatcataagctaatcagcttgaaataattgttagggcacttctgtgtatggcctgtgcatgtgccagtgtgtacaccgtgcaagctgagctgttgaggttctggatgtgcatacagccctggcaccggaaggtttgcctctagcattttgtggactaactctggcagtacacaatgggaagaaaacctctttccaagtgtgagcccttctctcttctcattcccaaggaggtgtgtccagatccctttgccagacagctactttacaggagcattggagagcaggcagctaactttccccaacaagcagctggatttacgttggcaaatcaatccctctcaataaaatgttatgtgaccatcttcccagccccccgttaaaatcccttcattttttcgagcaagcgaactagtcagagaagacagaaaagttaagtaaagaaagtggcagaaaagtgaagcaaagcaacagcccgggagcgtggcggggggacccgcgcggggactcgggtaggctgcaaacgctggggagatgccacaggagcgcctgccttcccagcttctcctttctctcgccgagggtctctggggttcagcgctcccggcgtttcggcgacctccgggtccgccctgtcccctcccagctggggagctgagcccggctctgcgcccatcgccgaccccggccactctcccttcgctgctcgctccaaaagcgcctgtcccgccccgcggggcgacttctccctttcggccctggggttgaagatcctgtgtggggcagctgcgccttcgggacagccccagccgcggagcgcccagaccagggcagccggagtcgggtcatacgccgcacgccgccggggccgccgcacctgagcccagctccagtcacgccggaagcgcgggcggagcgcacgggtccggggagagtcgcctgcgcccgcgagggggacccaagtacctagggtggtggccgagtcccgcctcccgccagcgggggcgaggacctgcgacgcgcacccctgcctggcccggtctcctcagcaccagccccacgcacaccctacttcctcagcttctcgccctcaccctgccaacttccctgcgaggagggacctgccgccagcctgcttcctcgtccgcaggccctgcgctgaacgctgccgcgcccagggttcaccttgcgccgtcgggaaagcccatgaactctccagaaacggcgtaaaggagggtcccgccgcggcgcagggctggggcgcctgggttccccctgggtggagcagcggcagcagagcgggaaagtggtggaggatgatcttgcggccaaaggggacctcggcgcagtaatgtcaacatgtaagtctcacctttcagcttggaattccttcactcttttatctgtgtccaccttctgtcgccccctccccgaccaccccaccctcaagagaaatgattttataaggacttcaactgcacggagggaataaaccggtttgtcttcagtttgcccctcgaggcactgaggagtaggactattgccaagtggagttgtgacatgtgtgtgtggctgttttttttcccccagcgaggtaaacctcacatttgggcggtgtaaagcctaataagaagggcagggcttcaagaatggggaaaacgtgttttcaattcaaattaaacaaggagtaacaggcaccgctcctcagtccagaggcctggccctgccaagaaggcgctctccggaatcaacacctgggggcttggaaggtactagtatgccgagaaaatgttgactttacacattgtcaccattgactgtagaagttattcttggatctttggggtgtttgaatttttttaaggtgtgcagaaaatgttttcagtgtgctttgtagtttaggaagtaattaagggttacgccacgttacgtgataggatttgaggggacttccatagacttatggggggcgtggggaattggggcattgaaacagagaaacctaaaaggttttgcctccatagaattgtcatcctaatggtgaggtggcgcacagcgaccccatgaaagggtcgccaagcaccgtctggctttccagaatgggaaaaggaagattgtactccaaagggccaagcttatttttgtggccaactaagaagtttctttttcttgtaataggtaattttccttctgatgttttagttaatcttggacggacaccgtgacagacattttatccccttccactaactcatgtacaacaatttctagaacttgg

SEQ ID NO: 10874 - DNA, 6000 bp, Homo sapiens
cctatggcctctttgttctgggcaacttcttccatttggaatgggaacatttacttcatgcctgtacctccattttgtcttggatgtaactaacttgcttttgattttactggctcataggtggaacggatttgccttgtctcagatgagactttggacttggacttttgggttaatgctggaatgagttaagactgtgggggattgttgagaaggcatgattggttttgaaatgtgaatggggcatgaaatttgggaggggccggggtgaaatgacatggtttggctttgtgtccccatccaaatctcatctcaaattttaatccctaggtgttgaggaagggacctggtgggaggtgattagatcatgggagcagtttaccccatgctgttctcatgataagtgagtgagttctcatgagatatgatgatttcatagtggcagtttctcctgcttttctgccactgtgggaagctgtcccttgtttccccttcaccttttgccatgattatatttttttatagcagtgtaagaatgacctaatacaagacttaattcatccctttgtttcttttgtctgattcttgcttgcttcttatctctcccatttgaagagtttaaatttctagctgattttatgtggaaaactttatatccttttgctcttttatagcctagactcattattctatgaaatactttatgatggaaagcaatgataattatgcatacattcataaggagggtgactacagttttgttgatggataatatttaccttattaccatatcaggatggtgaacattctgttcttattgttacagcagcacattaaatcattgttttgagataatagtgcagatattgttttgattttgatcttgatctccactaaatagtgtattaaatagatttcccaaacctaaatactgataacacttttttatcctgctaaaaatcacatactagattagacattcttttgattttgatcttgatctccaccacattgtgtatagatttcccaaacctaaataccgataacagttttttaccctgctacagatcacatactgattgtaatgtgatttcatactagtactgaatattcatactaacaatatttctggattcatgaacctttagcattctttgaactcttatagattagtgtatttacttgtatttgctagtttgtatgtagctcattgttgcagtaatccccttcaatcctactggaagaaccatcccttagatgtctgcacatgtattataccctgcctcctatgtgaagtcttcatttatagaaagagaaagtatatttgggtgatcttgtcttcttttgtctcaatgccttcttctttgattgtttttgtcctggtaccttctatagttagctcttaaataattatcaataaatttaattgatcatttcaaattaatacatttgaaattttttttctttaacactttttgtatatgcatgcatctggcatgttataatcctcaaattcatcgtctttaaaatgattagtttcagccagcctgaatgtgtagtttttacttggactgtaaaatgaatttgagaaccaataaatctgaacatttaattattccttcagtacagcaatgtgatatattaaagatgttcagctttaggagcacatattgacactaaatgtggacttcagagacattactttctttaatgctgaaaatcataattaaggggtatatatgcacagaaatctttgcacattcactatatctctggaatattctaggaaagtaacatttagagcttatcacactctaatgggcttatctaaaattgaacttaagtggctactagaggaagtcagatactatgggactctgtgcatacctgtggcttgctgttcttcgaacagacatattcctagggtagaagcagagagccatttagtcccatatgtgatgatcagaacttacctcttcccattttccttatgtaaacatgtggctacttcccgaattgagatcatttagtctaaaaaatgtgaacgttgtttagtgcattatttgtggaaaaagaaaaaaatatattctctttgggctgtctaaaaaaaaaaaatccagaaaactctgacacttagggaaaaaaagatcagaaccagaatgagaaagaccttttgttattgactagaggtattgttttccttcctaagtttcatggaacacactgaagagtatttgaaactgcctcatgtggtttgtcccctccagtctgacatggcaccattccataatataataatgacctgagcaaggcgattataagctgacccataagggaccaacgtaagctgatctctctgctctgcagatgacacaaatagaaagctttgaacaagagtagaaagacacactgtcacttgtcttttcccctgaaaaagccgggccacattctgctcagccaacatgttcccagaggaatgtgatttaacttccgcttttcacacagtcagaagcaacaccatagacctgtagggaaggtgatggccgcctgggaggaatttggataagtatttgtcactccagtattttcatgtgacctgactctcattctcaatttagttacatcttgacctgaaaatgcagccacaatatgtctctcttcatttggcataccttaattcataatgggcatgcctgtcctttcccttctcccaccctatgcagcctcttcctgatttcccttgcaatctactaatagagcctttctttagatgtctgtacatgtgtttacactctgtttccctctgtagggactttactcgcagaaagagaaaatatatttgagtccctgagatatatatacaaagatatctaccccaaagcagcctaggcagttctccacttctttggccagattgtctgactattcacgtatctggcagcttctatacgacccctcatatagtaaaggaattaatattccccacttcctcctagtttgtctcccctcctccctctatcaaacgactgatttttatacatgagataatagacaagccttgggtgacctgtttttttttttcttccctccccctctttttcccttgcggtaaaatagtgctgaagaaagagggcactagtgtacagcccagatcgcatccttgcaccgtctggattagagctgaggcgtctgcaagccgagcgtggccacggtcctctggccccgggaccatagcgctgtctaccccgactcaggtactcaggtatgtctcaagtccatgtcctccaaacagactcaggtgagcggacacttcctccggtgaaacccacccacaacggcagacaaagtcccagtctatcagattttcctccgggtcccaggcgcattctcgcttatgtatttcttttcgtcctgtatcctcaggaagagtcgggaccaatgggtgcctgggttttctttctcctttttctgcctcacctcctgtgctctcctcgcccgctcccatagcccccttttcgtcgactctcaccttgagaaaaggagcaggggaggaacgggagagggagccaacttcagccccgcaggcggctgagatttggcgcctctgtccccaagcgggtgggtttggatatatacctgcacaagcggtgcaaggtgatgagaatgagggcggaggggcggtggggactcgagtggaagggagtgtgtgtgtgtgtgtgtgtgtgtgtgtgtgtgtgtgtgtgtgtgtatgggtaaagaactcagaggagggaggttgaaagagcaaagcgggtcagggaattgcaactcactggtcaaagcgtcccttgcaggccctgccagggaatgtctggctggaccgagcactgtccagggtcctgaaggcggcagggctcaggctgccgcggcgagagcaacccggaagctcccctccgttccctttctagcaactatgcaaaccccaaagcaagcgcaggaccccccctaacccgtccacccaccgcgggaaacaagttaccttatctgcaccccttcttcttgaacatacacagcaagcctgacttcttacgggggaaacataccaaactcctccatacggagactttaccaggcgttgccttagtaactaatgtggattttcttcaagctggcaaatttatatttacagctgattttatgtcagggcttcttcaacccctcaaaattaaagtaaaaggtgcatcctttgtttacgtttattttaaagtcgcgcttccacctttacaatgagtttccaaattttcttctgaaaaaaagttgatcttttccaatccggaaagttctcttgggttgaaggacctagctcctcccctcctctctgctcaccttccccaccgccctccaagttagaaagcatgataggttttaggggaccaggaaacgacttaaggttggaggagcgggcgagttggcggggctctgcgccgcctggacccgtgaggacagagggggcaggacaccccgccttcctcagtgaccacagctgcgctccaagctgttcctgcagccgatatcaggatgtgccgaaatgaaacggacaaggcaactgttaacattatagaccccagagttttaacacaggtcctctgatgacaaggttgtgatttttctctgtcttttgtcagcagcatctagctcaccgctgccaacacgacttccactgtactcttgatcaatttaccttgatgcactaccggtgaagaacggggactcgaattcccttacaaacgcctccagcttgtagaggcggtcgtggaggacccagaggaggagacgaaggggaaggaggcggtggtggaggaggcaaaggccttggacgaccattgttggcgaggggcaccactccgggagaggcggcgctgggcgtcttgggggtgcgcgccgggagcctgcagcgggaccagcgtgggaacgcggctggcaggctgtggacctcgtcctcaccaccatggtcgggctccttttgttttttttcccagcgatctttttggaggtgtcccttctccccagaagccccggcaggaaagtgttgctggcaggagcgtcgtctcagcgctcggtggccagaatggacggagatgtcatcattggagccctcttctcagtccatcaccagcctccggccgagaaagtgcccgagaggaagtgtggggagatcagggagcagtatggcatccagagggtggaggccatgttccacacgttggataagatcaacgcggacccggtcctcctgcccaacatcaccctgggcagtgagatccgggactcctgctggcactcttccgtggctctggaacagagcattgagttcattagggactctctgatttccattcgagatgagaaggatgggatcaaccggtgtctgcctgacggccagtccctccccccaggcaggactaagaagcccattgcgggagtgatcggtcccggctccagctctgtagccattcaagtgcagaacctgctccagctcttcgacatcccccagatcgcttattcagccacaagcatcgacctgagtgacaaaactttgtacaaatacttcctgagggttgtcccttctgacactttgcaggcaagggccatgcttgacatagtcaaacgttacaattggacctatgtctctgcagtccacacggaaggtaggcattatatttgggaaagaagggtactgagaaagtcagggcaatgcatgatgtgctcctgggatcatagtattgttcctgtttatttctagcactgtggggaacggagtttacccttctcagtactgcccacccaggcattgccttttatcctcatttccttacaattatagtgtaggaaaattgtaccccatagaatatctgaggataataggagctgaaagggtatcaaactttccatgcaaagtgtccagcagtagatttgacttgaatacttgtttgccctcatattttgagtttgcgtttggaa

SEQ ID NO: 10875 - DNA, 6000 bp, Homo sapiens
aaaataaaatataatgataaagaaatgtttttatagagctctcagttttaatttctgaagtgatagactgtgataaagataacctaaataagaaaagctttttggatcctcaataatttaaaaatgtgtaaagagtcctgagactgaaacatctgacaactgtttatctattagaaagtgataaggggctgtactagggtaatggcaaacctctgtaactggaaattgaagagcaagacttgaatagaaatgaggttccagattttagaaagacatttaggcttatgtatcatttaaactagttgtttttggataaattttcaagagttgatttagttggaccctagatactaccttcaggcccttaaaagaatcaggtcctttaaggacgattctgtacagttaaatatagtgtattatttataataattcttcttgctaatttctaggccacatacaacaggatataaaaagccaaacaacaaaggataaattctttcatatgtgtgtaatcctataaaccctctttgaagttgattctcatatttttattttacagaaaaggaaaccaaatatcaggaagtataagtaatttagtaagtcacaaggaagtaaatagttgagactggattttgaactgctttttttttaatcaaaagtccggggctttcatccactttattctagatggctttgttttaggtttattgggtagaagttggtgtgaggagttttttgctttcatttacttatttatttttttaccatgcaaataaagagtgcctattccattttacttgatatgtatgcaacaatccagtgatcaaggataatattgtatcacaatgcatttgcattctcattagctatgcccatttaaaagttagataacatagaaaatatctataaacaaatacataaaatgttcctccaatgaaaccttggatgtcccatttttctgagcttcaaaccactgtaattgtttcctgcatagtatttatgtttgtgttcctcattaatagccattaatcatgtgttccattaacagccactctcaacagaatcaggactaagctattaaagtaagtgtaggatgaaggcaattctatgaataactaagccaatagatgttgaaattcaaagaagagaagtgacttttagcactttcctgggattcatccgtgctatgaataaatacgttgctttgaaacaaataatttttgtgaaaaatgttgcatgatatgggtttgatagcaatgttcaatctaaatgtatagataataaattattcttgcttcgaatagaaagcctgggctaagcaagaagcatcaacaaaaagacagatatttctattgtacaaattacatattaaggctcaatgaaataaaagatatatttgggatcaatactgtatgaaataattatgtttgtaataaattgactcatttatttgcagtccatctccttttatgagagacttgaactttcacaacagacttcagaccaattgagtaggaaatgaacaattatggaggaaacagggaatataccatagggaaactctgaaataacaaaaacttgaaattgaggtgcttttatactacatattaagtggtattaatttattatttctggaacagtttttctctaggtttctcaagactgtcaatatatttgaaagaaaattaaatttgttctgcagcttcctgaattgtatattaaatgggtggaagataccaagatataaatgttaaacaacttaaggaaggacatgcaatgataaccagaatattctatattcaaaatagaaggataataactatcctcactgaaagatgataaagaccaatagaaaacaaaaaaatcaatctcagctgagaatatgaagcacaaagttcaagtcctgctctagagagtaattgcatttttctataaaacagaataaaaaaacaactgtttctagaaaagggcaatgggaatggggttgctctttgcctgtaattctagaagaaaaggcatatggctagtccataagtctatacatttaagtcctggttggttgacagactatattgagtcaaaaaggacaaaacgtcttcattaaggttttcccataaagatgttttattttcaaactgtgtcattaaaaaaatcacccagattgttttatttttattttatattatttatcacccagattgcatatattttatgccattatctgggtataatggcataaaatatatgctaatcattttttcaactgaattcaaatattatgcacattaatattcatatatgtttaatatagaaagaaacacagagagtgagggagggagtccactatgtattaagtactgtgttagtgagcagacctcccttaggaaccttattacggagtacaaagctaggagagtaaataaagtatattaaaaaatgcatacaaaagatgacagaatcaccattccaaaagatcttggtggataagaatcatgaattggatctaacaagatgtaacttaaaagtaaaaaaatctatagtgttgtactgagctccctccaaagcaactataaatttataggagatgaaacatatgattcaccaggcataagaagaaagtttccgtaatcaaacactattgtatccatctttttaaactccagctcctatcacagcacctggtccaaagcagatctttagtatttgtggaactggcttggattgtgtttaggaaattttgtcattggtaaacctaaggagagtcaagagaacaacgtgaccaaaaaataaaactaaaaaaaaaaaaaagggactttcattgtactggtagaaagacaaagtttataatctggcttagtttctttttttgttgttgtttgttttttggtcagggcaaatttaggtcattatttttaacactggaactgtagtttcagagcagatagacaaactataatgagaatagatgaacagcaaggccactgaaaggactcagaactacatcttataagaaacaactgaatgatgctaatgtttaacttgcaaaagagaaaactcagttgatttcaaatatatgaaatatagtggtaaggagttatcacttattaagcaattactattgcaatgtatactcatttaatcctgctaacagacatatgaggtgaatattattagcctaccctcgccttttttaagtaatgagaagactgtcatcctgtagggtaaagtaacatgtccaaactcatacagctacaaagttacaaagctgatttataaaatgattgactccaaggtcaggaattattatactgtgtcttgtcttccacatgaactaagcacaaaggaactgaatgcaggcagacagatttcagctcaatataagagaattgttacattagttcatggaagaatatgttttaaggtatttttgttagtctctaggaaatctctgtaacattttattgtgtaaattatatgctttaatgtaagaggataaaaataatagtgaacattggcaaaatagcctatgattaatagagtttacctatgagttatctgtttctaagataaatgccaaaaaataatattggaattaaatgttcctttcaagatcttccctccctgctccctgaaattgcagtgaatttttcaagaccaactgaggacatgtattttcaatgtttatggttaaaagatatgtacatgcacagatatatacatgtacagaaatgagaattacttcagaattggtgttaactttagaaaaaaaaagaccaagaacttactcttggtatttacaaatttatttctaaaatagaagcactcatggacttagaagtaaggtataaaattcaaaaacgtatccatgtttctcaaggatcttgttgtaggccactctaattccatatattatgtggcttttcctagaatttttacactagaaaacagactgaatgcaaattttgttttgttttaacaaccttcttctcagaagcatatgtctatcgaggaagtcttcagataaaaaagataaacaattccaaacaggtctatgagatttaagatgtgaaagatcaacattatctttagttgactttactggatgccacaaccttctgatttctgtaaccacttcttatgcctcctacccactgaaacaaaatcagaggcaaacagagcttcaccctagaaattggggaaaatgaggaacaggttttctgcacaaaagtttatttgtttctcatttctttttcagaaaataaaggatcgctgttgttcccaacaggtttgtagggaagaaaattggagaaacattattaccttttcttagatgttggcaacggaggcaacaaggactgcaaaagaaaattgtgtgtcccccattcctaaataatcaaaattggcagtagggatggaagagcattggggttttagggctgttagggtttcatcaagccaatgtattccctgccagattttaaggagaaaaaggcgctggaaaattgagtgatgttagccccctttcttatttttcactgctaccaaagactaactctatctctctccccaacccttctctccatctccctcctttagatgtgtttgcacagaagagtgcccagtgaagagacctactccttggatcgctttgcgcaaaatccaccccttttccctcctccctcccttccagcctccgaatcccgcatggcccacgctcccctcctgcagcggtgcggggcaggtgatgagcctctgtgaactactaaggtgggagggggctatacgcagaggagaatgtcagatgctcagctcggtcccctccgcctgacgctcctctctgtctcagccaggactggtttctgtaagaaacagcaggagctgtggcagcggcgaaaggaagcggctgaggcgcttggaacccgaaaagtctcggtgctcctggctacctcgcacagcggtgcccgcccggccgtcagtaccatggacagcagcgctgcccccacgaacgccagcaattgcactgatgccttggcgtactcaagttgctccccagcacccagccccggttcctgggtcaacttgtcccacttagatggcaacctgtccgacccatgcggtccgaaccgcaccgacctgggcgggagagacagcctgtgccctccgaccggcagtccctccatgatcacggccatcacgatcatggccctctactccatcgtgtgcgtggtggggctcttcggaaacttcctggtcatgtatgtgattgtcaggtaaggaaagcgccagggctccgagcggagggttcagcggcttaagggggtacaaagagacacctaactcccaaggctcaatgttgggcgggaggatgaaagaggggaggtaaactggggggactctggaggagaccacggacagtgattgttatttctatgagaaaacctacttttctgttttttcttcaactgataaagaaagaattcaaaatttcaggagcagagaagttgctttggtaaaagctacaaatgtctaggggtggggggcggagggaagctatagcatagacttggagcgcttccttatactgagcaaagagggctcttggcagagtcctacactcagtccctctgcaggagctatggaaagagtaagttgtgaataatgggagagaaattctagttagctttcccaaatttggttggggccggtgtgtgtgtgtgtggcggggggagcagtctcaagtcttctcaattgttttgagatggaccttggcaactttcctactcctgctggtttagtacttccctgtaccacaaccccaccctttcttctcccctgccatagcagcccttacccaactcttcctttcatcctgaggcaacactaggtagaggaagttttcctagcatctctccatgacagttttcctctgttataacaaacatgacaaatgtgttgcctagaccagtttgccgttagtagcttcagatcgcctaagtcaca

SEQ ID NO: 10876 - DNA, 6000 bp, Homo sapiens; identical to SEQ ID NO: 3454

SEQ ID NO: 10877 - DNA, 6000 bp, Homo sapiens
cctgcgtcctctgcttcataccaccaggacctgtgctttaggggtgacccattgagcacccagcctaccacttgctgccctgctctgagaataaggcgcagtcccgaatcccaccatccctcccttctttttgaataaagtgcttcctcctctctgcccagtggcaggaggaatttcactctggcttctctcaacttctgccccgtggccgctggaaaggaagaagcagttttcctgcttcctctgcttttcctttctcatattccctccctcttcagccctataggtggggaaactgaggctggggaagggaagtggaagcatcatctctcaggtcagggagccctataggcggggaaactgaggctggggaaggaaagaggaagcatcatctctcaggtcagggaactctggagcagacaattggaaaggctcaagttgaccttggaccactcgtctccttcacccaccccactcacagcccttctgcccaccccccagccacttggtgagcatcccctccttcccagctgccttgacctccatgcaagtgggaagagacagagaccccagcctagcctctaactctctgtcctgcacccccactcttgcggggtgctcctgcagcatgtgtgaaggcctctctagcatgctggtgccaaatgtactctatcataaatcctcacctacctgctcctgcttagtcctgggtgaatgcatttagcagagctgtgttcagatccagctctctctgctcttagcctgcttggccccagccagtctctctcctccttcagcctgccagggcaggtggggtacaggtacaaatgcgctgtgtacctgggaaagcccttagtccaaatgggatgattacaggtgcaaggcccttatctgagacccttggggccaggtcttttttggaatttagaaagatattatggtgcaaatgccatacagtatgcaatacccccaggaggcctggggcagtatcctgagagcaaatttgggctggccttcctgcagtgcaacagacagtgttcccccaccaaggcactaggcaggggcagggaatagctttgatgcaagttttgttgccagttgagttgccgaaaactatggacaaacttgtggctttcagagcatttcggattttggaattgtggaaaggggagtttagtcttagtcaagttattactccaagccaaaagctggagaaagtcccagagaggtgggaggattcctggaggctggattcatactggcctgagggaagagcaaattcccagggctctgtcccctagccatcaaaggtgtcactcatacctgtcccagcctgtcccgagcaggctgtgggaatttctaagtgcccttgaggtgaaggagcggggctgaggtgacctctggaggcaggacagggacaacttaccccaggattgttaacccggggccctagccccttgacctcagcccatggctcctcctcagtgcctgcggggtgacttacggctccctggagagcctggggccactgcattctctttgcagtcagctcttcatcctgaaaatgtcctgccaggggacagttattgtttaaacagactcccccatcagagacattttcatctaatggcctggtttaggggaaaccaaaattgaaacccatcagacacagaggctgaggtgatggctgggtcagctcaacacggaagcatttatcaggtgttctgggtctgctcggttctctcagggaatctgcacctccaggctcactttatttcaacaaatcctaaaggtcaggattttcaaagacaattgtcctcctctattaggattctttcaaaaggttgggggggagttgctttccctcaccagggaggccagaaaaagagcaggaagaaacaatctgatgcagcaggagggagttaggtcagacctcaggaagaacttccaggtcacacaggtatgaaacacaggctcaggactctgtattattattttctctagaactccctgcctctctctcttcccttcacccttccccttcccctgcagagatggtgttgccatttccctggatgaggactggtgcaggaacgggcgggtcagcatcactccctgcttactccacgagtagcaggccagcctcctttaaaggtttaagagtgagacccagttctgaatcccagcatccttagggagaccttggcccagcccctggtctcactgatgggaaaaccaatgctcagagaggctggggggctcccccacgtcacatggttcttagcgcagaagtctcggcttcctggtttcccaccttgtgtcctcttcccctcaccccaactcttcccagtcagagcacgacttacaggggaggcagcttgttggagacacggttagaaatcaggccttggagcagctggtccaggccaagtcccttgaaacatgactccttgaggtcatctctgattgcttttctcccacagcatggtcccctagctcccccagggcaggggacgccactggaagttctttgaggtgtgtgtgtgtgtgtctctcagtgtgtgtgttagtctatgtgtctgtgtgtgtgtctctgtgtgtgtgtgtgtgagtctgtgtttgggtctctgagtctgtctccatggcaagtcaagtcagccacgacccagcagagagaacaagagtgagaagagcgtgccccagctgggcaaggggggcccacaggtgagggccgctgacggagcgcttggccactgtgatggtctggaggcccggggtggtcaggatgttgcccggaagagctaggcctcaggctgggaacctgcaaactggacgagtccacaaactcagccatctgccagccaacagtgtttctttttttaacccctgaaaaatatagcctgcccagccttctgcgacacagctggtggggggcggggggtgggataattatggccagagtgaaagcaacactgaggggcagggggtggggagagtggctgggtttgttttatctctcaataaaccatggcccatgttatcttcactttaattagttcattcattcattcattcattcattcattcaacaaaagtatattgaggattctgttctgtgttaaaaatttcagtggctcccacttacagccgcctaaatacagtactaggtgctgggcatacattatttcattctgtttttatgaacaccttgtaagtagggccccagtcactagcccatatggtacctctgagaagatcagaaaaaggaaacccatcttttgggcagacacagccacaagtcaggatgtgtcacttgtcaagaccaaggcagggtgaatttgagctgtcctgagccccctcaactgggtggcctcttggcagtgaacgatgcacaccccatacctgcagttctgctttgagattagtgtcgtaatccttgttctacagataggaaactgaggaccttgagcaatgtgacccagacatgcacatgtgacacaggcgggtttgaacccaggcaggctgttcccaagaacactgcctctccaggaataacttgagttccctgcaagcccagagcagtgcacacttggctgggcagagctgctgggcagcaggaactttcaaggcctttgcttatatctctacaaaatgtgtggtgctgaggtccgaatggccacggggtgcactcctcaagggcagaactgcgttcagtcgtgtgtttacacctagagctgggaatggagcaggacctcagtcagtgttgtttgcattaaaaaaaataaaagcatgaatgaatgaacaatctgggtgcttccctcagagacttcagaccgattgggtaaatgagacatgtatttgggtcattacatgtgacagcaaagagagtgcaagctttgccaacatttattcactcaccaaacattccttgagcttacgctaccgttcaggcatggtgccaggctccatggccaaatgatgctgaacgagatgtggttttggcctagcatagtctggagatctggaggaggtggagcctaagcaggtcttcaggaaagggcaggagcatggaaaagggcaaggagggagaaagggcagtccagttgcaagggatgggggtctgtccctgttattcccagaccctcccagacattcccctcacctaatttcccctgtagaaattagggttggccgagtcctgccaggcctgggcatcgtcaagcacaaggtagcacttggcaggtcagccgggggtcgaggtactgatggggagggaggcctctggccaacctctccagctctgctgcctgccaccttcttcccccagctctctggcacagtgttgtgctccctccccaggacaaggacagtcacacatcacggctctaattgaagccgcttctgcagtctggggtgagatgctcttgcaatcctaagagggctgcgtggctccctcacttccacgctgcctgcctctagcaacactctcctgagagttttcaagccccctctgggaagggggcgagctggctttatggttggctaagggattcttcccgagtctcactgcagcctgccgaccaggaggccacctgttacacttttgccatccagtgctggagggagaccagcgggtggggtgtttccctagcctggtggggttttgaggtggtaagggggctctgtggaaagtgtcccctggacaggctgtgagatctggggcaagtggagtcacctcactgggcctcagtttctccccttgttatatacttgaatcaggagcagtggggtgtgcaaatgaacatgccacatgggggcatacgccacgtgcgcgcggatgtgtgaggttccagtgacgcaccagggtgggagtagcgcgcccctctgcgtccctgtgctttgctgtacttttctgggtgtgtgttagggaggctatgttcctgaccctccccctctggggtgagaaggggtccccgccatgtcctcggggtaggtgagctggcacgcgcacggggaggaggaaggggggggcttccggaagagggcgccggtggggtgtggtggaagggggagctgccagcagggcgggtgtggaggggtggcggagcgccgcgagagccctggccttccggaggtggaggtgtggggtagggggtgggctccaggtgctctctctttaaaaggccggcagaagcgccgtgagcttggcccgcactttcagcgcaaacttgccggattggtctcgtgcctcctcgggtgcagcagcggctgtgggcgccggggcaagcggctgcggccccctcgcccccttgcgcttcccggctctcccgccctctcccgcagcctcccctctcagcgccttcctcgctctctcgtctctcgctccctctctcgctcgctctccagcgcgctctctagctcgctctcattttttttcctgctgctgttgccgctgttgcggcgccgccaggcgcccgtacctcggccggctgcgctcgctggtcgctcccgctccgctcccttcccagcccggagctctcggccagacccagctcctcttgccgcctctcccgctccttccggctcggacgccgggctccgccgcagcaggagcaggggttgccgccgatctccctctcgcttgctcgcttgccggagcagcagccgaacgccgcgcgcttggcggcggctccggccgggcggccgccagctcatccctgctgcgtcccggactccgggcggctccgcggcgcgctgggtccgcagcgtcagcgctgcccgccgcggcccgggctctgggcaccgcgagaaccgtgcctccggccgtcgactgcctgcgcccccggggcaggccggcacgcagccgacccctcgccgcggcttaaaccttgctggcgcgcggtgagttgtggcccgagggggaccgacagaggggaccgtgccctccggcctcctggggcgagggctgcggcggggacatcggggctcggggaggtggcc

SEQ ID NO: 10878 - DNA, 6000 bp, Homo sapiens
aattaactagatagataatagctagattgatagataaagtggcccagagaacgtagagtgaagacaggagagattgcccttttattcagtggataataaatgcatttaacagatcggttcattttccatctcttttagtcttctgtaaaaaggtggccttcccctccccaccaacaatgttaagagacaagcaaataaggaaaacatcactatgaacaagttaatacagcttatggagagagcctttgggaaaaaggtataaataagcagtatcaaacccaagaataatacgaacactttcaatagctatttcatattttcttgttctttacagggtttctccaccccaaactatagagccactaggccttgctgattttggacgttctgtaaaatttgcctgcctttgtcccttctccagatctctggctactccgatgaatcatttcttccaagtgcacagtgttagccacatgagagacctccactgaggccctgtagactaacactgcctcacttactgagtgtgggtttattgactatgatatagtaacctcacttactgcgctatggggtacttgggggcattttggagcagttaaaaatatcccatggggtcccacctcctcacgttaatgaggctaatctgtctcctcctaaatattatgcattcaatctcttgtatttatatgcaactttttagttatcaaaagacttttatgcctcttctttcaccatgtcacaggtaaagcaggtaacttattctcatctaatggaatacaaaaacaggaagttcagaggttaatttatttgcctcaatggcacaatgaatttttttggaggactgagatgagaagaaactcagattactgtctttgcagccccattttttttatgtcagtactatgaggataaaagtcatgtggaatagagaattgatgcgattggctggattctgtcagctttgtagccacatggtagatgtttgctgggaatctaaagttagactaaactattgctttgtccagatattagcaagttctatcacctgctgtccatcggcgtcaccctaggaacttaacaaagagaaaacaatgtctagacactttgccagagaaactgaatcactatctctgaggatggggccagggcatggttagattttttgtttgtttgttgtttttaatctccaaagtgattctataatgcagctggggttgagattcactgagtcttggctgtgtaagatacagtggctaaactgagaagcagaagcaatggctgtttatgaagccaagaaattaggaccaaaagtgtcagcagcagtgcagatcattagaattctggctgctgctgtctttcggaggaacagacacatctgcacatcagaatgaagaggagatttccgacacctccaacaatggcattgactttccagttttaattggaacaaccccactgacttcactgtagatatgttggctccctaagacttgcagattttacaaaggcagattaaatgttctagataaacaggatgtgctcttctaatgccagatgactatcagatcatactttttattcaaggtcactttgccatgttgtgtcccaatcccaagagaaaggggaaaaaaagaaatactgattatcctttgcatgagctgccactttctgggttgaactaaatatgaatagatgataagtcatggatgttttttaattataacgtttccctacagccttttccccactgacatttcttgatatagttcaagttagtatctctcgtcagtgcaatgtttgtctccttgatagagaggactaccgggcctgttcagtatttatctcagtttccccaggacctacgagtttctgcacagagtaggtgctctaataaggatggttgagttaaatatacatattagctaagggcacaccatgattcacaagttacttaccagctcaacatttcaaatcacatggtgtgactctggtcatgatggttaaaataactggaatcttcccggcttcctaaaaggtaatcgccaacgtgaaatctttaaaattacagcctagtagaatcacctactctggagtgacttgctaagtgctgtggaattgcaaaggcaaagaacctttctcttaatcagctcagactcttagtggaaagcaagttacaggcattgagaattttaataacaaacaatttttttgattgaatttgttttaattattatacttgaagttctggggtacatgtgcacaaggtgcaggtttgttacataggtatacatgtgccatgtttgtttgctgtgcccatcaattcctcatttacattaggtatttctaagagaaaaccaaacactgcatgttctcactcataagtgggagttgaacaatgagaacacatggacacagggtggggagcatcacacacaggggcctgtggggggcgggtgagggttaggggagggatagcattaggagaaataacaaacaatatttatcgagtatttgctatgtgccagggaccatactcagtgttttataaacatgattgttaacccatttagttgttccaataatcctatgcctcaaataaaatcataatccccattttatagatgggggatccagaaaagttaagtaaatcacttgagacaaaaagctagcaaatagaggcacgttaagattccatctcaggcagtctgacttcagagtccatatgcctaattaccgtgctatgcctgaaaaacacacagtgctgaaaagtgatccacatggcaggaccagatgagtagctgaggagagaaatgcggttcatgcagtggaaagatatatctctggggaagacaaaataagagacaatatgccataaaggtcagagttcagactttggagacaaacttggccacttgccaagtgtgtttgtttagccaaggctcagtttcttcatctgtaaaatgaagatgatgatacttctcataaacaggattataaagattaaatgagtctagtgcatgtatagtgcttaacctaatgcttgccatatggcaagtgtctgacacacagcaagtgcttgataaattatagtaattgttgttaccaaatgaataagcaagacctgaaataatgagtaaagctcagaaaggagaaatagagcatttcagttaccaagaatagcgcgagaagaagctgcaaggtagcaatgcattccactaatattgtctcttaatatttatgacaaaagaaggtacaataaaagctgggagtgggtcagtttgctctatactcaagtgttatgggagaaaaattgacagagctcattttacattaggtcgtggtgatcatgcttgcctggtgaattggcttaaatattctctgggcatttgcaaacatttaaagtatttaaatatgatctagccacaatttaggaagaatagtgctctgggcaaataaattccctgctgttgtgttggattattggtcagggaagaaaggagcgaggggcccattcaggagattattgagaccatctagatgtaagatgataatgtcccaaccaatgtagtggcccaatgtccaaaaaagtgtggtgagatgacaatatccaaaccgatgaggggctctgagcacatcagcagcaggtaacaggacttagtacccggtcgaattgctgcttctgctcctgcaccacttcttgtgtccaaggacacctgtgaagctgtgagcctaggaaacaatgaagccagcagttggcacatctgggaagggatgggttaggagagagcagtgggacaggagacaagttcagttttcgatgatctgaatttacactcaagtggaaagagtatagttgaaaagccatgcctaatatgtagcaaagagaggaaataggcatgcagaggaaagagatatctttggggacaagaaaagaggcaatatgccataaaggtcagaggctggaaatacagttctgggaattctcacataaactgacaattaaaactatggaagtggatgagcttactataagaaggtgtcaagagagaagagctgtagacccaggagaggtatttggcagggcgcacagtgaggcagctgcaggatgatgaggatgggagcatagaaggagaaaaggcataagctcgggagccttgagaaccaggaaagggaaagggaaagggagcgctgcagaggaggaggccatgcacaaatggagcaggtacccaccgcaagccagggagagtgaggactggggcaaatgttgtgggtttgcctctacagaatacttttcataatgaggtgaggactaaagtcaaactgtccagagtaaggaaatcttgaactagcaaggacttttcagggtactgtatttcttggggttgggggtggggggataaagtaatattttttttttcattctgaatagcacacacattatatggttaaaatctaacaaaatccctgaagaaggaaatgaagatttagaagagaagtcattggctaaggacagcaaagccatttctcagagagatggaatggatgggggccataaagggaggaagtgcagaaggctaaggtggccctgccaattactgtaatgttggaatattttaagccacattgcaaataactgcttcctccagcccctggagtgcctccccacctcttctttagtcatccagtccctttcctgggatcctacacagacttccctacaatccagcaatgacactgctaaggtctagcccagcaggagacccccaggccctgctcctgcacagtggacagagattgttctgattggtccattattattattattattattattattaaaatagtcaagtattattttggagcttacctaacacatggtagaaccacagaactgtgaagcttgagaacaacctaatgtaaaatgagctttgccaagttttctcacataacatttgagtatagaacaaactgggccgggtgcagtggctcacgtctataatcccagcactttgggaggccgagatgggcggatcacttgaggtcaggagttcaagaccagcctggccaatatggtgaaaccccatctctactaaaaatacaaaaatcagccgggcatggtggcatgttcctgtagtctcagctacttgggaggctgaggcaggagaatcgcttgaaccccagagtcagaggttgcagtgagccaagatcatgccattgcactccagccagggtgtctcagtgagattccgtctcaaaaaaaacaaacaaacaaaaaaaataaaaacaaacaacaaaaacctgacccattccacagggcttccctccgtctgcaattggaatgcacccctgggcattgttttgccatggcttagggaaacccctccacatggtgaattaatgcaagacggactagataagagcagttaggaactcaatgttttcacatagatggcaatcttttgcttaaagcctaagacccacagtgacttaacaacaagaaaagagggataaaaggttatcaacgccgcccacatgtgcagtgtgttttggaaaacttgatcctattgtgtacaaacaaatgttcccctgtaatctgatagtactgaactgccctgacacaatgctgctgcagggcctgatttcaaggcaatggaaaattaaataggaaaaaaaatgtcttcaaggcagttctttaattgttattgtgtcccatgtttgtgttaaataaatatttagcttatatttttgcttgtgcaggagatgaatcatctaatcaaataaggtcagcaaagataagtcttaccacctctgcagctgaaaatacagatttatgaaggcaggctcttaaagttacacttaagggttttttaatctgtacttctacagttcagggagtaggttgctgatggcattctatccttattgcaactctgtatctcatggagatgagcagagtaataatcatagtaaaatttgcaatgatagtcctcctgaaag

SEQ ID NO: 10879 - DNA, 6000 bp, Homo sapiens
acatctatacttacaggaaatcaggagttaatatatttaagtgataaaccaaaaagtaatttcttcatgttatttagatatataaagaataaatatatgaaaaaacctttaaaataattaagaatgagtacctctaaaaacaggaatggggtggtgaagattgggacagggtttgatgatcaccttaaaacttatctaattatttttaaaattatgtgcatattttatgaatattaaaatgagtaaacaaaaaattgatcccacaaaacagtgcaaatgaatttagttatctaaatatttatcagaatgtgtgcaaagcatagtggtcgtagggaacaatgggattaataaaatcaatggctgccttctaggagaatatagccttttcagagaataaaacaagtacttaaagcactccaaagatcacttgagcttgggaggtcaaggctacagtgagctgtgattgtgccaccacactccagcctgggtgatagagtgagatcctgtctcaaaaaaataaaataaagcactccagtggcaggtaagactaaggaaagaggaccaagagaatactacaaccgctactgaccattctagccactgaagcccaataaatatgacattctggcacactccaaatataaaacactccacttatatcattaacctgatagcccagcattgtttctgtagatggaataagagagaatcataaatccagtcacttctaccatacgcgagttttacaagtacacatacatgtggtgtgtttgtataaacatgtgtattatgtatgcatatatcatgtgcacacattcacacataatttaaaatttttctcacttggaagatttgttaaacatttccaacaaatggcaaataaagactagtcgagattggatttaacattaagactcctgtgtaaatgttaccaacctacgctgtctgttgctctcatgctgttactgtcctatttcatttggaaatacaaattgtaagtgtgaaactttttaacctattcttacataaaattcaaagaaacttcaggtgacaatgatatttgatgagaaatgcttagaggaaagaatcttttaatgtagttactgtgagcattcaagagcactgctttggttattatacttcataagaaaaggaagaaggccagggaatatttacattccaatgagccaggagtgaagtgaatgacgaccactgtacagatactgaggcaaaggcattattaagtctgttcatgctatgttccttagtattttaaattgaagttattttccttaatgtttaactacaaaaatgcttttgtttaatttctttgttaaactctttatttcttagagaaattgacaatttatatctaataggcactgaaaagttgattagaatctctgtgttcatgggctggtttgacagtgggtaggcttccatatacaggtgactggtcaccaagctggcattgttcttgggctaccatcagatgttagtatctagaggtttttcctctgtggcagtttagttacagcctttgagtcttctgcatgggcaatatgtgcctggcttctggcagtctgagagcaggatggcaaaaggagctaggttctcaaattgaatatgcattcactcagtccccctgttttcagccttgcactaatattttcgagtgtggtgcttgtcaggttcagttgtgccacagagttgggctactgaaatggagatacgtgctttcatgtgattgttcagagaggagaactaggtgtggagtggggttccagtgtctgattttcagtcagttttccagttttcagctctgcctatatactctgtggtaattggcatccagagattctctgggcatctacaggattgtttcagtttcttcaaagcatatttccctggaagtattgagaataaattgttctctgttctggtttcttaagtcagttactacaacaccatttgctttttttgccttaaaacattaaaaaacatcctggcaaaccaggtgaaaccccgtctttactaaaaatacaaaaaaaaaaaaaattagctgggcatggtggcaggtgcttgtagtcccagatactcgtgaggctgaggcagaagaatgacgtgaacccaggaggtggagcttgtagtgagccaagactgtgccactgcactccagcctgggtgacagagcgagactctgtctcaaaaaaaaaaaaaaaaattagaaaaaattttttatctactgatgtgtttttcatttatacctcttgtccttttggtttatatactttgtttaaaaaatccctttactgtcatttcagtgtaattttcgggatgtggactgtggtcagtcttcattttttacgagaaatttagaaaccatttatttgctcaccattttccttttagtacctggcatgtagtaggttcttaaatagatatttgatgaaatattgaatgaattgttagaagtttttatagttgtgggaagcttttatggtagaaagatacaatgactatgcaaatataacaagttaaaagtcatcttttaaattatggttttactttggcttcatcccattttttgtttttgttccttaacatggtcaaggaaatgaaatattttaaacagtgtggtagtacaggatggatatatgttagtttactttgtcaaacacaattttagctgtcacattaggcttaagatacacatttgtctatttataatttttctagagaaattacctctacctctatggaggtagacttgtattgaggttaatttacaattaagcacagcctttagtcttaattatatgtatatttagggtacttctatagaggctgatggtgattatggtgtaaaatcttccaactaccactgctctcttcccactggcccctttgtggttaataaagttcaagagcagctggcttagtgtggcatcttatccaggtatgttttgtattacaaagtgaatatgtgaggatagataaaatctagtaagggcaaagaaattaaaccgtagaagtgaacgcaagtagtaaagttgatattttgaatgaatagatcaggattcttctttttataaaggcagccctggacaaaaaaagatgggattgtagagctataggtatgtagagagtccctgatttggctacattgctggatcttgggtcttagaaatgtgatatccctacccatcatgcattagtaaatgaatgaatgaaattttgacagtgacccttaaaatcaatgactaggctgggtgcagtggctcacgcctgtaatcccaacactttgggaagctgaggcgggtggatcacctgaggtcaggagttcgagaccagcctgaccaacatggagaaaccccgtctctactaaaaatacaaaattagccgggcttggtggtgcatacctgtaatcccagctactcgggaggctgaggtaggagaaccgcttgaacccaggaggcggaggttgcggtgagctgagatcgcaccatctgggcaacaagagtgagactctgtctggaaaaaaaaaaaaaaaatcaatgactgattctaagtcgaaataatgagtaaactgcagtttgttttaaactgctgtacatgtatgttttcccagtctcttaagagcttattaaaggaatctagccagaaattcagagacttctttctaactataaagaggttacctctccagtaaagacctacggaaggaaaaacccataccacaaaatgtgtaagacagcagataaagaaagtcccttacagaaaactctggagttacagaaatctgggtaagaaattgggggttaggataagagaaaggtgataagaaactttttggagcaagctaactaaatatgtttgtaagttttctggaatagattcttcatacctgaatatttttctagtcatctctcctttaacatctctatctttgttatttggttgacatattctgatcaagttgctaacacaaaataagattggttttttagggagaagagaatagaggagatagatgtatacatatcagaaaagaaaggatgaaagtcagtggacttgggagagaagagagactatgagaagcaaagagagctttagtaaaataaaacttttgaaaatattaccaagacatcttagaatttttcttctcctcttgagtaagttctccagtatggttggtggtggaacttctggaaagaaattaaaaatgaatgaatttttaattcaaaaactaaaaatgaaaaaaattgatgaattaattggataaataaataaatagcaagccaagaaaatgtttcagatcttcattgacaattacttagtgcctacttataaggatgttagaactaaagtgtgtaattgttatgtgtgaaataggaaacctgctttaggtttctttgtcatctggttttgtgctaatgtaaaattagagtaagaacttgtaccaaagaactattaattaaaaaaaaatagtgctcaagagaaccaggtaataaaaatctgtattaatagtgactatagcaaagcatgaaaattaaaattaacatttaattaaaattaaaggcactggaaatattttaaaaattaacagtaagattataatttttgtctttggggcagtaacacattttgagattcctcgcacttttgctttatatatgaatgtcatgaaatttccaccatggttgactaaagataaaataacagaacgatattttagtgttgactacactggagactaaaatatttttaaacggtcaaaaagagcaaaactgatccttcatgatgaaaggcagccctggagttaaatgttatttgcaaatctcatttctcatttactttttgtgttttggttttattttcaggcaaaaggactcttgtggaagatggaactcattgtccattttccagaatgtatttccaagcccatcaatgggacctgatactgctgttctgtgttgaaatgcttgaagaactcctgcatctctgcttgcatcttccatcctactgaaaccatggtcttctcggcagtgttgactgcgttccataccgggacatccaacacaacatttgtcgtgtatgaaaacacctacatgaatattacactccctccaccattccagcatcctgacctcagtccattgcttagatatagttttgaaaccatggctcccactggtttgagttccttgaccgtgaatagtacagctgtgcccacaacaccagcagcatttaagagcctaaacttgcctcttcagatcaccctttctgctataatgatattcattctgtttgtgtcttttcttgggaacttggttgtttgcctcatggtttaccaaaaagctgccatgaggtctgcaattaacatcctccttgccagcctagcttttgcagacatgttgcttgcagtgctgaacatgccctttgccctggtaactattcttactacccgatggatttttgggaaattcttctgtagggtatctgctatgtttttctggttatttgtgatagaaggagtagccatcctgctcatcattagcatagataggttccttattatagtccagaggcaggataagctaaacccatatagagctaaggttctgattgcagtttcttgggcaacttccttttgtgtagcttttcctttagccgtaggaaaccccgacctgcagataccttcccgagctccccagtgtgtgtttgggtacacaaccaatccaggctaccaggcttatgtgattttgatttctctcatttctttcttcatacccttcctggtaatactgtactcatttatgggcatactcaacacccttcggcacaatgccttgaggatccatagctaccctgaaggtatatgcctcagccaggccagcaaactgggtctcatgagtctgcagagacctttccagatgagcattgacatgggctttaaaacacgtgccttcaccactattttgattctctttgctgtct

SEQ ID NO: 10880 - DNA, 6000 bp, Homo sapiens
atcaccagtgatcccacaaaaatacaaactaccatcagagaatactataaacacctctatgcaaataaactagaaaatctagaagaaatgaatagattcctggacacatacaccctcccaaaactaaaccaggaagaagttgaatctctgagtagaccaataacaagttctgaaattgaggcagtaattaatagcctaccagccaaaaaagcccaggtccagacagattcacagctgaattctaacagagttagaaagaggagctggtacgattccttatgagtcaataaaaaaagaaggactcctccctaactcattttatgaggccagcatcatcctgatattgaaacacggcagagaaacaacaaaaaaagaaaatttcaggcccatatctctgatgaacattgatgtgaaaatccttaataaaatactggcaaaccgaatccagcagcccatcaaaaagcttatccactacaatcaggtcggcttcatccctgggatgcaaggatggttcaacatatgcaaatcaataaacttaatccatcacataaacagaacctatgacaaaaatcacatgattatctcaatagatgcagaaaaggactttgataaaattcagcaccacttcatgctaagaacactcaagaaactaggtactgatggaacatatctcaaaataataagagctatttatgacaaacccacagctggtatcatactgaatgtgcaaaaactggaagcatttcctttgaaaaccagcacaagacaaggatgccctctctcaccactcctagtcaacatagtattggaagtttgggccagggcaatcaggcaagagaaagaaataaaggtattcaaataggaagaaaggaagtcaaattgtctctgtttgcagatgacatgattgtacatttagaaaaccccatagtctcagtccaaaaactccttaagctgataagcaacttcagcaaagtctcaggatacaaaatcaatgtgcaaaaatcacaagcattcctatacaccaataacagacaaacagccaaatcatgagtgaactcccattcacaattgctacaaagagaataaagtacctaggaaaacaacttacaagggatgtgaaagacctcttcaaggagaactacaaaccactcctcaaggaaataaaagaagacacaatcaaatggaaaaacattccatgctcatggataggaagaatcaatattgtcaaattggccgtattcccaaagtaatttatagattcaatgctattcccatcaagctaacattgactttctttacagaattagaaaaaaactattttaaatttcatatggaaccaaaaaagagcccgtatagtcatgacaatcttaagcaaaaggaacaaagctggaggcatcatgctacctgacttcaaactatactccaaggctacagtaactaaaacagcatggtactggtaccaaaacagatacatagactaatagaacagaacagagtcctcagaaataacaccacacatctacaataatctgatctttgacaaacctaataaaaacaagcaatggggaaaggattccctatttagtaagcggtgttgggataactggctagccatatgcagaaaactggaactggaccccttccttacatcttatacataaagtaactcaaaatggattaaatacttaaaaataaaatgtaaaaccataaaaccctagaagaaaacctgggcaataccattcaggacataggcatgagcaaggacttcatgactaaaacaccaaaagcaatggcaacaaaagccaatattgacaaatgggatctaattaaactaaggagcttctgcacagcaaaagaaactatcatcagagtgaacaggaaacctacagaatgggagaaaaattttgcaatctatccatctgacaaagggctaatatccagagtctacgaggaacttaaacaaatttacaagaaaaaaacaaccccatcaaaaagtgtgcaaggactatgaacaaacacttctcaaaagcagacatttatacggccaacaaacatatgaaataaagttcatcatcactggtcattagagaagtgcaaatcaaaaccaaaatgagataccatctcaggccagctagaatgacaatcattaaaaagtcaggaaacatcagatgctggagaggatgtggagaaatatgaatgcttttacactgttggtgggagtgtaaattagttcaaccattgtggaagacactgtggcgattcctcaaggatctagaactagaaataccatttgacccagcaattccattgctggatatatacacaagagattataaatcattctactctaaagacacacacacacatatgtttattgcagcactattcacaatagcaaagacctggaaccaacccaaatgcccatcaatgatagactggataaagaaaatgtggcatatatacaccgtggaatactatgcagccataaaaaagaatgagttcatgtcctttgcaggggcatggatgaaactggaaaccatcattctcagcaaactaatacagaaacagaaaaacaaacactgaacattttcactcagaagtgggagttgaacaatgagaacacatggatacacggaggggaatgtcacacaccagagcctgtgggggggtgtggccaaggggagggatagcattaggagaaatacctaacgtagatgatgggttgatgggtgcagcaaaccaccatggcaggtatatacttatgtaacaaacctgcacattctgcacatgtatcccagaacttaaagtataataataaaaaaacttactaatatctaatctatttattctattaattttgctagatgtatattaaaacatctcccacaaggattgtaggttttgtctgttttctcttgtagatgtcacttttccctaatacttggaaactttattattaaatctagaaatatatcttcttggtaaatgaaactcttttttactatgtatccttttaacttgccatgtttttggcctcaacatatttcttttctgatattagtatgagtatggatgctttctttggtttatgctttttctgatatatgcttttttaatctttttacttccaaattttctttattcttatgttttagatctatgcttaaagttttagatctatgcatatacagttaaatgaaaaaataagagcaaaacaaattccaaaagacagtaaaacattttccaaaagacaacatgctatccattttataaagagttctaaaaacaagccaaacaatgttttgatttacttatataaatacacatggcacaactattaaataaatagaaaaacgataagcacaaaatttaagagagtagctacctgaggtgataggcagaaaataccatagagatgtatgtaagctattgttaatctagttctcagtcatgtatgttcattttgttagaaacaaacaaataaggcaagcaagacatacttggcataattattgtaattaattcaaattctttgtacctgagtttcattaaaaaatgtgaacttatgttcgtgacataccccttttcttcagcttaaggtacaaaataagatcatatctctttgtaatattcaaattaatctgcatttttcccatttcccttagggtcttgtcttttggttatattctctgaggactgaatccaaagactgttttcccaggctgctagcaggtgtcactgttgaaaataggtggtccccctttctgttgatgccattccgactgccatgacatggagacaccaggttatgggggggaagctgtggtttctaagggcttagaaaaaaccaagaggaatgagctggtactcattacatttgcatcactgcagagctgttattcttaaatcttgtgttcaggattggagacactggttctgaagacttttcttaggctcagctgtatattgtttgtctccaggctttgattttaacttttcacccctggttctcctcctgccatctgtcatggtctgtcctgagctaattttttaaaattttttgtagagatgaggtctcactatgttgcccaggctggttttgaactcctgggtttgacaagtctcattccctttgctccacataagttcctttgcgtgttaaaaatacacattaagttctaaccttcccctgctactcgtctcccacctacataattaaaagagaacacttaagtaattctttacagaaaccagaaagtttgtccaaaatgatttttggtctctcccagaagaaatagaagttgctggcaatttttgagtagcaatgtgttttgctatttctacccttttggctaataggtataaagatttcttttaaaatactttcatatacatgatcttatcttatctcattcataatataaatcattattttatctcatctcattcatagtataactatgaatatgctttgagatgaaaagagatttttttgttgctgctcctgtttcacttcttcaagaactactagccaggcgtggtggggcatgcacctatagtcccagctacttgggaggctgaggctggaggatcgcttgagctcagaagttcaaggctgtagtgagctgtgatcatgcctgtgcattgcagcttgggtttaagaacaagacttcgtctctaaaaaagaaaagaaagaactactaagggaggttcagccaggactagctatgtattttcacaaggtccagtacaaaatgaaaatgtagagccccttgttagaaagttattaagaatttcaagagatcgcatcaaagcattaagcgtgacttcttcaaagctcagcttccattatgacggcacaatctgcacgcccaagcagtggccgtaggcagagccaacggagatcacacagagcactgtaatttttattcatgcaggaccccagtttcttctaatgaccagggttatatttcatctacatctggggtatcttgcctcccatggctgtctcatcagagcaacatgaactttcacatttcaaaagaacacagacaaaaaaggtaggcccttaaacatatgactaagtttaaaccagtagcatctgagaagattttggcataaacatgtgaattatttacaaagataataattatgctcaattcctccagatctaaaagggttgatgaaatgtgttcttttaatcacatttatcaaagaaaaaatgaggaagacaatgggtaaagcctcagtgactagcatgtgagacaaaatatggactgtgactgtcagatctttctgaaatgatggaggacacatgcgcattcttctgcttgaaccagaggtcccatccatgtgtggttgagatcaggctccttaggtccccccataactcaagggctcagatttgttttcacagcctttatgtaatagcagacttagagccttaaatgctgtaggtgataaaatcttaggtaagcagagactcctgggaggatggaggagtggtttaagctcattgagctgttaaacttttgaatgacaaggattttgctttcttttttttttttttcactttcagatttaatccccttaagacgaattgttaagttataaatcagcacaactcacatagtttaggtcttctggttccatatacacattaacagtagttagagaagaaacaaagaaaaaagttccttcggtaaggagttaacaatggaatcttctgccggtatgtggaagatgagggattatgaaacaaagatctgtgttttctcttccttgaggttttcttaagaagtaaattgccatcctgataatgccgtcgattgctgttgcattaggtcttcctttttgaattttggtcctgtgcagagagaatgtgtaggcatgtggaagattgtggaaggtgcaggacttaatatgaatttgtaataaaaggcagtcattttaacatgtgaacgaaataacatgctgccttctggcagtgtaacaagtttc

SEQ ID NO: 10881 - DNA, 6000 bp, Homo sapiens
acatacaaaaaaattaacatgggtcatataaataaacatataagctagaaattaaaagcttctaaagaagaacataaaagaaaatatttatgaccttagaataggtaaagatttcttaggattcaaaaagcacttaactgcaaaaagataattgatgaattttgagttaatcaaacttaaaagcttcttctcctttgaagacgccattcaaattgaaacatcaaaccacagactgaaaaaatagcacagtgcatttatttgacaaaggacttttatgcagaatatatgaagaactcatatacttttatcataaaaggaaacactataaaatatggacaaatgacttgaacagacacctcacaaaagaatatataaatgaccaatgaaaagatgctcaatgacttagttgttggataattgtaaatttagaaactactgtgagattaataagtctagagatctaatgtatagcctgaggactacagttgacaacattgtattatatactggaaatttctaagagaatagattttaagtactcttaccacaagaaaagtaactgtgagttgatagatatgttaattggcttgaccatagtaatcatttaactatgtatatcaaaacatcatttgggaggccgaggcgggtggattgcctgagctcaggagttcgagaccagcctgggcaacatggtgaaaccccctctctactaaaacacaaaaaagtggccgggtgtggcagcatgcgcctgtaatcccagctacttgggaggctggggcaggagtatcgcttgaacccaggaggcggaggttttagtgagccgagatcgtgccattgcactccagcctaggagacagaatgagacttgtctcaaaaaaaaaaaaaaaaaaaaggaaatcctgtatatcctaagcatatacatatacaacaaaaaattttcaaaattagcctggcttggtggcttacacatgtaactcagcactttgggaggcctaagcaggtggatcacctgaaatcaggagttcgagatcagcctggtcaatgtggtgaaacaccgtctctactaaatatacaataattagctgggcatggtggtacatgtctataatcccagctactcaggaggctgaggcaggagaatcacttgaacctgggaggcggaggttccagtgagccgagatcacaccactgtactccagcctgggcgacagagtgaaactcagtctaaaaaaaaaaaaagccgggcacggtggctcacgcctgtaatcccagcactttgggaggccgaggtgggcggatcacgaggtcaggagatcgagaccatggtgaaaccccgtctctactaaaaatacaaaaaattagctgggcgtggtggcgggcgcctgtagtcccagctattcgggaggttgaggcaggagaatggcgtgaacccggaaggcagagttttcagtgagccgagatcgcgccactgcactccagcctgggcaacagagcaagactccgtctcaaaaaaaaaaaaattaaattaaaaagctataaaagctataatgagatatcacctgatatccactagaatgtctatcacatgaccctgaaattccacaaataggttttgaccaaagagaaatgaaaatacacatacacaaaagacttgtacatgaaagtttatagcagattgattcacaacagcaaaaactggaaaccaccccacactgtttctctattacagcataaaaagttatcccaaaacttaatggcttcaaacaacaaatatttattatctcacagtttctatgggccagcaattcagaagcagctaaatagtagctggtgattctagcttaggatctttcttttaactttttaaaaactttttgtgaatacatagtagatgtatctattttaggatctttcttgacattgtagtcaagaagtcagctgattgtatttctaagatttggatgaagctgaaggattcacttacaagatgtcccagtcacatgttgcacgtttttagtagggagccttagtttctccccatatgtgtgtttccattcactgctaggatggcttcctccaaagtaaacaatccacaaagaagaagtcacaatgttactgtgacatagtctttgatgtcacatcccatcgtttctaccagattctatttgttaaaactgagtcactcagtacagctcccatgcaaaggtaagggaagtaggctctactttgtgaaggggatataagaaaattgggggccatattttaaaacaaccacaaacctgaatgttcatcaacaagtgaatggatgaaaaaattgtgatatatttaggcaagagaatactactcactgatatttttaaaaaagaattggactattgatacacaaaacaacagggatgattctccaaactgtggtacagagcataacacaccaaacacaaagagtatgtgctgaatgaatcttttatgtgaagttctggaaaaagcaaaacaaaatgatagaaatcagagcagtggttgcctagagcatggggagaattattgtaaatgggcatgatgaaatttctggagtgatggaaatgttctatatcttcagtagggtaatggttgtctggatgtatacatttgttcacattcagtgaattgtccattaaaatatgtgcacttcattatgtaaattataccttaattttaaaaagagaaaggaaataaaccaaagtcaggggggattgaatgagcacattcgaggcttgagaggaaggctggaaatatgggacactcagaaggtgtggatcaggagagaatagtgcccttttactccccagtgacacggagaagcagtggtgacctttttatatgccaaagggaactcagttgctggcacacttcctttgaatcttcacattccttcttaaccattagtagctgtggccaattagctgtctataggttatggggcacctagtcttggcagaattaatgagctacttctctctatgggatgggagtcttgggattcctccccccatcatctcactatgcctttttttctgcctttaatgtcactaaaagagaggttaacttactggattgaggaaaagaagtcgttagcaagagttccatagtaaagcgctaactctagctcatgtgtctggcagagcaatggtggaatgtggttagcgcatagcttcttcagccagcccacctgggttaaaatttggtctttggtgcttactagctatactttccagaacaagatattcaacctctacatgtcttcaattattgatctgtaagggaaggtaataatagtacccaccttttgaagttataaggagccgtaaatatgaagcgcttttttgagtgcccatggaagtaagcactagcaatcaatactcttaactgaaatccaagttccaataatcatcaagagtataacattcctctttagtttgcttttagttctcattgtgagatcacaagtggaggctccaaccagtccagaagttcctttctatggggaagctgtggcagcaaggccgtgaagagagtctgacttaattgcaagtaagtcacaagtttattcccctacagcccatcaatttccacatgttcttaagacagttctgaatcaaacagggtctacaatcctggcactgacactcattggcagggtaaccctgggcaagttacttaacctctttgagactgtttgttcttctgcagagatattaactgtctagcagggttcttttaagaagcagatattccaggaaattatttagcacagtgttagtatataggacatcaacagatagtaactgtcaaaactataagtggttattattattgaactgtagggcagaatttgtctcataactttgtagcagttagtacatgactggctctttgaggaccaaaaaagaataaattaatgtgcttctgtgtggagttaatgggatgtagggaaagtagtgcttgcctattattggtgtcagagaaaaggaccagaagaaacagggtaaggaaaaggcatgttattaaagatagaaaataggagagtgcagagggtcaaaggaagatataaactgaagagattaagaaaaaacatacagtgagacaagttgccaagagagtaagaatgtaagaaatgctgcagtttatggatgaataaaactctggacaattgctgagacacaaaagatatgaggctgcaaagtttaaaaaggaacgatacatttaaaataatcagaatagtgtttacttcttcagtgggagagaaggagatgtgatcagggaggagaacacagaagacttctaagataccagtaatatttgatctgttcttaaatcaggaggagattcaggtacaccatgtgtttattattccataaaatccatagatgtgttttatatactttttgtttatatgatttttaaaaaattaagggaacaaatcttatcctcaaggagagacgtaatgatggaggaaggaatatagaaggagacaaaaaggagggagtcttgatgaaaagggagatgggaggcagcttttaacaccagacagggtcctgtgatgcagaggtgattgtgccatcccataaagtcccagggcactgtctgccaatgagaccaccaacttgcttgccctaaatggccacatcccctaaacggccctcctgccattgtctgtgctcagaaaaccctcagtttctgcctcttacctgccagggtggtgccgcatcccacccccatcattgagcttgcctcatgtgtctcagcacagtcttttacagcaaaaatgcatgtcacctcctcctaaaggctttccgtggcccacccacccagattcctcctttattgtgcagactctttcctaacccacacctcatcttaatttatttgccttcaattctgggcggcggtgttggggagggtctcaattttcccatgtatttcccagtgtttattgaatacatgaggccatactcttctagtctctctgcttctcatgctaggaactgaaccgaccagcctatactttaaggcttgttatttcactgactaaggaaaggctacttaagagggcaagctcagacatacataatctggagtggatcttccatgggaaaacacgtatataacagaaattattggcaaaactataagtatggtctacagagtaagtaataatattttattatttatttagttagttttgagacagagtttctctctcgttgcccaggctggagtgtaatggcacgatctcagctcactgcaacttccacctcccaggttgaaacgattctcctgcttcagcctcctgagtagctgggattacagacacccaccaccacaccccgctaatttttttttttttttttttttttttttgtagagacgaggtttcaccatgttgaccaggctgatctcaaacatctgacctcaggtgatccgcccgcctcagcctcccaaagtgctgggattataggcgtgagccaccacacccggccaataatactttatcaatgttggctttcctgtatttagtaactgagctgtttttacactaaaaaaaaattctatcttagaaacatgaagaagtgaagaggcattatatatacaactcactgttcagtagctcagggtaaatataattgcatatgcaaagataaagatgtaatgataaaaatgtcaagtgttagcactttactaatatagataaagaacattcagaaattctttaaattactcttaaaatttgggggtatgaatttttataaaaataatgttttaaatcttaaatagtgaatagaattaagaaagtaacaaattctaattccttcctttttttctttaaattcttctagatcctgaataatttctacttaaacgtcccaatatcaactctctattttgctattgacataatcttatttgagaggcaaaaaattttaaaaattatatcatctttttaatttctaagccccagaacaa

SEQ ID NO: 10882 - DNA, 6000 bp, Homo sapiens
taatcacgtgataggttctctgagcagggtaagcaagttgctagtttcgactaggtgtgatatggaggggatgatggacatgagcatgtggaaagctgcccagtggcctggctcgcaggaggccattgcataaatggagaagggcatggtgaggcaattcctttgtagctctatcatctaagtcaaacttcagtgtacatgcaagtcacctgagtatcttattaagatgcagattctgattcattaagtctggggtggggcctgagattctatattgctaagaagttcccagagtatgcctaggttgctgattggagaagcacgctttataaaggtgagtgttgaatgtgctggcagtttcagagagtggctcagtactaacactggttcttcattggcagagttacagcaccatagccaaccacattcttaacagcaaaagcatctccaactggactttcattcctgacagaaacagcagctatatcctgctacattcagtcaactcctttgcaagaaggctattcatagataaacatcctgttgacatatcagatgtcttcattcatactatgggcaccaccatatctggagataacattggaaaaaatttcactttttctatgagaattaatgataccagcaatgaagtcactgggagagtgttgatcagcagagatgaacttcggaaggtgccttccccttctcaggtcatcagcattgcatttccaactattggggctattttggaagccagtcttttggaaaatgttactgtaaatgggcttgtcctgtctgccattttgcccaaggaacttaaaagaatctcactgatttttgaaaagatcagcaagtcagaggagaggaggacacagtgtgttggctggcactctgtggagaacagatgggaccagcaggcctgcaaaatgattcaagaaaactcccagcaagctgtttgcaaatgtaggccaagcaaattgtttacctctttctcaattcttatgtcacctcacatcttagagagtctgattctgacttacatcacatatgtaggcctgggcatttctatttgcagcctgatcctttgcttgtccattgaggtcctagtctggagccaagtgacaaagacagagatcacctatttacgccatgtgtgcattgttaacattgcagccactttgctgatggcagatgtgtggttcattgtggcttcctttcttagtggcccaataacacaccacaagggatgtgtggcagccacattttttgttcatttcttttacctttctgtatttttctggatgcttgccaaggcactccttatcctctatggaatcatgattgttttccataccttgcccaagtcagtcctggtggcatctctgttttcagtgggctatggatgccctttggccattgctgccatcactgttgctgccactgaacctggcaaaggctatctacgacctgagatctgctggctcaactgggacatgaccaaagccctcctggccttcgtgatcccagctttggccatcgtggtagtaaacctgatcacagtcacactggtgattgtcaagacccagcgagctgccattggcaattccatgttccaggaagtgagagccattgtgagaatcagcaagaacatcgccatcctcacaccacttctgggactgacctggggatttggagtagccactgtcatcgatgacagatccctggccttccacattatcttctccctgctcaatgcattccaggtaagtccagatgcttctgaccaagtgcaaagtgagagaattcatgaagatgttctgtgattaggtgcttgtgacattagatttctacataaaagccaatggatttggaatagcatatggagtggggaaataaacttttgttccagagatacctggatttggatcctgactctttcatttactaataatgtataacatgatcttgggatatttactcaacttttttcaagccatattttcctcacatataaaatgagtgcaatactgttcactttataggggtgtttggaaagtgaaattaaatggtgaatgggaaaggatcaagtactaaaatgatctaaagaccatagacagcctagtaataggctaagttgttatggtttaaaaattaagcaataacaccttccccaaaatttaggtatgtagctggaggtattaaagtttgcacatttattacatttccttccacttaggatttttaactaccattggaaaccatcttattttaacatggcaagctctacagagaggtattgaagatagtttctcctctcttctcttatcacacttagatgaattaagcaacgttcacagtttcatgtgtatgctttgccaaattttctatgcttatacaaacatattttcacataacacgggttaaaacaatgtatattattgtgtaacttgcttttgcacttaaaaatatgctctagaattttaccagctcattatgcatgaatatttctctaatggctgcataccattccatattcaataatttccttcttgattgaaatttttctccattgttttgtgttatagtatgtgaatgatccaaagtttattatattgaatgttaatatgtagatagtaactaattgaaaagaaagcttttatttttctaaagatatctaaaacactgtctttttttctgaatgtgtgcggtagccagtaggactattttcaagtaaatgctttacctaattgctaatagatatcttaagtcaagtatcttctcattttcccttttcagaatttatgtataaatgatttcactttataataaatgctttgatgtcttgaagagcaatgttaataataataggggtatctcatattttgagtctctactttttttgcacttctatagaaaatattaattgtattctacatttgtatagcttttggtacttatcagttgctttacgcatgtttacaaaactagtcattgaaaagacttgggtaaaacccctatttttcataaacccctcatgagctcatgactcattccacaccattttccttctcttgtctcccttagggccatcttatctgtgagctttgttttggacaaggctgtgagcacttgcattttgatatcatgagcacctttatctgtcataataggatcacttgtgctttcaatttagtttctgccttgaatcccagtaaggaacagggaggggtctatctaagcgccagtacagatggggcagtgaggagctgagaacaaagtgtcagtgaggcccagtggggggcactgggcagtgctgtgttggagctggcctgtattggctcacgggagctgccaattatattttcacaattgttctgagctggttgtgaagacagtcatcaataacaattaaatcatatagacttgcaattaaacaaattaggttaaaagtaaaggtcatgtatcctcagaactcatcacttcctaattatttgtctaccttttctcttgaggttacttgcctctattgtgtctgcatggtggaaaatctgtacaacgatgtgctactgcccatctcttcctaaatccatgctcagcgatgtcacagggcaagattcaaataggccatggtgggtgtaattaactatagagattggcaaacactacaaatgaggagagtttattgccatttactagcatatcactggatcagagcatccactgagggaggagagagaggagccatggatctactgagatgggagactcaaccaactgggtggaaaaagcaggagaagtgcagtcttaggatgagaagagatgaggggcagcagcagaggctgatggagcagacagaggggagcgattctgaaacatattgagaagcccagatgatgtgggaggaagactcctgtaaagatttcctggtcctagccccaggggaatatctgcactagttttaaagctcaaccatcccctttactatagaggttttattatggtgtcagttgctgcctcgattaaccgccttgttcatccataacttctggttggcatcctactcttgtatttactgagaataattgtgggctgggtgagtttttgggactccctcatagctgtttttgtgggaaaaaaaataaagcacatataccaaaacctgggagaacaccttgagatttacctgtccaaactgtgctttacctactaaaagaagtgcaaagaagctgctactggtgaattgtttgttaggtatattctctcttcccttctcaaccagatactaaactttatggccaatttttttatccaaatcttctgaaagatatttgacataactttctctaaggtggcatggaccgacaaaaagtgatcctagtggagtatttccctgttacatgtttataaagtcatgtttatagtcatgctacataactataaaagtgcaggttgcataataaagaaattaaacacatacatacactcaaatgaagagacactacatttattacttattttgtgcaaagcattatgcttaatgttgcagatacaaatatagatagaccaaccccaaggaattaaaaatcttataaggagagaaattcctcttagttctttagccaaagaatattagccatcagcatatttgtggaaaaaacatgctagaattgttgttcccagatctttaaaaaatataattcctgggccaaattcacagagatcctgacttgaaatgtattcctagtaccaaaatcaggctggaatatatttgtcccaaggggccttataagaatgataactttgcaacctaatagaccatgccaacaataattttttttgtagcagatacaataacagatttcaataattaccttgtaggctcagaatgttacacagaacaatctcataaaagccatatggagattaagcttttgagagttggactggctgaagagaaaggtgtatgttagtgtgtttggggggctggattagctgcaaggatgtacactggtccctgtaaggtcctccacctctcatctgggcttttaccaaatagcggtaggtttggtattgttctcagcgatgaataccaggttgtaacatctttatggtgccagctgtatacaacccatgcacctcaacaggcctctgggtaggtaagagttcacactcacttatgaagtcagagcagcttagcaaggctattcctaaataaaaggtcatgatctcacctcccttttcagatgcaccatggacggagtaactgcaaatttaggagaaatttttgtctaatgaatgttcctgtctatcacattttgaatgccaaaaaggaaattccttttccttaactgaaaaatggaactacaacttgcccttccttcgtcaaggggggttttgtgccagtgtatgtgaaaaagaagtaaaaacttcaaatggactatagctgtagaggaacagcctgttttgggttttatatggggtttttttggtatggaaaataaaagatataaaagctaattaattccttctatatcatcatattgggaatatttgtcatgtgcttagaaactcaacctatttaatgtcattaattttttgagaatgtaaacacttgacttttctctagaagttttataatattctttgtagtggatgagagaaggaggctgaaggtgttatgggaagctgagcaacagctgtttctgctgttttctgtggaagcttctcttacttattgttcagggacagcaagcctgcagttcattgcccaacacctcttctgactctttcttggatcattatattcagttgagaggcccacctcctgctaagtgcaaacacttttaatttgtccaacgtaaaaggaaatttaaaaaatattcctgtatgatgtagggaccttggtctctttggtttactgaggtacctctacagtggctgccatatggaagacactcatcaatattcattgaatgaatctaggtgttgtgagctaaggat

SEQ ID NO: 10883 - DNA, 6000 bp, Homo sapiens
ttttaataaactatgtttccttacttacattttatcaggcttaacactgagcacattttacctcgagatattgaatattatctgcttacctttcttggacatctctctagttcgtgggtgtttctttgttaacttcctgaacatttcctggccttcgatgtttgtttccaacttactctgcaccatcttacacctattttgaggtctgctggcttctactaggtttcaagtaactaatttcagaaactactttatgttgaagttttcatggattccggtagattcaaatttcatgttctcagatagtatatccctagaaagaaatttcgtggtgatgatgcttcaggcaaaaaatggcaaaagtttcagaagccagagcaggccagtggagaagaccattttgggcaggtcactttcaccttgcataagtggctctccacactgcccatgctttttggtatttcctgcattaaaccagggaaaatttagcaggtcaaggggaaatttattgccaaatattttttgaagataattttaagactagatagagtctaacagagttggactctgtttcttggtacgaacttgtgtttatttcctgttaggaggggaacctgtgccattctctcttccgtatttgcttatacctatttgtaagtccattcaatttggacatgaggacttctggctacatctaaagatattctttaatttttcattgtggaataatacaggattttaaatggctaattctggtaactcaaaagatatttaaaacttttatgggtgatgaagagtggagatgttttcagctttttccataataagctgttatgagaacagtcttaggaagatttattcatggtccaaaagaccattgattagcagatgtgagagcagtggagtatattttatggcttaaaggattatgctaacatgaataatcacatacaacttactccaagaagtttcatttatatctttcacagaatcataaattcagcagaaattttgacaagtcatttagtttctcctccacttttaaacaggatactttcctccaacccccatatgttgtttcccaagcaatagtgccatgaaatattgtgcaagaaaggcaagcttccatggttacaaaattcgacaaactgatcctcttggaaataatatcatagaccctggaagttgtacccagactacagtacctaaagaatagctacaatacaaaatacaacaataacaatatacaaaaaataaaaaataagtacataagagattcagatatgcagctgattgggaaccattggtttgatcataggatgccatcccagggaactgggggatgtggtgttgagggccctgaccacctgggaaggtagataggacagcatctatctactatgggcggtaggcaatcttcaaatacaggaggtaaaagagggaaggaatcgacaaatgactattttatttacacaatgaggtaattcaggcacattcaatactgaaaaagaaactctctaaaacatatctctgaacaaattcagtcatgactatgtgttgcatttattattttaagtagtacagttagtgttctgcaaaaatatttatgatggttgcattgctatagcctgttttcagcaaaaagtataattctgtatcaatgatgaaatagcacctcaacaaaataatgataatgatcccatactatgcactggtacctctaatttctttatgaactgaaagttattttactcatgtgtaggtaaaccagaggaagaattaggtaaattaagtggattaatttctcctaggagtattttagtagtgactgaaggagccagttttatattctgaaggatgtagactttggataaaagcttgaaggtcaagtggaatttggatagactgagaagaaatggaacacaaattacatatggggaaaataagtgtaaagtgtgaagttgaaaaatgagtttgtaatgtataaagaagagtggaaaaaaaaagaattcccaaataaccatgtatttaggattctctgcctctttctcgcagtgttcctcaggaagagttgtgtctaagttgtgtctttgaaaagaactagaaactctcaaacactgtatttccaaacttaaacaatagcattaattttgatcagtgtcagaaaaaaaataagtccacctatgatatgtcaaaagcaactcttctgccaggcaggcaaggctctacaggacaagatcccattttaccaagccaagatggctaccacttctctccatgatgaactctgttcccatggaacaactctttttccatcccttatacactttatgttcattttttcctccaaatcttagctcatgtcattttcttactgaaaatattctctactgttttcgttgcttattaaagccccttgggggctcaagtgaagttttatgttatcattttcattattaacatatcgagtcttaggctgtgcaaggcctgggtacttctcgatataggaaggacacttcttgatattacacacacagtctagttaattcctcagaaaatagtattatttccttgctttaaaaattattgtctaggccaggttcagtggctcacacttgtaatcccaggactttgggaggctaaagtgggaggagcccttgaccccaggacgggagtttgagatcagcctgggaaccatagagagatactgtctctacaaataataataataaaaaaaattagctaggtgttgtggcgtgtgccatggtcccagctagtcgggaggctaagttgggaggatcacctgagcctaggaggtcgaggatgcagtgagcactgatcacatcgctgcactccagcctgggcaacagagtgagaccctatctcaaaaaaattctctaaaaccaagtaaagcagcattttattgttttatattcttgtattattattatattttctgaccattagttgcatcttttctctgtccagaaaatgatagataccctccctaagtctagataacatggtaaacctctgttgtcctacctcataatgctgggtttgtagtagatgttcagtgaatacttgagttaacacacaagcatccattgattcagcatgggaccctgaggaaatctcttatacaatagctatatcttgatggataggcaagtttgggaaaagtaagcatctcagcatataataaatatacaggaccccccattcataatatgctttcgagtccgatatcctattgctcctacaacaagcatgagtgacaggtaagaaggagactgcccattttacagatgaagtggttgcagttcagaaagtttaaatgatttgctcaagatcagagggtgggtatcacagctggactccaaccttcatcttatgattctgaagctaaggtggaggacaggactggacagccagttgggcgggggcaatctttggggaggagagagtttaccagaacaagaggcagtcaaaggggaatcaggagtttgaaaggtaaagataaactttcacctggggtaggtcttgggatgtggtgcatctggcagccaaagatttctcctacagctttctaaccatctcagggagaaggatttggaatgaacattagcacatgactgtcctcaaactgtgtgtaggagactgtagtttcagccaactggccactgaaagggtcactagccttcctctgtaagctgtaagttggcagttagaaaggggttaaattcatgtcttttgcgaaggtgaattacatggttagatatgtgccgatcaccctgtcaccgcctgtggggcacacaactctgtgttccacttgctgtctcatataatgcccgaaattgttgcctagagagctgaacagtgacatctgttggttcgatttgaaataggcaagttcaaaagagaaacagccacactagtatttcttcccctttcaaaacaaataggaacaatcatgacaaaggaatgacccttccaaaggaagttttaacatcagcagcatactttatctgaagaacaacacacgactccaagtttcaggatgagggatatcatgtgacttttatttttgcagaaagcccatcaaagactttgtgtaaaccttttaaaactccaattcaaaagaaacagtactaagacctgtgtatctgagaaattcctcaatgctcaagatttcatccagaagcataaatgagcaaatagaaagtatggatttggggcagtggtgagaaataatgaaattgctttctgctctaggaaacttgagaaacaaaccttcctgtggatgtgcctgtgagttacaacccagcttgaatcctttctaaatagctccaaatttcaagatcactttgacaatcacctagctcttagcttcaattaattaagtgtccatgttcctttgtactgaatgctctatttctttccttacaaaactctaaacctcattgaatgtacaatggaaatgattttctgggaaatctggataatcaaaaaatactatattctgacaagttatatatatacatatgtaaattttttatatattatatataatttatatacataaattatatatatatagtgtgtgtgtgtgtatgtgtgcacactccatacaatatcatttcctgctcagacctttacaaaaattgctaagaaacagtaaattgcacagtttggccttcaaccttttaatcaccccaaggagaaaagaagtggctcaaagagtagcatgagaaaacagaggagaaaatgaaggcttggataatctgccaaccgaataactgagtaatgacataattggatcattgaaaaaaatgttaaaatttttaccagttattaattagagaatcatgcatgaccctgggaacttgctttttgttttaaaacaggagccacgattatgaaatggttcaagctggcttattcaggtctgctgagatctctactggtttgcttttcagatccctcgtggttcgagaacagaatggcgttaaatcacactgccctgcctcaggacgagcgcctgccccattaccttcgagatggggatccttttgcttccaaactttcttgggaagcggatttagtggctggcttttacctaacaataattggtaagcttccttaattcttctgtgcaaaggctgcatttagaaaattcatgggctgatatgttaattttgtgaaaggattctgatacttaagtggatagtttagtggaggcgaagagtggggaaaggcagaagatggaatggcattatggcattcaataaatgtttcctagaaatgactctttattatcattattattaggaataaaattccattgataatccaagaactcttacagcaaaattatttatccatttcattttggttactttgggagtagatttactttctgaataccaaaattaatgataatgatattttatttaaacagagtgctttttaaataatgtttttgacataatcataagttttaggttgagaatgggccttaaaaataatctaggtcagtctcctgttctcacaactgtgcaaaactcaattgtgctattgtgctatagtactatagtaatggcagaaacactgagtttacttcacctaaaagtaaagtcgcatcaaaatagctaagccattttggtgacagttgaaaaatgtgttggtgataaatggaagaaagtccggggtcaaaagatttttgtgcataattgacgaaagggtgcacctgcttctagactgcatgatctcattcattcagtagccacatgtggcttttccaaattgaaagttgctgtagtgtaaatactcaccagatactgaaggctcagtacaacaaaaagtggtataaaatatctcattaataatttttaaaaattaaatacatgttgaacatacaacattttaggtatgttaagctaaataaaatatattattaaaattaatttactgtaaattttaaatttataaattaaattt

SEQ ID NO: 10884 - DNA, 6000 bp, Homo sapiens
gtcccgaactcctgacctcaagcagtccacccacctcagcctcccaaagtgctgggatttacaggcgtgagccactgtccctggctgggaaatttaagccctttttaccctcagaggacagatctttgcaaccctctcattcctgagaggtaaggaatcatattctgagttagagcctatggtggttgtatccctggactctcaggttcctttgtggctattgggttacacactccagggggtggagttattaagaagaccctgagatctctgtggctgcattttaaagatctcatttgtaagggaaatgatgattctgccaatttctctccccttgtgcaccttttcttttgaagttaaagttaatatccctttggacttgtacctctctgcttcttagttctataaatctcttcctagtttattttctgaaagagtgaagtagaaataatttccagaaaataacttgtcaacataaagtcatgagggaggctggtgatatgagaaatagaaggaactgtcagagctctgcagtcatggtcttctgcagaccaataataaggcagtatcatgttccgtcctttctccctcagaacagacagatgccagttagttcccaggtctgaattgtgctctcttccaatcgctaaactactaaaacccaaagttttagtctttagaaattcagttgagttgtcagtttataagaacctgctatgtgatggatacgctattttaaggatatgaagattagtaggaattgtgtggttatatattatttaactctggatgcaggaatcgtctgattggtttgggttcccaaagatgagagaaatagccttgattttagacagcatgcagacagggatactgggagcatctttggggattccttcttctatagtcactggggttatacccagtgactcaccttgatttctcccagccataaaatcagactggtaatttcatctggtttgctctctacttcacaagaggtagtagaagactatatctaaagaatagagcactttaattccccagaactccaacaagcccagcacccccagattatatgttgctaacagcaacagggcaacttgagaagttatcccacatcccaggcccattcctgtagttcgtccaccaaggtcagttggagaaacttccatccagaactgaactctaaggcactcggatccctctgctggctgatagcagaagcaccacttagctttttcttttctttttgttttcaaatgaattcaggtattctaattagcattttctttctctctcccacactccctctttctgtgtttctctttctggctgactgtaatccttaatacacttctcttggtgtctttaattcctacattgagcttgagttcatagcccattcctggtagaagaccactgtctgatgggtgctggctaaatgaatgcctcaatacagggttacaggggctgccatagaaataggttcaaggtatggaggggacattaggccctgaactcatgaatgattcctgcatctcatatcagtgatggtcataataatggcaagtagttatgcagacttggaaccaagcactttgttaaacactttacagccattatgtcatatagttctttttcagccctgtaaggcagcttctctgtcatttactccacagataacaaagctcaggctggattcatgcagcttgttgatggtggggctcaggatgtgagttcaggtctctctggcaccaatgtcataactgcaaactacaatgacttcagatactccaggctttccaagcccatatcttggcagaagttctttgaccttgctctctgcctagaagtctcttccgcctttatcttttctcaggaattctgatttttccttcaagattcagttcagggtcacttcaagagggctatacccccatcctttccctgttttggttgtttgctgagacctctgtgaaccagtgtttgtctctaatggagcacttattgcacatttttgtgttgattcccctacatgtctgtctccccagtaaactttgatctctttgaaggcaggaagtgtatcttaccagtctttgtatccctagtacctagtacctagcacagagcccagctcatagcaataaaaatgacagcaatatttcacatttactacgcacttaccttgggctgggcagagtgctaagcacttcattttttagaccctctcatttaactatcacacaacccatataatatatagaattatgaagaaactgaggctgagagaattctataacttgcccaaggtcaccccagtaagtggcaaaactggagcttgactccaggtctccctgaacttctttacattttattaattttcatgccctacacttttttacctgattaggtattttttctcttccaatattgattgagacgtatgagtaggaattacattttctttgctaaaattagtaagcaccttgaacagtacttgctgtatgtgctccagtacttgctgtatgtgcttgctgtatgtgctccatttagataaatcagatattaaatttttctgaagaaaaaagcttgggaaacataattacataaggtaactagaaatgatcaaaatctatttctttacctagcaacttcagatgaaattttgcagcagtttcatgaaatattttatgaaataattgctgtattcgtctgtcactgagaaatacaagtgtaagttaagcatttctgaagcctgaaattcaccgagtgcagttttaattacccaagagaagcaaatctaaaactacttgcttttcagagcataatttaaaaaatgaacaacagtctttgcaatgagattttatgttaaatttaggtcacatgttaattttaactgttaggatatcctagaatgtgcattgttctttaccaacctaactgacgagtcaatttgcctgtcttaaatatgaggcttagtcagttgctcacctcatattttcaaagtaccagtgaaattagtggatagtttaagattaggtaggtgctaaagaaatacagtctatcattagctatatcaatatttgtaattcttatacttcaatatgatatttcatgctattaaagcctgtttattacattttaatatcgagaaaagcccatatcctttaaaggttaccttacttataattaaatcttgataatcattaagtcattggtatcactaaattatgttagggtagctaacatttccattttacaagatgtaactttgcctcacactgagtgtagtaaacatagaatattgggacaggccaggcatggtggcttaacgcctgtaattccagcacttttggaggatgaggtgggaagatcatttgaggttagaagttcgagaccagcctggccaacatggtgaaaccccatctctactaaaaatataaaaattagctgggtgtggtggtgcatgcctgtaataccagctacttgggaggctgaggcaggagaattgcttgaacccgggagacggaagttgcagtgaaccaagattgcgccactgcatcccagctgggcgacagagcaagaccctgtttcaaaaaaaatcttcgggaggctgaggtgggcggatcacctgaggtcgggcgttccagaccagcctgaccaacatggagaaaccccatctctactgaaaatacaaaattagccaggcgtggtggcacatgcctgtaatcccagctacttgggaggctgaggcaggagaattgcttgaacccgggaggcggaggttgtggtgagccgagatggtaccattgcattccagcctgggcaacaagagtgaaactctgtctcaaaaaaaaaaaaaaaaaagaaagaaagaaaaaaaagaatattgggacagtaagggatcttggtccaactccattattctacagatgaattaaaggaggctcaaagaagctgtctgcagctccttgcttcctctactgtaccagaaagccacgttgcattaaaataaccacggatcctagccggcctggtggctcacgcctgtaatctcaacacttggggaggctgaggagggaggagtgcttgagcccaggagtttgggcccagcctgctgtacatagcgacacccctgtctctacaacaacagcagcaacaaaaaattatccgggcgtgttggcgtgcatctatggtcctagctactctggaggatcacctgagcccaggaattagaggttgcaatgagctgtgatcgtgccactgcactctagcctgggcgacagagtgataccccgtctcaaaagaaaagaaaatagccatagttccttgtccgtcttagctgcattcgtgtctcactgcggctttgccaattttcctttcttttctgcaggttgcataccctgtcctgagggcgcggcacggagtgcatgcgggccgctgccatgacgaccgccatcttggagcgcctgagcaccctgtcggtcagcgggcagcagctgcgccgcctgcccaagatcctggaggatgggcttcccaagatgccttgcactgtcccagaaacggatgtgccccagctcttccgggagccttacatccgcaccggctaccgccccacggggcacgagtggcgctactacttcttcagcctctttcagaaacacaacgaggtggtcaacgtctggacccatttactggcagccctggccgtcctcttgcgattctgggcctttgccgaggctgaggccttgccatgggcgtctacccactccctgcctctgctcctcttcatcctgtcgtcaatcacttacctcacctgcagccttctggcccacctgctgcagtccaagtcagagctctcccactacaccttctactttgtggactatgttggcgtgagcgtttaccaatatggcagtgctttggctcatttcttctacagctctgaccaggcctggtatgaccggttctggcttttcttcttgccagcagctgccttctgtggctggttatcttgtgctggctgttgctatgccaaatatcgttaccggaggccttatccagtcatgaggaagatctgtcaagtggtgccagcaggtctggcttttatcctagacatcagccctgtggcacaccgtgtggcgctctgtcacctggctggctgccaggagcaagcagcctggtaccacaccctccagatcctcttcttcctggttagcgcttatttcttctcctgccccgtgcctgagaagtacttcccgggttcctgtgacatcgtgggccatgggcatcagatcttccatgcatttctgtccatctgtacgctctcccagctggaggccatcctcctggactaccaggggcggcaggagatcttcctgcagcgccatggacccctatctgtccacatggcctgcctctccttcttcttcctggctgcctgcagtgctgccaccgcagcccttctgaggcacaaagtcaaggccagactgaccaagaaagattcctgaggctggcaagtggggcaacgtgtggaggaagcccctcataatttggagaaaacttgatacaatagaagctgacttttaaggcattggcttttaaattaatacatatatccaaggatatgttatagctgcagtgtttgaaagccaaaggatttaagagttttgttgttgttaataaaaggaatactccttttccttttggatcatagcttaacaaggcacaggaagggaagggatcttgactaagattcatgagacattgaattaaggagaatcatcttcatgcctgaaaatttagcaaaattccgactatggcctccaggggcaattcctaaaagctgaatggataataaaattggactggaaagtaagtaggtggctggtcctcaccctgttggaatggctatcctactatgctgttctttggtaatggaataaattgacccaaggaccgaatttcatttggatttcaaattgtccagagtggaaaagc

SEQ ID NO: 10885 - DNA, 6000 bp, Homo sapiens
ttaattttataaatgaaagaaagcaaggtgaacgtatcaactaatattatgatgttgaatggaaagcattaacaggtatagaggagcatgggggaagatctaagtttagagaattcctggaactagctaatttttagataacaaattagaaccttgttgttatggtatgaagaaactgctgttaactccaggcccaacatagtggatgacaactgtcctttctggtgatgggaaagtacctgcttctaaatcttatccaagtgaatgaagtgcatatatatgttttatgttggtgttactctttttatcataaaatatgtgtttacaatattagatctttaaatcttcttataatttcataggacatgttcagtacattctgttttaaaacagattacaataaaagtttagcattaaaattcacctggaaatgaaaaacccagctttgcttctcactctgtgacttaaaacaagtttctaaattcactaaacttcactttctttatctataaaactaagtgtttggaaaagatcagtggttctcaaccctgactgcacactaaaatcatctgaaggacatttgaaaaagtaatatcccaagtcctatcatagggtttaattttcaatgctcttcaggtaattttaatgtacattcagtgttgaaaatcaatgggctagatgatcactaaagttacttctagtaaaacttcctgattttatgattcattgtattttgacatagtaacagctgctgaaaaaacaatgttctcaatatttgcaatgtcttttaaagtagaaattaacgtcgaagagtgttcttgctcaaaattgagaacattttcacatctagactaaaaatccttctatattatgagaataatttataccaaaagccatatatacatcatcatttgggtaaggcatatgcaccaaaagtaatatagatttgcctaaattttagaaattaactattattatgatttggaaagcaattactttctgtcagtacacatacaatgtgagggtagtgtagttagaaattctgtgtaaatttaaaaaaatgctgctacagctattttgattttgaataaatgtattcctaatatcccaagagttaataaaattcctaaagtgtataacttattcataataaataatttacatgctgatttattatgaagagaataaacagttttatagaagactgaagtagaatatctagttttattggtatttggaaagatcaaaagtatgatttcttgaaacagttttgaaatgtgtcactatgaatttttgctatcagtctttttactaaatagcttttcattggagtaagctgataacttttctctttaattttaaatgccagaaaatataaacacatgttttaaaacttcatgaaaccaaaaactcaaccaaatactcagatccaaaaagaaaccatgtagactcctaggaaaccggggaaaggcatcaagtaaatattaagctagaaagtaatagactttgtgtcttatattttcacatcattctgtgtttttgaatatgtacttttgaatacttgggacaggaaggctccttctgttagccaggctaatatggagaagaagaagaggtacagtttacagctaacagctaacatgggtgaatgtaggtgtagtcaacaaagaatgggttgtatggaatttctgcaaacatagttacatttgaaaaccatttgggaaaaaaatgacttaatgcccagataggacactatgaaaagtaaatatgttattttcagtatgatgtacatgcctgcatcatcattctgtttttgcttctgatatcatcagttattcttatatctttaattttcatgtatatttcactgtttttgtttaccctatcgataacaaactagacgccataattaagaataatgcacagatatacatttattatagcatgcaaaactgtgacattggaagaataatgtgactgctggaatacttcacatgttcagaaatcttgccctgtgtagaatggagaagttgttttgcttcacatttgctctgccacatatcaatttgctttacaaggcctccctgaaatcaatcagacatgtgtaccatgctttcaaagaattttttacagtaggaataagctatgaaaagtttgaaaatacagactacacatactatatagtttgtaataatagttatatgtatgctagtgagttaaaaaaaactctcatgagttttatatgatttaaaagtaccaagaggtttaatgaaacaatataaattttatcatcagaatgatatcacacatcttacttatctcttgggagtgatgaaatgcagaacttggtggttacccacccccctcctcacctctcaaggttttctctcctacttacctgctccagattctgctcttcttgtagcagatgcagtattgtgttttatatatcttcttttaaatttggtaaagcacattaagctgtactcactcactcagatgctattgtatgttagtttaatcagataaagtcagtgaggggaatatagttctaaagaatgataaggacagaggtgatgtagcctagagaaagtgtgcatgaaaagggccccagtgagagtagaagcatttcatgcttggagtgagtgaaggactaaaacatgaacatcggcgttacttacttcccagttttgcctggggctcggccaggtcagcaatgcaatcattgcacaaagtaaagtaaatggactcacatttctaaacatgtcatataaaatttacatgatcttcagaatctagcaacatgatattgaatatagacttcatatgtaacagtcaaagtttgttgatgctaacatcatcttgagtaatgaagtctgattacatggatataagtatataactttgtctcataagagactttatttacataaagatttttcttgttaagatattgaattgatttattgggcatagctgcataactgaaaagtgtaagtactggactccacttgaaagcatatgtactgcattaaagtaaagctgccatccagtatgaataatgcagatgttatgttttaaagcatgtcagattctcttaagtgtatctttcttctttaaattttgatcagctgagataaatgcttttcatttggccttaactgtttgtcacaggaagataagagacagagagctaatgaagtaaattgatgtgctgctacagttagggagaattggagtttaatactgttgcagttgataatataactgcttttttaaaaaattggcatggttgcatgacattatgagaaagaaaagagacctaacacattcaaaaatggccaatacttagaagtattggggtaaagttaggtagaatttttatctaactctcttcgaatacagtgcattttcttcttcaaaaaagttgtaattaagagtatattaagtcataaatattaatgatatcaaatcatgaatattaaaaatatattgctggtagataccaaaaaaggatggtgtgaattatattctgtagctcaacttggaagttcaactgtcacaaagaaacctgtctcattgaaatctctctgaaattgcatgcatatttaacccaatagcttcaggcattcagagatggaggaagcaaaatcaaaagcaccatatcaaaattaacatcaagccatgtgtttttctcttagagttttgaagtaatttttaacacagatagtaacttggtttgaaatttaaacacacacacatacaggtttgctagctggataatttccatgcctgggggaggggaggtgacaattggtgcattcagtacagaacacgtgtaatgataataaagttgattggttgagctctatagcattttttttttttctttttctctcttcctgtagtgtagttctgctgggggtggaagggttctcccccatcccccccaccacgaacaagacgtaggttgataccatttttattgttctgctggggtgggaaataaaccatatgctttagcattttaaatggctacaccaaagagaaaattgaaccaggctctcttccctactcctactggactttggggtggggttattcctctgaatgttctagcggacttggggttagcttaatgcttctgccccagggcaaagaagcagttgagggaaagaaatgtcaaggacgtcagaggcgagctggactgagtgaagtgtggagtaggaagcttaggtctgaaacccacccctcccctggataccaggcaaaggcaatgagagtcggaaccagctgatgccgctgctgctgcttcccgtttccagggtgaaattttcacagcagctattctaaaaggaggaaaaatccctaaccagcagcagagaagatcctatcacccaatccaagctatgtaaccttttagtcaggcttttcaaagaaatccgcattttaaaagccagcatttatggtccaaaatatgggacgggaatcagagctggtagaaaaatatgaaaagcctctttacaccctgagtatttgaaacaatccgatgagcataggaagtggctgccaacgctctggcggctgctcgtgctgccgccgctgccgctgctgttcctcgcatagggctggacagagctagtcccggtttcagcacctccggcgctggacagctctctgcacgccgcaccgccgcctgcttgctttttcccactctcgctttgcattactggagatgcatctaaattacatcctgttcaacaacaagtagatttttttttcctgtacaggaattacagtagacgactctctcaattaaactgcattttcttctttacggatttggctatcaggcgtatttatcccgatttcctcccccctcactcccctttgcaggaacgagtctttgggaacgtggtccacccagggatgtaaaactgtgcttaccgatgcatcccatacgaaatgcttatgtgatcgtctctctaccttcgccattttggctcagcaacctagagaaatagtaagtaacaaagggaaaacacggctttaacgcaaagacagggatattgtggctagtgtttctccagggaactgcattttaaatggggaaatggaaaatgttgcagggtacaaaattgggttcgtctcctccttagctatagtagcttggtggaatgaattctagttggtattctataactaaattctactcaattttatgtcttctaacttgaaatttctgcagtgtagtttcaaggatgaagtccaatcatgtcactaatatgctgcaaactttcaaataaaaataattgtcaacttaacctttattttaaagctggaaagatattctggggaattttagagggtattgttagtagtagaatgaagaccccagacactatagtgaaacacattgcatatctgcattggatattttcagtacaggttttctggaagtgtccttggatgtaaatataaataaataaatatatatgttaatcaaatgaagtttttgtgaaagcatggctgtcaggaactgtaaaattattccttaatagtatatagtttttcaaaaatagtttctgaaagagacagctgtacataactgtctgaaagaaaaataatattctcatcaattgtattttgaggaaatataactcagaatgaatgctgaacaattattattcaggtaaatgtgatattctgcctacatttggcctaaataagcatcactcttcttactaattttgatgacaaaaaactaatacaatttgatgtgcatatttgaggttttagaacacgcttaaagtgtattccttcaaactctcaatgttaacaatgtgaaaaccaacaaatttaattaattaacgtcatgtaagtgtccaaggaaagaaaccttccagatcagtgaatgcatgtaatctttacatatgttttaaaagacagaaagcttatttttcaaggtcatgcatttagggactgatactggcattgtca

SEQ ID NO: 10886 - DNA, 6000 bp, Homo sapiens
aaggtggggggagccagagaccttaacagacacctcaccaaagagatatcctcatggtacatatgcatctgaaaggatgctccacattacatgttatcagggaaatacagattaaaacacaaaaagagagagagagagagaaaagaaaatggggggcatggcaggttggaagactgcctctgtgttcattttcaaatacactaattaatagaaacaactttctcattaacattctcataatcagtaaagttggtgctctaagttgtaatagtatacattccttcataaactcaataaagttattttcactctttatgaaaaaaatacatatgcctttaaatgttatgatttatttctcatgcaaaataatgttcattaagtgaattaaaccccaaatctcaactttcctgcagtgttctgcatcctgtggacatgtgatgataataatggtgctttgctccttatctaaatttgtggggaacattaattgatgctgagcttccaggatagaagccctttggagtggggactgcccacctggcatgagggaggtaggaacatccccgatgtgtctggacatgctgaagaagtaggtaccatagagcactgatgcctgaggatgaggggcacccctggggacaagcagaaacagaaagaaaggagatatttttaatagaattcatcttcctcagcatgtgtccccaaaagattacactccatccaacaccatggatctggacaaacaatgtagtgtattcagtggccctttgtgatttctgtctcttgtagcaacaatctttcttaataaacagcttcatacatctcaccaagcacttgctgtcttcctgagatgtcagcacaagcacctggataccaccagatagacttacacttcccagttgaacactatactgcttatccccaagaatcaagaacagggagcgtgtgtgtgtgtgtgtgtgtgtgtgtgtgtttgtgtgtgtgtgtatgcgcatgcagatgcccagagagagagaaagaaagagacagagagaccagaatttcttgccagtgtgggtcttttcaacgtagttttgtaaggttctggacagcttggctggctgcagtcctgatattatgaaacagaattgatttgcaaggatttgagccaggagagggcacacctgggaggcagctgtgagatcagccagagcaagggtgcaaatgctgaggtatcttgaaacctacagcagaataaagggttgggacaacctgaaccagagccagagtttagtgctccctaatggggctattgaattcatcagggccaagagagaaccatgtgccagcctttatcttgagagaggaaggaggttctgtgtgtatatggaaaattaaaggtctgcagaggagatgtagtgaatgtgttaaacctgaaattacacaatgatttagagctggattctcactgaaatttctttattgcaactattccaaaaagatatccactatttcaggagtttcactacacactaaactgacaaagggattgtttagatgagtgttctcaaccctgagttttctttcgggtctttagaaaatacccactccagacaaaatgaatcagaatttctgggtgagggatccaaagatgggtagttttaaaaacccttccatgtaattctaatatgcagccaggattgagaactgctggcttaggctgagatgggaatgagatatcaaaggaagctagagaaagaaagattgtggttgaaaggctctgattcctgggcttagcctcagacaagaaaagtgtcctcatgtttatgcttaaatagtgctagaacagaaagaagcaaggcacctcagcctgtgataagttggtcaaagggttggcaataatgaatttaatctgtgactaccaatcagaagccaaactctgaagaccccaaaacataaacaaaaccagacaagctggtggatgaataatacatttggttgtatgtttcagtcaatgatcaaggattcacagaatagaaaccattcaaggtagcgcaagattaggaaggtttgtggtagagacccaaaatgtaatttcaaggcatcaagggatttgggctcccagagccaggaaccagacactcagggactgaggtcactcctttcacctcttggtcatttgatcttcttcatctctgttcctcttcacacatctgcttcattcttccagagcagttggctttctctgattaaacacttcacacaaggtccaacacacaagtggttcagctctaatttatcactgtctttcatgtccagagcccaacactgactcaccgttgttaacgtgtttcttagttcaaattttcaacagaaaaggatctggtcactagcccagcaaaggatggctgatcgtatctagcttcagttgaggtgtcaatctcctcccatatactagggtatgtgtggaaaatttcatgtagtttacaggctgaacactttaggagaccattggaagggcaggtgcttatatagtagctataggcaaggcaagtaaagaagtccatctaatttccatccataactgatgaaacagacatattttgctttcccatcttctaccttccaaaatatgggtggatataggggagataaggaggagtttgaaagaacatgctctgtctgcccaggacctagtctagcatccaaaagaggtaaccacagattggcatcactcaaagtcagtctacatatcctcaaccatcatttatgtacatgattctacatgtgttgtcttcctctggaaatcactgagaaatccattcttggtaatgttgaagcctaaggatattcagagatcctgtggtaggttcaattttaacctcatactttctgctacattgtggcatgtgaaaatggaacatacttagatattaaggaggattctcctccccttgggcttttatctgatcatttggaaaatcctcagttaacatgctgttacagtggtttgacggctcacttgacagctctgaaataacattcttgactcttagatgacaatcttgtaccgaaacacaaaacggctcttttcagaaatttagaacttcagccaagttttgggttcaagaaaatagtggtgtgtggatttttttaagctctccaaatggataaattgtgtgtaaactcactttctgtccaacatcagctattgcaccaaataattgaactgtcatatgtcccttgttcttgtaattaagttggctgcattgaggcaggaatagtctggacttgggggtcatgtttaaaggcagcaacctagggtaaacttatcctccaacccatggacagtctgaatatcttttttcccctctttggagctagaggcaaagtgaagggaggaaagggtccacagggagaagtagggggagcactagcaacaaatgttgccaattttcacttttcccagaccatgtggtccctgaaaagtatggctgtggcctctgtgcaatgccatcatgccaatgtgcaatcatctattttagaacctcagatggcatcaactattttagctcttgcccaggtacagctactgcacattctgggagaagaaagagaataagaagactaatattcgtatcttactgacaaaacaaaacacctttaaaacaaaaggatgatttatctgggctgaaaataaaactcctgcctactgaagtctggtgcagctgagttatcacgattttcgtcctgtaatttgttttatagggtactaattaacagggcaaagtctgaagccaagaaagtaaatcacattttgctgttttccttttctctagcaagatgcagacctggtctttaattaaagcgcaagttccaagggcgatatcagctaccgaaatcgggaaaacatgggccgaaaaggtcacagtgaaacctgctgtgtagagttcagaaaagataatgggaaagagaggaattgcacaggcaacctccaaaagaagagattgttttcctcagatgtccctgtcttatccatcttttaactgctccccataactcagaatttcttccctgactctactcaactgagcatgtaccacaaacatcctttttaaaaattggatttcaggcctggtgaggtggctcacacctgtaataacagcactttgggaggccgaggcgggtggatcacacgaggtcaggagttcgagaccagcctgaccaacatggcgaaaccccatctctacaaaaattagctgggcgtggtggcgtacatctgtaattccagctactggggaggctgaggcaggagaatcgctagaacccaggagacagaggttgcagtgggccgagatcgggcgactacactccagcctgggcgacagagtgagactctgtctcaataaataaataaataaaatttttaaaaagtgaatttcttttcccagataattcctgtttcgggaacggcatttttttttaaaggtagctactttcccatcaaacacccctgtcccaacctcccccttctccggggtttcttttttgacctgatccctcagtgatctttgacgctgggctttgctgcccggcaggtgtcactcatccttcacccctcccctcccagctcaccctcttcgccgcctggtctcagggtcttcttcactcctttctacctctccttgtctctctcccatcccattcctggaagttctggactggaggtggttgctctggcttctcctccctcctaggaccctcagatagtgttgggggcagggggagtgcggcggggagggcacaggatgggctggcgaggagagtgagtgctgggctcgcaccgggagccgggagcctgacgtcaccacgccctgcctgtcaatctgcagcgcgcgccgctcgcagccgccttttctgccaccaactgtatctctcactcgcggagccggcacagcgacaggcgccccgcgcttgcctcctccccggcccggccgcctcctgcaggcagctgctctgtttgcgcggggagctcagcccggcgccccgcctcggcgcccatgaccagcgacttccagaagtcctgacgccccaggtgagtggccgagttcccagggaactttgaggatgtggggagaggaggggagaaagatatccaggggacaggtctttccagaagaggagaaatggagccaaccttgactcccaccctctgctgcccccatacacacaccctagtctctcctcccagacccccttcgcaggggtctctgggctccaggactctccaggcttcgcaatgccagaaacttcgctttcagcaccgcggacagcgtctctgctgcccagccccatggggatgtcctggtcgcgccgccacaacccaggcgggactctcccaggatgacactcctagcttggtgcactcgggtgcgtgtgcaaatacaggcagccttggagaattgatccttgtgcatgtgagtgcatgttgtcctggtgtatatctgcaaaaactcagaagtccgcgtgggcatttcactcactcactcaacaggtatttattttgggttcgcacttaacccatgattccccgatttgctctggggtcccagggtggggtgggcaactcaagtggggcaatgcgagaggaggctctacgcgtggggaagtttcctggcagcctgaagtgtacacctgacgcctgcactccctccctatgcagggtgcaaatccggccgcgatgaacgcgagcgccgcctcgctcaacgactcccaggtggtggtagtggcggccgaaggagcggcggcggcggccacagcagcaggggggccggacacgggcgaatggggaccccctgctgcggcggctctaggagccggcggcggagctaatgggtctctggagctgtcctcgcagctgtcggctgggccaccgggactcctgctgccagcggtgaatccgtgggacgtgctcctgtgcgtgtcggggacagtgatcgctggagaaaacgcgctggtggt

SEQ ID NO: 10887 - DNA, 6000 bp, Homo sapiens
ctctgctgaagaaagcaagaaacttgatgaaacaggaggacttggattaaggcagaatgaaacataaacatataaatttccaattgggttgaattatttacaaatatatatttattaatctacttgatttgtagaataaaatttatatatactccctggcacacagaaggtcattatagttactattcctgctatattttatttcatgtgtatgtccatctctttttggttaatctgatgcttaattgtatgtgtcaacttggcttggccacggtgttcagatatttggtcaaacattattttgcatatgtctgtgaaggtgtttcttggatgagattaacatttgaatcactggactttgcataatgccctctaggttcatccatgttgtcacaaatcacagaatttgtgttgctgaaacaattttttgctgctcaaaaagtcaacactaatttttatttacacaacagtaatatccagttcaggaatggtaagaatctcactgtcatcagggctgaggtttgaaatccactttgagtacattgcaaagagggctgacgttgactcacatgcacacaggaaagggcaagtcacatgtgtggtgaggagccagacactgaatggttaaaataactagggctgtcaaaactgaatgaaggaaggctgaacagagagatgataactgtcttcagatatttgaaaggcttattgtggatgacagaatgtgcttgttctgaatgggagttgaaagcatgaatgtttgattcaacccacagaaagaggaagcttctcacagttgagtgtgcatcaatgttaagggattcaaacagatgttcaatattcattttgtctggaatgttgtcagaggattcctgtatgtagaggaatgtggtcttggcacttttcagtttaggataatgataataggtcgggcagagacaactaatattagcaaatttcaggaaatatgctgagtgcttcatgtcattagaatgtctaatgacatcagaatgtctcactgaatctgcctaacagctctacgagttaaacactataagtattattattcttattttacaaatcaagcttagtttacatagtaaactgccagagttcacaatgctgagaaatcacagggtcaagtttagaatccaggtctattgcattaaaagactatgtactttccactatacactccattttcctaacatgctttttcaaaagaaaagaacaaattcttagtttgaggacaaaactgtcaaaatatacagattttattaacaaactgaccaatgaaaggcactgattcattgaaatattttagctatgattctgatcatatattaatttcaatgcataaaattatgaacattttaacatataataatggcacgtgtgaaaactactatcttcttgatgtatgtccattttttttcggttaatgtcatggttcattttatgtgttaacttggcttggccatggtgtccagatttggccaaacgttattctgtgtgtgtctctgatggtgtttcttggatgagattaacatttgaatcagtgggtcttgcataatgtcctctaggtccatccacgtgtcacaaatgacagaatttctaacttaaaggttgaacggcattctgatgtgtatatattccacgttttctttacccattcatccactgatggacagaaagagaaatagcaaataatctcacttatatgtggaatctgaaacaaactcataagagtagagagtacaatggtggttaccagaggctagagggtgaggtggggtggaatggtgaaatgttggtcaaaggatacaaagtttcagttagaaggaataagtttttgaaatctatttcacagcattgtgaatatagataataatgccttgcatatttcaaaattgctaaatttcaaatgttcctatcacaaaaatgatagacatgttaattagcttgatataatcattccacatggaataaaaatataaaaatatcacattgtatcccataaatatatacaattataatatgtcaattaaagataaatgtcaaaaagaaaatcggaataaaaactattaaaaaatcagtggacaatgtacaaagaagattattctccattctgcaggtaggcctcatccaatcagttgaaggccttaacagaacaaagactgatctaccctaagcaagaaggaattctgccagactgcatttggagttggactataacttttccctgaatctccaggctgcctgactgtaaattttgcactagtacctccacaataccttaaaactaaaatatatatatctatgtgcatacacacatctagctggctccgtttttctggagaacactgaataatgaagttatttatatgtcttttctttttttgaggcagagtctagctcttttgcccaggctggagttcagtggtgcaacctcagctcactgcaagctccacctcccgggttcaagtgattctcctgcctcagaaaaggtagctgggattacaggtgtgtaccaccaggactaattttttttttttttttcagtagagatgaggtctcaccatgttggccaaactggtctcgaactcctgaccccaactgactcgcctcagcttcccaaagtgctgggattacaggcatgagccaccgtgcctggcagttatttatatttatttgctcttatgtttccaggtttcttctaactttaaaattctatgactggaacaaatacatatgtgaacttggaagtagatctttcccctgtccagccttcagatcagaccacagccttagtcaccactccaattgtggcctcctgagagacactgagctaagggcatccaggttcttgacccacaaactgtgaaatacatgttgcttttaaaaaattccaagagtggcccttaaatttctttgggactataccgtgtaatagcgactgactcaaaagggtagtctggaaacctaatcttagcccctggtcacctctagctagtgtgcacagacctcagatcttgtcagtctcatttccctacctgttaacgtgagacagttgggcagaagaactttagcttcccttaaatgctacaactcagcgtctctattaatcataccgtttattcatcaaaatgaatactgataaaaatgacaagtagaacacaccctagatgttcaggcctctggaattggtggcagcgttccagcttcctttctgcctgtaactgtgagtaagtcctgctttacctccttcccaccccccgcacccaccaacagctctctatcataagctaatcagcttgaaataattgttagggcacttctgtgtatggcctgtgcatgtgccagtgtgtacaccgtgcaagctgagctgttgaggttctggatgtgcatacagccctggcaccggaaggtttgcctctagcattttgtggactaactctggcagtacacaatgggaagaaaacctctttccaagtgtgagcccttctctcttctcattcccaaggaggtgtgtccagatccctttgccagacagctactttacaggagcattggagagcaggcagctaactttccccaacaagcagctggatttacgttggcaaatcaatccctctcaataaaatgttatgtgaccatcttcccagccccccgttaaaatcccttcattttttcgagcaagcgaactagtcagagaagacagaaaagttaagtaaagaaagtggcagaaaagtgaagcaaagcaacagcccgggagcgtggcggggggacccgcgcggggactcgggtaggctgcaaacgctggggagatgccacaggagcgcctgccttcccagcttctcctttctctcgccgagggtctctggggttcagcgctcccggcgtttcggcgacctccgggtccgccctgtcccctcccagctggggagctgagcccggctctgcgcccatcgccgaccccggccactctcccttcgctgctcgctccaaaagcgcctgtcccgccccgcggggcgacttctccctttcggccctggggttgaagatcctgtgtggggcagctgcgccttcgggacagccccagccgcggagcgcccagaccagggcagccggagtcgggtcatacgccgcacgccgccggggccgccgcacctgagcccagctccagtcacgccggaagcgcgggcggagcgcacgggtccggggagagtcgcctgcgcccgcgagggggacccaagtacctagggtggtggccgagtcccgcctcccgccagcgggggcgaggacctgcgacgcgcacccctgcctggcccggtctcctcagcaccagccccacgcacaccctacttcctcagcttctcgccctcaccctgccaacttccctgcgaggagggacctgccgccagcctgcttcctcgtccgcaggccctgcgctgaacgctgccgcgcccagggttcaccttgcgccgtcgggaaagcccatgaactctccagaaacggcgtaaaggagggtcccgccgcggcgcagggctggggcgcctgggttccccctgggtggagcagcggcagcagagcgggaaagtggtggaggatgatcttgcggccaaaggggacctcggcgcagtaatgtcaacatgtaagtctcacctttcagcttggaattccttcactcttttatctgtgtccaccttctgtcgccccctccccgaccaccccaccctcaagagaaatgattttataaggacttcaactgcacggagggaataaaccggtttgtcttcagtttgcccctcgaggcactgaggagtaggactattgccaagtggagttgtgacatgtgtgtgtggctgttttttttcccccagcgaggtaaacctcacatttgggcggtgtaaagcctaataagaagggcagggcttcaagaatggggaaaacgtgttttcaattcaaattaaacaaggagtaacaggcaccgctcctcagtccagaggcctggccctgccaagaaggcgctctccggaatcaacacctgggggcttggaaggtactagtatgccgagaaaatgttgactttacacattgtcaccattgactgtagaagttattcttggatctttggggtgtttgaatttttttaaggtgtgcagaaaatgttttcagtgtgctttgtagtttaggaagtaattaagggttacgccacgttacgtgataggatttgaggggacttccatagacttatggggggcgtggggaattggggcattgaaacagagaaacctaaaaggttttgcctccatagaattgtcatcctaatggtgaggtggcgcacagcgaccccatgaaagggtcgccaagcaccgtctggctttccagaatgggaaaaggaagattgtactccaaagggccaagcttatttttgtggccaactaagaagtttctttttcttgtaataggtaattttccttctgatgttttagttaatcttggacggacaccgtgacagacattttatccccttccactaactcatgtacaacaatttctagaacttggtacttaacactccttcccccaactcctggatcttacatgaatttactctttcagttcagtacatggggaaagacctgccccctaggtcctgtttttccacactttcctgcactttccattccctacttccccactccccaacacacattttaaaataggagaaagaaaggatagtgcccacaagcctagcactctgtaactctgttccaggtactgtgagatgtaatcagaaatgaaccacttatttttactgaaactgcatgtgaaataattccacacctgggagttttaaagtttcatttatgccagtggaatcggcaaggtacaacttgaaaaaatttattttgggatacagccagcattttcatataagacttgttctcatatacaggctacacattttgaagtaatatgagcttgttttcaact

SEQ ID NO: 10888 - DNA, 6000 bp, Homo sapiens
taccacttgtgtatacttcatttgcatatgtaagtaactccataaattttactttccaaaatacccattagagtatactataatttgaaatacaggcttgatatggtttggctttttgtccccatccaaatctcatctcaaattgtaatccccaggtgttgagggagggacctggtgggaggtgattggatcatggcggctgtttcccccaaattgttttcatgatagagagttctcacaagatcttttggtattataagtggtatttaatacactaaattgtgtattaaataagtggcagtttcccctgctctctctatctcctgctgcaaagagaagacatcccttgtttcccctttgccttctgccatgattatatttcttaatagcagtgtgagaagggactaaaacgggaaattggtatcaagaggcagagagggggcactgctataaagataacctgaaaatgtggaagcaacttttgaactgggtaagaagcagagtttggaacagtttggagggcttagaagaagacatgggaggcaggaagatgtgggaaagtttgaaacttcctagagtcttgttgaatggttttgacccaaatgctgatagtggtatggacaatgaagtccaggctgaggtggtttcagacggagatgagaacttactgggaaatggagcaaaggtcactcttgatatgctttagcaaagagactggcagcattttgcccctgccctagagatctgtggaactttgaacttgagagggatgatttagggtctctggcagaagaaatttctaagcaacaaagcattcaagaggtgacctgcttttttctgaaagtgtggttatatgtgttcccaaataaatggtttgaaactggaacttatgtttaaaacagaagcagagcataaaagttttgaaaatttgtgccctgaccatttggtagaaaagaaaaccccattttctggggagaagtttaagccagttgcagaaatttgcataagtaatgaggagctgaatgttaatcaccaaggcaatggggaaatgtctctagagcatgtcagagatcttcaaggcagatcctcctatcacaggcccagagacctaggagaggtaaatggtttaatgggccaggtccagggccccactgctctgtgaagccctgggacttggtgctctgtgtctcatttgctccagctccagctgtggctaaaaagggccaaggtgcagcttgggtcattgcttcagaggctgcaagccccaagccttggaagcttccatgtggtgttgagcctataggtgcacagaagtcaaaaattgaggcttgggaacctccacctagatttcagaggatgtatggaagtgcctggatgtccaggcagaagttggttgctggggcagggccctcatagagaatctctggaagggcaattcagaagggagatgtggggttggagcccccacacagaatccccactggggcactgcctagtggagctgtgagaaaagggccaccatgctcctgactccataatggtagatccaccaacagcttgtactgtgtgtctggaaaagccatgggcactcaatgagagtccacaaaggagctgcccaaggctataggagtccaccccttgcatcagcattccctcaatgtgagacatgtgagacatggagttaaatgagattattttggagctttaagatttaatgactgccctgttggctttctgacttgcatgaggcctatggcctctttgttctgggcaacttcttccatttggaatgggaacatttacttcatgcctgtacctccattttgtcttggatgtaactaacttgcttttgattttactggctcataggtggaacggatttgccttgtctcagatgagactttggacttggacttttgggttaatgctggaatgagttaagactgtgggggattgttgagaaggcatgattggttttgaaatgtgaatggggcatgaaatttgggaggggccggggtgaaatgacatggtttggctttgtgtccccatccaaatctcatctcaaattttaatccctaggtgttgaggaagggacctggtgggaggtgattagatcatgggagcagtttaccccatgctgttctcatgataagtgagtgagttctcatgagatatgatgatttcatagtggcagtttctcctgcttttctgccactgtgggaagctgtcccttgtttccccttcaccttttgccatgattatatttttttatagcagtgtaagaatgacctaatacaagacttaattcatccctttgtttcttttgtctgattcttgcttgcttcttatctctcccatttgaagagtttaaatttctagctgattttatgtggaaaactttatatccttttgctcttttatagcctagactcattattctatgaaatactttatgatggaaagcaatgataattatgcatacattcataaggagggtgactacagttttgttgatggataatatttaccttattaccatatcaggatggtgaacattctgttcttattgttacagcagcacattaaatcattgttttgagataatagtgcagatattgttttgattttgatcttgatctccactaaatagtgtattaaatagatttcccaaacctaaatactgataacacttttttatcctgctaaaaatcacatactagattagacattcttttgattttgatcttgatctccaccacattgtgtatagatttcccaaacctaaataccgataacagttttttaccctgctacagatcacatactgattgtaatgtgatttcatactagtactgaatattcatactaacaatatttctggattcatgaacctttagcattctttgaactcttatagattagtgtatttacttgtatttgctagtttgtatgtagctcattgttgcagtaatccccttcaatcctactggaagaaccatcccttagatgtctgcacatgtattataccctgcctcctatgtgaagtcttcatttatagaaagagaaagtatatttgggtgatcttgtcttcttttgtctcaatgccttcttctttgattgtttttgtcctggtaccttctatagttagctcttaaataattatcaataaatttaattgatcatttcaaattaatacatttgaaattttttttctttaacactttttgtatatgcatgcatctggcatgttataatcctcaaattcatcgtctttaaaatgattagtttcagccagcctgaatgtgtagtttttacttggactgtaaaatgaatttgagaaccaataaatctgaacatttaattattccttcagtacagcaatgtgatatattaaagatgttcagctttaggagcacatattgacactaaatgtggacttcagagacattactttctttaatgctgaaaatcataattaaggggtatatatgcacagaaatctttgcacattcactatatctctggaatattctaggaaagtaacatttagagcttatcacactctaatgggcttatctaaaattgaacttaagtggctactagaggaagtcagatactatgggactctgtgcatacctgtggcttgctgttcttcgaacagacatattcctagggtagaagcagagagccatttagtcccatatgtgatgatcagaacttacctcttcccattttccttatgtaaacatgtggctacttcccgaattgagatcatttagtctaaaaaatgtgaacgttgtttagtgcattatttgtggaaaaagaaaaaaatatattctctttgggctgtctaaaaaaaaaaaatccagaaaactctgacacttagggaaaaaaagatcagaaccagaatgagaaagaccttttgttattgactagaggtattgttttccttcctaagtttcatggaacacactgaagagtatttgaaactgcctcatgtggtttgtcccctccagtctgacatggcaccattccataatataataatgacctgagcaaggcgattataagctgacccataagggaccaacgtaagctgatctctctgctctgcagatgacacaaatagaaagctttgaacaagagtagaaagacacactgtcacttgtcttttcccctgaaaaagccgggccacattctgctcagccaacatgttcccagaggaatgtgatttaacttccgcttttcacacagtcagaagcaacaccatagacctgtagggaaggtgatggccgcctgggaggaatttggataagtatttgtcactccagtattttcatgtgacctgactctcattctcaatttagttacatcttgacctgaaaatgcagccacaatatgtctctcttcatttggcataccttaattcataatgggcatgcctgtcctttcccttctcccaccctatgcagcctcttcctgatttcccttgcaatctactaatagagcctttctttagatgtctgtacatgtgtttacactctgtttccctctgtagggactttactcgcagaaagagaaaatatatttgagtccctgagatatatatacaaagatatctaccccaaagcagcctaggcagttctccacttctttggccagattgtctgactattcacgtatctggcagcttctatacgacccctcatatagtaaaggaattaatattccccacttcctcctagtttgtctcccctcctccctctatcaaacgactgatttttatacatgagataatagacaagccttgggtgacctgtttttttttttcttccctccccctctttttcccttgcggtaaaatagtgctgaagaaagagggcactagtgtacagcccagatcgcatccttgcaccgtctggattagagctgaggcgtctgcaagccgagcgtggccacggtcctctggccccgggaccatagcgctgtctaccccgactcaggtactcaggtatgtctcaagtccatgtcctccaaacagactcaggtgagcggacacttcctccggtgaaacccacccacaacggcagacaaagtcccagtctatcagattttcctccgggtcccaggcgcattctcgcttatgtatttcttttcgtcctgtatcctcaggaagagtcgggaccaatgggtgcctgggttttctttctcctttttctgcctcacctcctgtgctctcctcgcccgctcccatagcccccttttcgtcgactctcaccttgagaaaaggagcaggggaggaacgggagagggagccaacttcagccccgcaggcggctgagatttggcgcctctgtccccaagcgggtgggtttggatatatacctgcacaagcggtgcaaggtgatgagaatgagggcggaggggcggtggggactcgagtggaagggagtgtgtgtgtgtgtgtgtgtgtgtgtgtgtgtgtgtgtgtgtgtgtatgggtaaagaactcagaggagggaggttgaaagagcaaagcgggtcagggaattgcaactcactggtcaaagcgtcccttgcaggccctgccagggaatgtctggctggaccgagcactgtccagggtcctgaaggcggcagggctcaggctgccgcggcgagagcaacccggaagctcccctccgttccctttctagcaactatgcaaaccccaaagcaagcgcaggaccccccctaacccgtccacccaccgcgggaaacaagttaccttatctgcaccccttcttcttgaacatacacagcaagcctgacttcttacgggggaaacataccaaactcctccatacggagactttaccaggcgttgccttagtaactaatgtggattttcttcaagctggcaaatttatatttacagctgattttatgtcagggcttcttcaacccctcaaaattaaagtaaaaggtgcatcctttgtttacgtttattttaaagtcgcg

SEQ ID NO: 10889 - DNA, 6000 bp, Homo sapiens
tctctattccctcaatgtattcttccttcttaaaccctttagttaagctctcacttggacattcttaaagaaattttgtctcaaagagcactgagaacagtagtgatgaaacgcgcaggtcgcttttcagtgctcaaattcttcactctgcaggtttcctataagcacttttctgttttttttttttttttttctttaaagacactgtactaatattttaggacctatcctctggccacttctgaagtgtcacttttccagcttcagtctgtccttctgctttgtaaacatgagcccaacatcccagcagttccatcggcgtctctgggtttaattacaacctctccatgcaagaccgttcctgcatctcttgctaagccccctctttatgactcaatagtggtaacttccacccccatctctaccaccacgacaacaatcataattacaaagctgccactgtgcacctaatgctgtgtgaggcatgaactttgtcttcgatcttcacatgaatcatttacaaatctaaaatcctcgtgtattgattaggagacagacatctagaggttaacttgaaaagtgactttcgattcttgacatgagtctaaagtcatgtcaagaatctccaagaattttcagttacacgagacatcaatctcttcacattccaggtacttcaatgacatccattttcttccctcttagaccggtttctataactgttcttctacgtagaaataaattagtaaataaaaagtaagctttcagtttgatttccctatttctgtcccgatgtaaaatttggcatcatcttgattccccttttgcttgttccttactgatattttccaaaacatctccccacatcattttctcttcacatgtatcccagaaaggtatgaacttttggatcagatgacatggttttgagattggctcttcaacttattggtgtatgaacttgaggaagttgcgtttttcctctgagtttcagttttctcatctgtcacttgaggaggactatgacaaccccagggcccctgggcctttagtgaggattaatgaaaatgaatgggtgaaatggcgagggtcagccccacatgctggacgcccttggtcccggctcccttctctactctgtgatgtcaggcagggctgccgccaggaggagggtgcacctgccctgtgacctgctcttctccctaccgtaaactcgctccctgtccctccacggcccacagacgtctgtgtctttgtattgctgccagccttccggtcctgcagccaccctccccagctccccactgagggctggtgcccccacctgtccttactgctctccacctcggtgcctttctgcctccccacccaggctcatgctgtttgtccccaaattgccttcctccccctgcctacctggtcagatctgagtcgccttcctggctgagtcccagcctttcacgaagagcctgaagtccaggatgctggaggtggaggagctcctctgtgctccctcctgtgaactggacgctcgcagtggcatttcttcactgatccgtcacacgtaggctctctgcatatcacatgtggcttgtattgtcatgtatttaggcctcaactttccaactatatgagttcccaaaaggtgggaagtaaatggcatacttttaactatttctgtagcttgtgtgctgtacatagtaactatctgaaaaaatgattcgtatctgaaaaataatttataacaggtgttctcctggctatttgggagagtaattttcaggccagctactttatggggtagaataacacagagtgactccccatgcccaaatgtattagcatatacagtgagcattgaaggatacaccatttgacatcttcgtaaactccaaaattcaaggtgtcagcacagcttgtacttcctcctataaaatgtgtttttgtccctactagagaatttgctgatgtaatttgttaagtagccttttttaacttttttatgaagaaaaagatatagatccaaaccacataacacagatccaagcactgctgggctcggtagtctatgtttttgcaatgggtgtgagcctgtggctgcctgccagctgtcattgttgtaggtttcttcttcctgtccctccactctcagcacctgtgctaactctaggctttcctggggagggttttgtaaaaaccaacaaatgacgcttttattttaatttgttttgttttttaaaaacatgttcattacttcagaagttttgtgcgcacaatgagagtagaaaactgccccagttatctaccaccttgagtcatggtggctttaacagtgatttatttacaatctcttgtggctctgggggtcaactgggctcggctgagtgcttctcagttggggcctccactgcaggtaccatcagagagtgggtgggagccatgtcatccgaaggctcgattgggctgggggactcccacatgtggccggcaggtggtgcactgctgctgcctggtatctcagcaagaattcccaaccagctcaccatattgacttcctcaaagtttatacagagtgttactttaggggttaacaaagcatttactatcttttcaactttgctgataatttcaaaagatgactgacacccagatgaccaatgtccacaaagtggtgtgccatggcctccagtgtgtgtgctatggcctccagtgtgtgcagagcctgtttgtgaattaaaggcaatcacaaggagaaacggtcatggtgacccattctgagctgtacacagtgtcctctgtaggattgtagccagaggcagatggctttcctagaaatgcctcaatgttgagttttaaagcaactccttatgactgttatctgaatttaccaaactgtccctggcttttcttaggaatgaacttctgatgttgctgtggaattttctgcctggaaacttattgttatgaaacatgtgactgtaagccacattcctcgccttttatgcacctcacagtgtctatgcaaatgaacagtgtgattttaaatttgaggaagtttcaataagagtgagatctaagaggatctttaatataggggcatttttagagagctaaaaaccaaataggtctcagctttctcagggtgacatataatttagatttgacttggaactacagaaggaatatggggcaaaggacatgagaaacattgcagaggtcagtgccatatggagcttccacctcagctctcgaagtaaaggcaaccagcccaggctgggagccagtcagcagcagggtctcaatctccatccactaccttcccctctggggcagggagggtgttgcagggaggaggccactcttggagacctccagatccctgcctctgtgcagtctaacagaaggggcccccacagtggccatgaatctctttgttctgcaaggaagggggtgtcattgggcctcctgggtccctcagcatctgcgtggccacacaacgcggttttgttcaacacgttacatttctgcttaattaatgttcatttttggtccccagcaaagtccaatctgtttttcgttttctttcttttctttccaggcaggcattgccagggctaatcatctataaaagggcttactttcttaccttcacgctaagcaagaccatccaagggcagtgttagagggcacctgagaacgcaggaggggtgtgttacctggtggcctgtttcttcctcctatgggcagcccttctacaggaagcagaagcctcaggggcgatggtagaaatgaggaggaggggatggagctgaggtagcaggggaggggtcgtaagagcagaggggagggtcttgctttgttcgccatccaataatcagcaggtttcgggttggggtgaactactggggaggagcgccccagggcttctctcagatggaggagggacaggtcacccagagtgaaggaagttgtgagctctgttagaggaaaacagccaggacttagtcaggagaggctttgtttggaaggattgttgtaaggcagggagaggaatgatggcagcaagaggaccccgtgaccataggtctgcaagcacttcaaacagaaaaggcccttcttttatccagtaagggggagccactggggccagcagagtctttggaggggaccctggacaaacccgggaaaatggccagtggggttgagcaggacacaggtcctgctgtgtctagctggttccccagagagatgataaggggtgcgctccagcttctcaggctcactcaggcgtgaggacgtggagctcagggctctgcaggaaggagcgacccaggtgaggtgtggtcaagatagagcagagctgggcagcgggcagtggagcctcgtgggcagcctgggggtggggaggcacagtgcactgggaagtggagaaagtgtgagtccatcaggctggctgagaattgatcacgaacctattgtctgtaaaacttttgttatttcctgagacgtggttcacagcaacccaggtgcgaacagccttgtgattctagggttcttttctattttttaagcacttgcatctacaaataaatttctgagtgacttgtcgtcagctgctttccttgatatgtctaaagacagggcagtgacccgcatcgtcacccagagattctgtctctgtgccacatgaagattaggtgcccgcttttgattgaggagctcctctgttgctctcaaagtatcttgtaataatagctgagatgcatggagaaccacctctccttcaggcgctgctcctcggcttccgtggacgggcatggctatttctcggaaccctctgaggttagagctgtcatggtctttcttctgaaagaggaaaccgaggcttgctggggctcagtggcccttctgtggctgcacagctttcggggtggggccaggactgactgactccacacaaaagtgctcccggcccatgtctttaactcacacggcctcttgcaaacgttcccaaatcttcccagtcggcttgcagagactccttgctcccaggagataaccaggtaaaggagtatgaaagtttgggtacaaactcattgctgcaaattgaaaaccatgcaaaggctgtcttcctctggggagttcaatgcctctctttttcttatcactttaccattggttggactttgattccagggatcctacgattactcaataccctacaggatatacatggttaaccatttgcatttgggcaaataggcgttacttttcaataggaagtggcaatccagaacttgcttttgggcaattctagtagctcaccgcttttttcttaatgactgctagaagctgcatcttattgacagatggtcatcacattggtgagctggagtcatcagattgtggggcccggagtgaggctgaagggagtggatcagagcactgcctgaggtgagcatgccaaggcccctgagacttttctttcaaaaatgtaacttctttgatcccctagtctgacaggaatgggactgttttactcattaatcttccagaatgctggcatattgaccatgtttatgcttaacgacacagacttcctttcctgaaagcattgactttatggttttaggaagcccacttttcctctaagtgtatagtaagggatttcatactcgctccctgcactggagcttcggtgatggtctgggtacttgctcctcatacaggagatatcctcagggcatcagtctggagaggaatgtgattctttatttgatcaaatacactgaaagattttggaaaacaaaaaaattaagctaagaaatattttggaggcagtaagtcatttatgcaatgaaggctgatgagtgggcatcccggacagcctaagattgagcaggaaggagcttgtgagggggagttaagagaaattgacaaggtggaaatttcaacaagtctcagttgcaaagctctcatgagggctgccaatgccactgt

SEQ ID NO: 10890 - DNA, 6000 bp, Homo sapiens
agtagggccccagtcactagcccatatggtacctctgagaagatcagaaaaaggaaacccatcttttgggcagacacagccacaagtcaggatgtgtcacttgtcaagaccaaggcagggtgaatttgagctgtcctgagccccctcaactgggtggcctcttggcagtgaacgatgcacaccccatacctgcagttctgctttgagattagtgtcgtaatccttgttctacagataggaaactgaggaccttgagcaatgtgacccagacatgcacatgtgacacaggcgggtttgaacccaggcaggctgttcccaagaacactgcctctccaggaataacttgagttccctgcaagcccagagcagtgcacacttggctgggcagagctgctgggcagcaggaactttcaaggcctttgcttatatctctacaaaatgtgtggtgctgaggtccgaatggccacggggtgcactcctcaagggcagaactgcgttcagtcgtgtgtttacacctagagctgggaatggagcaggacctcagtcagtgttgtttgcattaaaaaaaataaaagcatgaatgaatgaacaatctgggtgcttccctcagagacttcagaccgattgggtaaatgagacatgtatttgggtcattacatgtgacagcaaagagagtgcaagctttgccaacatttattcactcaccaaacattccttgagcttacgctaccgttcaggcatggtgccaggctccatggccaaatgatgctgaacgagatgtggttttggcctagcatagtctggagatctggaggaggtggagcctaagcaggtcttcaggaaagggcaggagcatggaaaagggcaaggagggagaaagggcagtccagttgcaagggatgggggtctgtccctgttattcccagaccctcccagacattcccctcacctaatttcccctgtagaaattagggttggccgagtcctgccaggcctgggcatcgtcaagcacaaggtagcacttggcaggtcagccgggggtcgaggtactgatggggagggaggcctctggccaacctctccagctctgctgcctgccaccttcttcccccagctctctggcacagtgttgtgctccctccccaggacaaggacagtcacacatcacggctctaattgaagccgcttctgcagtctggggtgagatgctcttgcaatcctaagagggctgcgtggctccctcacttccacgctgcctgcctctagcaacactctcctgagagttttcaagccccctctgggaagggggcgagctggctttatggttggctaagggattcttcccgagtctcactgcagcctgccgaccaggaggccacctgttacacttttgccatccagtgctggagggagaccagcgggtggggtgtttccctagcctggtggggttttgaggtggtaagggggctctgtggaaagtgtcccctggacaggctgtgagatctggggcaagtggagtcacctcactgggcctcagtttctccccttgttatatacttgaatcaggagcagtggggtgtgcaaatgaacatgccacatgggggcatacgccacgtgcgcgcggatgtgtgaggttccagtgacgcaccagggtgggagtagcgcgcccctctgcgtccctgtgctttgctgtacttttctgggtgtgtgttagggaggctatgttcctgaccctccccctctggggtgagaaggggtccccgccatgtcctcggggtaggtgagctggcacgcgcacggggaggaggaaggggggggcttccggaagagggcgccggtggggtgtggtggaagggggagctgccagcagggcgggtgtggaggggtggcggagcgccgcgagagccctggccttccggaggtggaggtgtggggtagggggtgggctccaggtgctctctctttaaaaggccggcagaagcgccgtgagcttggcccgcactttcagcgcaaacttgccggattggtctcgtgcctcctcgggtgcagcagcggctgtgggcgccggggcaagcggctgcggccccctcgcccccttgcgcttcccggctctcccgccctctcccgcagcctcccctctcagcgccttcctcgctctctcgtctctcgctccctctctcgctcgctctccagcgcgctctctagctcgctctcattttttttcctgctgctgttgccgctgttgcggcgccgccaggcgcccgtacctcggccggctgcgctcgctggtcgctcccgctccgctcccttcccagcccggagctctcggccagacccagctcctcttgccgcctctcccgctccttccggctcggacgccgggctccgccgcagcaggagcaggggttgccgccgatctccctctcgcttgctcgcttgccggagcagcagccgaacgccgcgcgcttggcggcggctccggccgggcggccgccagctcatccctgctgcgtcccggactccgggcggctccgcggcgcgctgggtccgcagcgtcagcgctgcccgccgcggcccgggctctgggcaccgcgagaaccgtgcctccggccgtcgactgcctgcgcccccggggcaggccggcacgcagccgacccctcgccgcggcttaaaccttgctggcgcgcggtgagttgtggcccgagggggaccgacagaggggaccgtgccctccggcctcctggggcgagggctgcggcggggacatcggggctcggggaggtggcctccggcgagctcccgcgcttggagtgctccgaggagagctggcgcccccggagccctaggggccggagggcgcgggatctgaactagagggtctcccctcggggctaaggcaggctttccgggtgcccctgagggagggaatggggcagaggcttttttgcgggcccggtggaaagtactgtctctgtatacaggggcttccaccggatggagggtcgtgccagctttcaggtgggggcggcggcattagcgcatcccggtctgcggagaggcgggacaggcgggggcgcggggcattatttgcacctcttcccggcagtctcccggcgggagggcacccagcctcgcgcgcctcggctcctttcccaggcaccgcgtccagctcccgtgcccgccccagcgccgccttcgccagcggccggagcccggcaaccgcttgcccgtggcctcggcaggttgtgggggtctctagggtctggggtctccctgcagccccaggacttcagggtcaggctctctccggacactcgggaccgtccctccccgggaccgtgatgaacctgcgcgtctacgcggccgccgggcgagcggaccggcagtggtctctgtgtgtgcatgtgtgtacgcgcgtgtgtgctgggggtccccgctccggggtcggtcttccccggcgctcgcaggtgggaggcgtctcctccccgcgcgggggcggggccgggaggtggaggcctcgactgcgagaggcgcccccgcaccagggcggtctgaggctgtttgtgctgagatggggcagcagcatcggcggcggcagggagtcctgaggcccgaacgtacgagcgccccctgcccctaggccttgagtgacatcccgccctcagactttcagtccctgtcggaggaggcgccttgcttctttctcccctctccgcaccattgccggcccctggcgcgggagaacgcggcctttccggacaccgactgagctgggcttgcctagctgggtgcccgaagccacgtgtctctcagagcggtggctgcccctgtgtcaatctggcagaaagcccgaagtgacagggagggaggggcatgtatgttcccatcatagtccctcgccttgtccgttctggggtgagtgggggcctagggcaggcagggagaccagtgctcccagggtctccatacggagcaccccatcccacaccctgccattctgcagcgctcagcctcccgccccggggccagccaatggtggacgtgaagaatgctctcatacccatctgcccacactcccgggatgcgtcctgggctagccccactttcccccggatcccaatgggatgctgaacctcaggctctggttctgcatgctcagctcctcagagcccagaagggcctcagggccttccggcctagggtagggggaagctttcatgaagaggggaggactagcaggagccctttcggaggtggcagaacttccgcagaggcctctgggtactctggggtgtgagcacccatagcgcaggggcctcgtcacctcttcttggcaggccctggggactgctgaaccggctctcgaaatgggcctggctgcggtggagagtggaggttggagccttgtcccctctctcacttcctggagggcttcaccagcccttagtcagatcctgtccttggggtgcggtgggcggggggctttgaggatggtgcctccaagcctctgctcagcactgggctgggcgtgatgtccgcttgtgaattgggtggccgctgtctttatgttcctccaacttctgtccttttacacataagcttttgcctacctgccaataccttcacacctgtcagggacaaaaatacctcaaaagttatcccccccacaccccgcaccttagccacttcagggactaccctttccaggggcatctgcatttaagagagacgggagaggaagatggcaaggcttaacccaaaggagtgctctaccctactcatggattcttaggcattttcaggagcgagatatattggtgggggggtggcagcatgtagctcgtcaccaagcacaggtcctgagcaggcggaggggaggcgggagcatgtcaggagttgagctgctttctgggcctcagtggccttgcgtaggccgctcctcctccccccctcctccctcctcccccaacctgcgtctgggcggcttcattccgttggaggcgtgacttctctgagagggagcgccttgcacagcggcaggcagcccgaggtaggtgagagagcgagcgggtgagcgatcgagtgaaactggaactgagcagtgtgctagccagaagggtcagggggccgggttcaggcctagaagggctctgcagctcccactcacttcctgaggggtccacagtccagcgccaggatgtgtggccacacccatccccaccctgctgcgggggacagctggcagcaaaagatgggagcagaacccacaggctccttagctgaataattactgccgatagacgtgtcctctctcctagacaagtgtggagcctgcagcctctaattaccacccaccccaagatatctgcccaccccactgtcctcctctgctcggtctagaacccaactttccagtgggcaggacgcactggcagcctggacagctgggcctgccggctgttggctggcaggttatctcatttctgcagagtggcggctgcctttgcctcctgaagaaggcatgtggggagctggcattggagctctggccccactcaccggggctgcagaagagctgctggctgtcttggcgggcctaaggggcttgcactggtgggcatgggcctggagcactggacaccagctctctgtcactcccactcagactgatggctcctggaaagaacggagagggctcattttcttaagtgtcacctctgctgtagttagcaggggactataaaaaattaagttagagggttttgctgcctttggtccctgtagagtgcaggctgctttttcttggtcctgcgagctgtttatgtctctcctctctctgtgtactctctctgggctccctctccctgctgcctcccagatgaacctgaggctggtagttcctccttcacaactaattccttctccctgcctgccctgggggcttctgccttggtttcccacttctcccctccacctggcttgccttgcctgagcctgctc

SEQ ID NO: 10891 - DNA, 6000 bp, Homo sapiens
ttccttccttccttcccactctccctccctccctccttcactttcttttctctctctccccttcctccctccctctttctttcctcctttcttccctccctccttccctccccttctctctctctttctctccctttctttctttctttcccttctttctctctttctttcccttctttctctttccttcttttccttccttccttccttccttcctcccttccttcctttctccatcctctgtccctcttcctccctctctccctctctctctctctctttccctaacacctttagttttaagggaaatatatgatagctgtcagttgcccttctttaggccaacattccttttttcccaagaacaatgctactgatgttttacatgtttattccttctttgacgggtttaatattatagtgtccatacttcctttttatttttatgtgaaataatgaaagttatagagctccttaatagtcccctcttagagctccatcttcaatgacaaatgtgatattagtagttggcagagaaaaactgacaatgaaaggagagcctcacctctaatgcaggtgaagacaaagctcgtgtgtcagtctgtgatggagtctcccttcacaagtctactcatggttcttgcagaaagagccacacgtttgtgggaagtgatctttaagcacctcgtagatcacatttgttgtattatttgccattgatcatttatagttctcatgattactccaaaatcaagaatcactgttctcaggaacttccaaacttccaaacttccacactgagctgttagataagtcatttcccctgctctaaattacagaattaatggcaaattcattttgaaaataaaaattaaacaaaacaaaacaaaaaggccttatgtttggctgctgatctggtactaagagctttagtgagtcaaaccaaactgattggccagaccgatccttaaagataaattattttatatctttgatatttaaaaatatagattgtaagtcacacacactaaaaacacagcaaatataaaaattaaagagaaaccaaaccacacaaatatatttatgttttctgatttattcctttcaaaatgtcactgtcccctatgttgaacgctttgctatagctgattgatagtaggacatttctgaatagttgcctatgtggcaagaattcctaaaaacactgtcttaaaaaatactgaacacctgaaatgtatgccctttgcttatcaaggttttctttcctccaaggtactggttttagtgagtccaaacctaggccactttcaccatatttagtaaacccgtgtccagttattgttttacatagttctgctttgggctttgcctgtactcctgccctaactgaaactctgtacacacctaattgttcagctgatatcactttgtcattcactttcataatcaacacacttagtttattccctgtttttattttacatactcaaggaacgtataaaaataggccaaatatttaagaaaacagttttgccattgaaaattcctgatacaacttgctgtaagcactatcacctgccttctgttaaaagaccattttcaaaaggtgaaatcctgactccaatataaaatgacatgtgaaagagattttatttaactcattaattaatgaagggagtggtaaaacgttagaacttattcaaagggaaatcccaagagcagatatatttatatagagacaatcaggaatgctgaactgagtttgctaagagctacaaaaactggctaatatcctaacgtgcactaaaatttaatgtttgaaataaccatttctatagggtggaaggcaattatatatctactggacaaaactaatgtgcatttctatggtcaaaaatcatttgtattactattagtttctacgtccttcagaattattaaacatccagtcaaagatgatcaaatgtagagacccctatagattcagctctccagctgtaagttgtttgctagaaaactctcaacactctgttgacaggacacccagtcatcttttcctattttaaagcctttcactattttttctgacacttccatttccaatggaagtaatatccattaattaggaaccaaattgagacttcataaagtaagttcaaatgattggcttaataaatatctttgctttgttctagatagatgcatatattaaatgacaattaaatgcacaaaaccagatattgagaatcacctatgttttgattacctttacagatgatagagtatgggtcttgttactgcagcttgtactccaatcatccagcctcacctggggcttctcactcatatacagtcctcgtcaacacacaaagtgacctcttgattcaggggaaccatgaaaagtaaccagaatatatgcttagaaattccagacgtaatattgtcatggaagtattcaaaatcatgaaataaaaaatgactatgtggtttaataatgtttcaaagtccaaacaaaatgcagaagctaactgttgtgttttaagagcggtcgtggcatgtccctagacccccttttgccttttgacttctagaaaaacaggcttgattcatcggggagcctgagaaagtgcaggagagtcaggcagggtgcacagagcctgcctgtggtgcactgcttccagataaatgctgacttcacaggggttttcctcccctccccaccacctcactgttttctaagctttgttccattcatgtgcttcttcccacttctcctgtctttatccttcctcccatatccctccctcctcttttcctctttcctttccactgccccttctttctccctctctctcccctcacctccaacagactcccatttcattcacccttgctaactttagtcctccttcttgtgggcattatctaagacttcactttttgaatagaggttgttgcctgcttataataatctctgtgaggcagcaatacacagcatatgacaaactgcagcattttcataatattcagcaatagctccgcaatatcacccgtgaagttgctccactttgtaaaactataacaacagtcttgtgttttcctctaagtcatatattctcctttccctaacatgtaataactgtaattaatttgattttattttgtaaattaatcaaaaataatttgattttatttttaaattaatcaaaaattaatttgattttattttgagaccaggctggtctcaaactcctgggatccaacaatcctcctgcctcagccaccggagtagctgggacttgtacaagtgcgcaccatcgcacccagcaataactgtagttgatgacgctcctcctcctaacattaaacccacacaaaccagacactgctgggtcctggatgctagggatataatggtgaagcagacacagtccttgacctcacagagggacagcccagcaggagacagagagacaagtaggcaggcttccttgctttagtgttatgagagagacaagcatggtttgcttggaagaacaccaaaggggcccagaaattggaaaatgcattctgaaggatgtcagattcaaggaattggatcttggaggggaggacatacttcattgagtggagagaggtggggaaggagggaatgagaaagggcatgaggagagcacaggtgaaagtgggctttgagggaaagtagaagagattggccattgtgcatttaagggtttgacctatatccttaagctcctgaaagattttaagcatgggaatcccaccatgaagatggcatttgagagacattaccctggttgctgagaggagaatggataggaagtgagggaaaatatgggcaaggagaccactgtgtgatttttactcagtgatgtgtttgtggtctttgcctgctcacacccgcaacccagcatccaccctcctccccctctgctgccttgcagcagcttccaagtgtgctgctgttggaggactgactgtcaccctgctgaacacaatggaggtagtccaggtctctcaacaactcagcttgtgaaaatccacatggcccagagttcccacgttctttctacagccaggactggcttggtgagtctacggcctggtacagttgcatagagccctgtgctccagagagtccccacacttgctttaatgttctattgtcaccatcttgaaattcttaattttcaaatgagtggcatcacattttcattttacatgaaaccccataaataatgtagagggtcctacttcactccacggatggtggcctcctgataattctttaaactctaaggcaaaatggcctgagggctttggagtcagtccaagattaagaaagatcagactttccaaagacagagcttagggggtcttgcctgaggctgggaatggattcttccagggcctgttctaacctgcctgtcatcagctgctctgtaatatgacatctggactggggccagaatatgctccagctcagtggaagaagatgaggacattcttgacttttacagagttaaacacttagaggaacttcaggaagaaagcacttggtaaaaggtaaagttggctggcccatcagctccttgcctggggtcctgctgcttcttttcacagttctcagtatgtttattctcttctttccagtggccagaggacaagtttcctgtttcctctagggagcctggagagaggcatcaggcaccaaatataggaaatcatgtggagaggatctcttatttattacagtccccatattacttccctcccccaagcccccgccccccacctccagtcagtcagtgtctcccgtcttcttcctgcagcagagaacagaaggcagttcacctctgctcccgacagcctgggaacccgcaagagccccagcatttgaagtctggtcttgtgaaaccccaccctcctctggctgtgtgattgaatgggatgccctcgaggttcacctcacctgagagggttttgggcagatcagcagtaaggtgttaaattttagaagcctgaaaactccagaagagaaaggtaggtacctgcatcgttttgatttgccatgttaaatgtgaatccggctgctctggaatagatgtgcatttccacgtggcttttctagctggcttcacgctctcaacctgtgtgtcttgtggagatttactgatttacaagactgtgaggggcaaatagtgagatgggatatgacatatggatttttcaaatctgtacatctttggataaagaatgccagccagtatatagatcatggtgtcgattcttattttctttggagtgcaaatctcattagaagtagtttttttttttttttggcttctgcataaggggtaatttttactaactgccttttctttttaatagtatagacctctaccatgatttctttattactcctttctgaggttttcagttaaatagtagatttgacagagaatttgctaacagaaataggaacgggtgttcctaatttagagtgcctatgtgctataagaaaaaaaaaagagtactttgttcagggatctggtggacttccacattattttctagaatttgtggttaaacagttgttattcccgaggtttcctgaaattcaataccagtagtgacaacgaatatccagggatgtctcggaggcttgtggtggtggttgtctgcagggatggtgctcactccttagctgggtgctcttgttggtcaccattgaggctcaagatgataggtcactgagactcagagaggagccaggtcttatttaagtaccactataaatttctctggatttttttgtcatcttatgtttttattgtttcattttgtcttcacaaccagcctttactctaagagaaataatttatacagacttcatggaatatcaaacaattcatacctatttattgaacatttactattcttttctagcttatttagttccgatgctcataatttctt

SEQ ID NO: 10892 - DNA, 6000 bp, Homo sapiens
gcaagtagttatgcagacttggaaccaagcactttgttaaacactttacagccattatgtcatatagttctttttcagccctgtaaggcagcttctctgtcatttactccacagataacaaagctcaggctggattcatgcagcttgttgatggtggggctcaggatgtgagttcaggtctctctggcaccaatgtcataactgcaaactacaatgacttcagatactccaggctttccaagcccatatcttggcagaagttctttgaccttgctctctgcctagaagtctcttccgcctttatcttttctcaggaattctgatttttccttcaagattcagttcagggtcacttcaagagggctatacccccatcctttccctgttttggttgtttgctgagacctctgtgaaccagtgtttgtctctaatggagcacttattgcacatttttgtgttgattcccctacatgtctgtctccccagtaaactttgatctctttgaaggcaggaagtgtatcttaccagtctttgtatccctagtacctagtacctagcacagagcccagctcatagcaataaaaatgacagcaatatttcacatttactacgcacttaccttgggctgggcagagtgctaagcacttcattttttagaccctctcatttaactatcacacaacccatataatatatagaattatgaagaaactgaggctgagagaattctataacttgcccaaggtcaccccagtaagtggcaaaactggagcttgactccaggtctccctgaacttctttacattttattaattttcatgccctacacttttttacctgattaggtattttttctcttccaatattgattgagacgtatgagtaggaattacattttctttgctaaaattagtaagcaccttgaacagtacttgctgtatgtgctccagtacttgctgtatgtgcttgctgtatgtgctccatttagataaatcagatattaaatttttctgaagaaaaaagcttgggaaacataattacataaggtaactagaaatgatcaaaatctatttctttacctagcaacttcagatgaaattttgcagcagtttcatgaaatattttatgaaataattgctgtattcgtctgtcactgagaaatacaagtgtaagttaagcatttctgaagcctgaaattcaccgagtgcagttttaattacccaagagaagcaaatctaaaactacttgcttttcagagcataatttaaaaaatgaacaacagtctttgcaatgagattttatgttaaatttaggtcacatgttaattttaactgttaggatatcctagaatgtgcattgttctttaccaacctaactgacgagtcaatttgcctgtcttaaatatgaggcttagtcagttgctcacctcatattttcaaagtaccagtgaaattagtggatagtttaagattaggtaggtgctaaagaaatacagtctatcattagctatatcaatatttgtaattcttatacttcaatatgatatttcatgctattaaagcctgtttattacattttaatatcgagaaaagcccatatcctttaaaggttaccttacttataattaaatcttgataatcattaagtcattggtatcactaaattatgttagggtagctaacatttccattttacaagatgtaactttgcctcacactgagtgtagtaaacatagaatattgggacaggccaggcatggtggcttaacgcctgtaattccagcacttttggaggatgaggtgggaagatcatttgaggttagaagttcgagaccagcctggccaacatggtgaaaccccatctctactaaaaatataaaaattagctgggtgtggtggtgcatgcctgtaataccagctacttgggaggctgaggcaggagaattgcttgaacccgggagacggaagttgcagtgaaccaagattgcgccactgcatcccagctgggcgacagagcaagaccctgtttcaaaaaaaatcttcgggaggctgaggtgggcggatcacctgaggtcgggcgttccagaccagcctgaccaacatggagaaaccccatctctactgaaaatacaaaattagccaggcgtggtggcacatgcctgtaatcccagctacttgggaggctgaggcaggagaattgcttgaacccgggaggcggaggttgtggtgagccgagatggtaccattgcattccagcctgggcaacaagagtgaaactctgtctcaaaaaaaaaaaaaaaaaagaaagaaagaaaaaaaagaatattgggacagtaagggatcttggtccaactccattattctacagatgaattaaaggaggctcaaagaagctgtctgcagctccttgcttcctctactgtaccagaaagccacgttgcattaaaataaccacggatcctagccggcctggtggctcacgcctgtaatctcaacacttggggaggctgaggagggaggagtgcttgagcccaggagtttgggcccagcctgctgtacatagcgacacccctgtctctacaacaacagcagcaacaaaaaattatccgggcgtgttggcgtgcatctatggtcctagctactctggaggatcacctgagcccaggaattagaggttgcaatgagctgtgatcgtgccactgcactctagcctgggcgacagagtgataccccgtctcaaaagaaaagaaaatagccatagttccttgtccgtcttagctgcattcgtgtctcactgcggctttgccaattttcctttcttttctgcaggttgcataccctgtcctgagggcgcggcacggagtgcatgcgggccgctgccatgacgaccgccatcttggagcgcctgagcaccctgtcggtcagcgggcagcagctgcgccgcctgcccaagatcctggaggatgggcttcccaagatgccttgcactgtcccagaaacggatgtgccccagctcttccgggagccttacatccgcaccggctaccgccccacggggcacgagtggcgctactacttcttcagcctctttcagaaacacaacgaggtggtcaacgtctggacccatttactggcagccctggccgtcctcttgcgattctgggcctttgccgaggctgaggccttgccatgggcgtctacccactccctgcctctgctcctcttcatcctgtcgtcaatcacttacctcacctgcagccttctggcccacctgctgcagtccaagtcagagctctcccactacaccttctactttgtggactatgttggcgtgagcgtttaccaatatggcagtgctttggctcatttcttctacagctctgaccaggcctggtatgaccggttctggcttttcttcttgccagcagctgccttctgtggctggttatcttgtgctggctgttgctatgccaaatatcgttaccggaggccttatccagtcatgaggaagatctgtcaagtggtgccagcaggtctggcttttatcctagacatcagccctgtggcacaccgtgtggcgctctgtcacctggctggctgccaggagcaagcagcctggtaccacaccctccagatcctcttcttcctggttagcgcttatttcttctcctgccccgtgcctgagaagtacttcccgggttcctgtgacatcgtgggccatgggcatcagatcttccatgcatttctgtccatctgtacgctctcccagctggaggccatcctcctggactaccaggggcggcaggagatcttcctgcagcgccatggacccctatctgtccacatggcctgcctctccttcttcttcctggctgcctgcagtgctgccaccgcagcccttctgaggcacaaagtcaaggccagactgaccaagaaagattcctgaggctggcaagtggggcaacgtgtggaggaagcccctcataatttggagaaaacttgatacaatagaagctgacttttaaggcattggcttttaaattaatacatatatccaaggatatgttatagctgcagtgtttgaaagccaaaggatttaagagttttgttgttgttaataaaaggaatactccttttccttttggatcatagcttaacaaggcacaggaagggaagggatcttgactaagattcatgagacattgaattaaggagaatcatcttcatgcctgaaaatttagcaaaattccgactatggcctccaggggcaattcctaaaagctgaatggataataaaattggactggaaagtaagtaggtggctggtcctcaccctgttggaatggctatcctactatgctgttctttggtaatggaataaattgacccaaggaccgaatttcatttggatttcaaattgtccagagtggaaaagccttcaagatgacatgatgaattactcagttcatctgatttctggtccctcctttctcgacaactataatactaacccttttctcaggataactgtctacacctggcagttttctctgacgtgctgttcactcacatccctaccttgcatggtaatataaaggactaggaagcagtcatacttccaggaaatgcttggattcatgtggacattcaggaagcttattctcatataatactaatctaaacagtactagaaattacagtgccaagagccaccaggaggcccagccaataagcatagatactatatggtatcatgggacccatctattttttaccagtggactacaggattacttgagagttatcagggctgcctaacagaccaggagatctgggggttgcaccagggaatcgccatatttgaccagcatgttttaaaagctcttggtaggattagttggttctaaggatccctctagggacctcattatttcaagaggaacccaaagtccagcctcctacatagatgctgccccacgaaggacccacaaaactaacctagttcagggttctcaggcaggcagttctgcttcagcttagagcagaacccataaaatactcaagtactgggataggcaagcatgtgtgtttactgtggattggtccctgaaggctcctttgggtgagaacatgtgaaccaggcaccctggtttgtttggagcattgctgcccagaagcttctatgggataggtggtgcttgggattgatgtgttgtggccatgcagccctccctgaggattgacttctgcactaatccagtgaaggaggctgtgtcaaaagaagggctcagaagccctcttttcagaggcaatgattcctgtcagtatgaggtcccttagttactaaaaagggacatgatttaactccagtttgatgaacctcctccgagtttactttattgtcttcaaatcttttgttttcttcctttttgtgagatttgtgggttttgtgccttataaatggaaatgtatgaacacaatatatgctcatgtagaattttctgttctgggttattgggataagaaaaaatatatattgctcttcaactagtgaatgaaagaaacttcagaaagctagaattgcttatcaatcaaaagactttctcaatctattttggccacaaacaaacatattcaactgaagctttccaataatctttatatcaagaaagcatgcgtcttgtcagctacattgttttcttagatggatttctcctgttaatcctcaaatatctgaacttctgtgttacccaagtgtcttatacaagcttctggtgtctaggacaaatttatggcaaataaaattagcaaaactgaactgggttgaactgaacaagaggatgggggaattgtgcaaatacgttgttagtagaaggtcaatttaaaatagggactagaaattatttgaagttttctttattacggattcaaagacttattttgaaagttggaaggagaagggagggaagagagcagaagggaagaaggtgtaagtcaagct

SEQ ID NO: 10893 - DNA, 6000 bp, Homo sapiens
gccggtgatttgttactgggaaaatagttaaagcctgctggggaattattaactgtttccccttacagtgtttatcccaggcattcgtttaagacgggaaagccttgaagagggtcactctattaatatgcattaagaagtaaaggaccaattttaatatttcaaacaactccagtggataacagaccataaacttcctgttttcactatcaatctcttttaaaatggtgttcttggctatccataatcgccccaggggagagaaacaagcggaggaaaaaaatgcaagagtgaggggaacaaatgatggaaaattgctttattcaacttcacctgccgctcgagaaactcacccttacgaagattccagcactttatatgaattacccattatggtttcctcccaccacatcactgcactattttagcacttgttttgcaaaccaccaactgcgtttacaagtagaaacataatcaggaggcgaatgaccttttgtagcatgtatctgaagctggtttatcagacacttcgtcagccaactgtccaggaggcaaaatgactatctatgatgatagatagacagacagatagatagttagattaaaaggtggggaaacatcccttttccctttttcctttctatataatctggttttttctcttcaccccttttctcgcttcttcccaccccgtccccaaacctgttactagggaaacttgaaaaagaatcagatacattaagactacaaaacgaaacaaaagtttagaccccgaaaccatgattccattgccaagcacaaagcaatgcaagagcccaacgtcggtcgccgcaccgcgatcctgacaaagcctgtatggagccagaacaaataagatgttaattgcagcctcgcagagaaaaaaatactattgttccagccagagacactcagcagctcggtagctgggatgtgccccctccgctgcggactggatcaattctgaatcccggtactgaaatgacagctctctggctgcgacaggtctgcgctgaaagaaagagaaagacgatcaagtccagcattcacttcccacccttcagagtcgccttcccatcctccgcacccccctgcctcgcctcccagtgagtttctcttacagttggtcgccgccagccccagcggtgggaactgaggatgcaaaaacctcccagacgcagaaaataccgctttcgggacgtgcttgggtttgagtagccgtgacgtgcaggcgaaccgcggccctggctggagctccgtggagcccccctcccgccagcctctcccccgccctcccgccgggactccctcctctcccaccccgcggctcccttcgccttctctctcacacacccgcccgcgcccccggcaggcagaactccaggaagtcgcagcggccgcgccgcgcgagccgagcctctggcgggcggcggggcgcaccgcagctgtgcataagaagggcgcgcggcacccgggacgcgcgcgcacacgagcacgcgggaggccgccgcgcggacgcgctcccgggacacgcgcaccccccgcgcgcgcgcccaagggagagcgagcactgcgcgccggcgcgcacacccgagacagagctttactatctcgctccctctcgcgcctccctcctcgctgggcattcaaacagctttccgacatcaccagccaaggatttttttccccgctctccttagtcgccgtccgtccatcagtacctgcaggggggaggaggaggagggaggaaagcggaaagaggaaaaagcataagcttgagccttccgatccgaccacgaatactcctgtaataaacccaccgccccaacaaatctgccatagcagccgccgccgccgccggtcacttctcgtctcagcgctttctttgcttcttggtttgttgggggtagcttttatgaaacaaatctttgctattaagccacttacattttggggggttccttagagtctcccttgggggggcttctccctccctttagcccccctcggtttggaggttggattcagttggatacggcgcaaggttctgggctcctgctggcttttttttcctctctctcatcgacccccctttggttcccaccccccaccttttgcttttcgtatgtatgcatttttaaaaataaatcctgattttggaagctgagccggggaaaatgggcaacggtgattgggaccgaaggggagtctctccgtcactgttgctgggacgcgtgcctgtgctggtgtcttagagcaagagcctccctgagctttcggagtggaaggtaaggaagggggtccaggggtcaccttttctctgccgggggtcgccaccgtggagctttgggcttaatgtttgagaagggaggaaaatgaaaggaaaggctgttgctggcggatggggaggctgtgagcagatccgactgtctgcatttacttaaacgccgcagttgaaaagttagagaagtctggttttcaagagatgtgctgggtcagaaggaataagcggagagacctagaaaatctggcagttttgtgtgattggggtaattttatgaggggaaaattttaggttaaaaggaagttaagagaaggcagtgggtcttctattggggggaaaaatctgtggagtgatggcgccgtctatgttcgactaaactaaagtgtcacccagaaaatcagttttgagaatagctaaactcaatgctggtttgcttctcagcaagagataaataaataaataaataaataaataaataaataaaacatccttgacacctccgtggccagcctttgcccccgcccccaccccttctttaagagggaaacacggctttttgaacgggccctgcagtccaaaggggggtgagggtaatgatttattttttattatttagaacaaaataagactgtgtactccagactgattaaaaataaagagcattatattgagtgcgctctcttgagcaggcattaaagtgaattcagagctatttcctcactctctgatcattgatgagcacggcattgcagacatgcactgtcaaataaatgaaagcaaaagtaccaatttcattaggaaaagacatacgacctctttttgagttcctgattataaaatgaagtcccctttcatggatggaattcctaatttagacacttattgtcacattggctctcaacgcctacactctatcctgaagaacactgcgcagacctgcattgcctgcaaagtgcaacaccaaaaaaaaaaaaaaaaaaaggaaattatttccagaatttcttacaactttctctgtttttttttaacctttaaatgctcattggctttattttctcatgaagaaaatgcattattcattgagctatttgcttgaaacagagaacactgttttgatggtcccagcagttctgatgttattttaaactgctgctatatagagatttagagttggggctgtgtttgcctatatcaagacatagaatttgaattataatctggaaaatgcagatctatcttcagggacttcggtcactggatttggtgtgcatgcgttggtgtgtgttatgcaatgggaaggaagagggttttatcctttgattcagagaagacccaggcaaaggcatgaaaactcttaactatctatatgtctgtatgtctgtctctgtttacagaacagtggaagagactgcagcctaaagacttttaaaattaacttggcatcacttttatcagctcaaaggctaaacaaacaaacaaaagcagtgtcatttattctaagaaataacttcttaaaggttaaagctgaaaaatattcaagttatttttggataacaacttacagaggtaaatataaccaaggactactttattatccaaagccagggttaaaattaaaaaagaaaagaaaagaaaagaggagctttggagttgttgttggaaagggagcaatttaataattgaaatctgctaggaacaaaaatgttaatgtattttattaccatgtgtaagccttaaattacagttgataagataatttttcaaaaattaaaagactgaaaccagctcaattactatggttctggattttttttttttttaactgatatcacctttggatacagatactaatacagtgatccactttatgtatcccaaaagggcatgtcacattgaaatgactgccctaaatcctggttctcaatggtgatgttgaacaacaagtcttccctatgtatttatccatctatgccctttctcaaatgatggttttaaaattaactaatccacatgaatgcccatgtttttgcaaaggaatttctgagcagttcacatggtggcccctgcaaaggcaagtggggcatttgggagatgatgttccatctgtaataaattattatttgtgcttttaaaattgtggccataatttatcatcattacttttcacgtttaagaggagagaaataatgtgatgacagctgttcccagattatcagattagattttgtatgatagtgtttaccgcagaggacagagagagaaaaggttgtatagactatagactgattaatactatttcgacaattaacatttacattatgacgttttaaaactccatgttttcccttttcattcgatagaatgataatggacgtggaggatatcctagtagataagttagggcattcctattaataatctattaaatgttatttttaaattgaatgttgcgaatttgaccattgtgaatggccacatgagggcgctgttcacacagcaacagataattttcctgtgttataaaataaaaattacctgcccttcttttaaaaagggctttttactgaaatcttgaaaacagctggctgtaatattgaaaggagtttattttctcaatgcacgtagactcctacttgcattttactttcattgccatttttacaggccaaatgacataggatgaaggctgttcgtaacctgctgatttatatattttccacctatctcctggttatgtttggatttaatgctgcccaagacttctggtgttcaactttggtgaagggagtcatttatggatcgtattctgtaagtgaaatgtttcctaaaaactttacaaactgcacttggacgctggaaaatccagatccaaccaaatatagcatttacctgaaattttccaaaaaggaccttagctgctctaacttttcactcctggcttatcagtttgatcatttttcccatgaaaaaataaaggatcttttaagaaagaatcattctataatgcaactctgcaattccaagaatgctttcgtttttctacagtatgataaaaattttattcaaatacgtcgagtatttccaactaatttcccaggattacagaaaaaaggggaagaagatcagaaatctttttttgagtttttggtattgaacaaggtcagcccaagccagtttggttgccatgtattatgtacttggttggagagctgcttaaaatcagaaaatgggagaacagaatcatgtgggatcatgtatacaaaatgcacctgccctcagcatttgggagagtgggggatcgacgaccagtcgctgattttgttaaataacgtggtgttacccctgaatgagcagacagagggctgcctgacccaggagctgcaaaccacccaagtctgcaatcttaccagggaggccaagcgaccacccaaagaaggtaagtgccaaagagaggggaaggtgagcgggggagcacttttgggggatggagttaaaacgtgctgtttcaacacacaggcctaattatttatcctttattgtcactttttgattcatttgatttgtgctattcactgataaaggtctcttgagctagttttaggtttcaaggttttagagagggcggtgaggactggatagctcagcagcatgcgctggaagtgagggtggaattttcaggagaaagatgcagaaaccta

SEQ ID NO: 10894 - DNA, 6000 bp, Homo sapiens
tgttattgatattttacatttcaatgatgttacatctgacagcaatttacttagatctggagaaatggtatgtggctatcctggctctttactgacttaggtattagaactgattctagaattcatagttgctggcccttaggtttaatttttagaagccaccaagactactaaatattttaaatgtttttaagcaacaaatgagcttttcatgtgttagaacttaatatatcctcatggataattcaaataatgactgaataaatgcagaccaagcaggcaacttaagctaaattttctggagataattttcactgaccaggtttttctacaagctcattagctgcaattttatatatgttcaaatagagatcaagatttacttaaatgaattcattttgttcaccatttaacacagtctagaagaagcaattattcaatatcatccacaaatctgtgttgaaagaagctaaaattgatctccattttgatttatctcttgggatctaaaattcttgttttaaagagattttaaagaataggcatttggattttataaagaagtacttgtggcaaaggtagagtaagaatccaaatctgagattaaaaaaaaaacctcacaagttaatgattattaaatctatatcaaaatgttatttatcaattgaattaggctttggcgtgactggaagacttttcattatagattagagtttcattgaaaaataaacttgtaaaaatacgcacaagtaaattactgctaaatatttgtaagcataggcaagaactgagggtggaatttggtttgttgtttgtttggattacttgaaaaccttgcttttataattatatgtaagaatatgttaccatatctgtctttgagaacatattgagccagatgctttgagttgagtagcttttagaatatgtgttaatcctgattttaccaatacctcattcagtggctacttcagtaaccatctaattaggtagccctgactcttaagagagatcaaagtaattacttactaggctagctcatagtataggaatcaattagcagtgatatttgactactccaaattggaaaattcaaagcactatatttcatacttcctaatactctttattaaaatgtttccaaatgagtttcttaaaataggtttattttagggctatgaaactctttttaagaaattgtccgtttaaaaaacgtctcttaaagaagcacttgagctcaccgttttgttctgtattttttgtttaattgtggcaacttttttttttttttccttagaaggatactaggcttacattcagaagggctggtttgaattttggtgctactatcaattagatgtgtgactttgtgtgagttatccaatctatattagcctcatttgtttcctctaaagatagaggtggtaataattctcagggttattataatgttaaatgagatatatgtgaaagcttgttattgtgaattgctctataagtataatgaagaggatgatactgtgtctagcttaactgacatttcatctatttaagataattattatttagtagcactatctctaaatgctgtctagccactgaaggtaagaataatatggaagaatgtatcaaatgttcttctgaattcatgttatgagtgtcatctttatcttttttctatccctctgagtgcctaaggaaaaaagaaattctactaaagtggtgtgctattttacctctcttaaaattttaaggcactaattttgtgttatagtaattattaataatagccaacacttaactagtgctaactatgtcccaggtacaacttccaggactttccaatattaatccatgttatcctcccaataactctgggaagtggttgctgttattatcaccagtgtaaaggtggagaaactgaggcacagataaattaacttgttaaagattacacagtcagtgttatcagtcaaatttaactttcttatacccgtgggtaggcgtggtggctcaggccagtaatttcagtacttctggagccaaggtgggaggattgcttgagcccagtagtttgaggctgcagcgagggccactacactccagcctgggtgacagagagataccctgtctctaaaaaataataatgataataaattttcttaaaccctttcttcaggtcttagggaagaatttggcaaagataatatataggataaaggaagtcatgcacataacttgggtcttggatataaaggatggcatctcttcttggaaaaatgatgctgcctgtctgcatgttgcgatgacagaggttgttgcttactttcctttatatttttatttttaatctccagtgcctataactggataaattattgttaatttcctaggattacttctgtctcctgagcccaaggcaaagtaacacaaagctgaacttgtcagaaagtcctaatcatttcagtcctgtgctgtgagtgatataattggaagaaacagcccaacaccccacccaaagagatgttccagagcacatgtactctatcttcttttcagaattagaatttgtttgacttggttatactgcatggagtctttctttaatttaggcatggttcccttcatttaagctactcatttgttcataaatttagcaaattttattgaagatctcctatgtgccagaggtactgtgcagtgctggagagtagaatggcaaatatgacagtcacacaccctctgcttgttgagttcacaaagtagtggaagaagatttacaataagaaaatcatctcacaaatggaagtaacacaagtcctctgaatagtgctacaaagcagaggaacatggtgctccagggatggataagagaaagcatttggcagacacttgatgatcatcatttattttccattgtctgtcttcggtcttgtacaagatgtcagagacttagggaggaagagcaggaggagggcaagttaaaaagaatggatggagacagagttggcaaagtgaaacattgagtaatacaaggtggccaaagagaagagaaaaacctcacttgagctgtataaaacatcgaattagtccttgaataaatcaccatatcatagaagaatagtagtatttgtagtaactaccatttttcaagaaatgttattgtatatgcattctagtcaactcagtaaaagagggagggatataataaatttagttattttcattaatattttttaagtattttattgtttgaaagtttatgtgtccatttaatggcaatttatccagtattttgaataaatgagattactgccttcatttatataaatatgtaaaagcaatgtgaatattagttgcaaaagcatctctggacaggaagatagtagaccttggtttctgattccaactggtggataaataataattgagaagaacctaactgttctcattagtgaaaatgggataatagcatttcccctgtctacctcagaagggtttttctttacataattcattcaattaacatttattgtgaaccttatactgagaacaaatagtgatgagcaaaggagacatgatcttagatctcataggacttacattccatgggaaaaaccaatgttcatttacaatgggtcttaatttttccattcctgtgatctgcggtgctatactctagcatgctcatggcatgctccttcacatcattcagttggatctctcctcaaatgtcacctctttggagaaccagcatcgctaacattgatttcagtctctctttatcctttgctttacttttcttccccacctttatctgtcattatacttgtggttacctttaggtccaacactgaagtataagaattctttatccagccaggcgtggtggtgcacacctgtaatcctagctactcgggaggctgaggcactagaattgcttgaacctgggaggcagaggttgcagtgagccagaattatgccacttccctccagcctgggcaacagagcgagactgtctcaaaaaaaaaaaaaaaagattcctttatagagagattttgtctttgctgctcattgatattgatatatattatttagaatagtgcttggcacataatagactcacaataaatatttactaaatgaatgagtaaatgagatgagcccacaagcatataattaccaactgtgacaaacaaatgggataagtgaatgtattttcgaaactataaataatccatgtttgcaaggtgatgctatttatttgaatttcagaaaaaaaatacagtctgccagaagatagctcattatttttttgtattgatagctttctattaaattatttattttctaagagtttctcttcctttatatctatgatttgtaacattgagcactatctttatggttctataacccccgccaccccagttcagttaccctctagagtagagattcttaacctgggtcagtgaacctttgtgaaattcgctgttgcctcctgaggcctcattgtactccttgaaattgtgtgtaacgtgtgtggcccctgctcattttactggagagagtttgtataacagattctcagactgtataacctcccaaatttaagaatcattgcattaaaattttttgtttctcttttactttttgttgctctattgataattctttttctcctcaagagggtttcattttccatttattttttatgattgtatgttggtatttttaaatatttactgcttgattgtcgccagtgtgtggtattctcggtttattgcatgcatctgaacccagcccttctctctgtctctcttttgtctggccagcagtgtggggatgtgccaactgccgagtggttttgtccaacccttctgggacctttacttctccatgctaccctaacgactacccaaacagccaggcttgcatgtggacgctccgagcccccaccggttatatcattcagataacatttaacgactttgacattgaagaagctcccaattgcatttatgactcattatcccttgataatggagagagccagactaaattttgtggagcaactgccaaaggcctatcatttaactcaagtgcgaatgagatgcatgtgtccttttcaagtgactttagcatccagaagaaaggtttcaatgccagctacatcagaggtatgtaaaccaaaggcaacgccaaccttctgcttttatttaacatgttctgcagtaaacacaaggaccagaagacagagttatgctcttttatgtgaatgtgaatgattaggattgggatataagggcaagaatctgttaatattctctgagcattcttgttagcaaaatataattaccagatccaaaatgtggttacagtagagttgaattcttttatattgtttatatgtggaacatttaaaggctgcttggaagacactgtagatattccacggctaataattaaaatctataattctaacatctctccactgaaaatttaaaacatccctatttagacatcattttattttgggttttatgatgttgtccttttaaggaactatggtagggaacaaatacagaaaatgaacagtaaatttttaacaagctattaacagtttaagctaataaataacacagcttgaggaaagccctctgaaaatggctaactgaatgaaataaggcatatttttattaaatatgttttctatattctggcacaacataacatttaaataatctttctctctaaaacctgtgtttccctaaagaaactcaagcttcaacatggtgagacttagttatactgttttttttttcttctgtgccttctaagtaaaaacaaacagaaaggtacaactataaaaatgactattatgatttagttatacttttttttcttctgaactttctaagtaaaaacagaaagacacgactatgaaaatgactgaccctcactattataaattgtgttttttgattgtggagttattga

SEQ ID NO: 10895 - DNA, 6000 bp, Homo sapiens
ccatgcaagaccgttcctgcatctcttgctaagccccctctttatgactcaatagtggtaacttccacccccatctctaccaccacgacaacaatcataattacaaagctgccactgtgcacctaatgctgtgtgaggcatgaactttgtcttcgatcttcacatgaatcatttacaaatctaaaatcctcgtgtattgattaggagacagacatctagaggttaacttgaaaagtgactttcgattcttgacatgagtctaaagtcatgtcaagaatctccaagaattttcagttacacgagacatcaatctcttcacattccaggtacttcaatgacatccattttcttccctcttagaccggtttctataactgttcttctacgtagaaataaattagtaaataaaaagtaagctttcagtttgatttccctatttctgtcccgatgtaaaatttggcatcatcttgattccccttttgcttgttccttactgatattttccaaaacatctccccacatcattttctcttcacatgtatcccagaaaggtatgaacttttggatcagatgacatggttttgagattggctcttcaacttattggtgtatgaacttgaggaagttgcgtttttcctctgagtttcagttttctcatctgtcacttgaggaggactatgacaaccccagggcccctgggcctttagtgaggattaatgaaaatgaatgggtgaaatggcgagggtcagccccacatgctggacgcccttggtcccggctcccttctctactctgtgatgtcaggcagggctgccgccaggaggagggtgcacctgccctgtgacctgctcttctccctaccgtaaactcgctccctgtccctccacggcccacagacgtctgtgtctttgtattgctgccagccttccggtcctgcagccaccctccccagctccccactgagggctggtgcccccacctgtccttactgctctccacctcggtgcctttctgcctccccacccaggctcatgctgtttgtccccaaattgccttcctccccctgcctacctggtcagatctgagtcgccttcctggctgagtcccagcctttcacgaagagcctgaagtccaggatgctggaggtggaggagctcctctgtgctccctcctgtgaactggacgctcgcagtggcatttcttcactgatccgtcacacgtaggctctctgcatatcacatgtggcttgtattgtcatgtatttaggcctcaactttccaactatatgagttcccaaaaggtgggaagtaaatggcatacttttaactatttctgtagcttgtgtgctgtacatagtaactatctgaaaaaatgattcgtatctgaaaaataatttataacaggtgttctcctggctatttgggagagtaattttcaggccagctactttatggggtagaataacacagagtgactccccatgcccaaatgtattagcatatacagtgagcattgaaggatacaccatttgacatcttcgtaaactccaaaattcaaggtgtcagcacagcttgtacttcctcctataaaatgtgtttttgtccctactagagaatttgctgatgtaatttgttaagtagccttttttaacttttttatgaagaaaaagatatagatccaaaccacataacacagatccaagcactgctgggctcggtagtctatgtttttgcaatgggtgtgagcctgtggctgcctgccagctgtcattgttgtaggtttcttcttcctgtccctccactctcagcacctgtgctaactctaggctttcctggggagggttttgtaaaaaccaacaaatgacgcttttattttaatttgttttgttttttaaaaacatgttcattacttcagaagttttgtgcgcacaatgagagtagaaaactgccccagttatctaccaccttgagtcatggtggctttaacagtgatttatttacaatctcttgtggctctgggggtcaactgggctcggctgagtgcttctcagttggggcctccactgcaggtaccatcagagagtgggtgggagccatgtcatccgaaggctcgattgggctgggggactcccacatgtggccggcaggtggtgcactgctgctgcctggtatctcagcaagaattcccaaccagctcaccatattgacttcctcaaagtttatacagagtgttactttaggggttaacaaagcatttactatcttttcaactttgctgataatttcaaaagatgactgacacccagatgaccaatgtccacaaagtggtgtgccatggcctccagtgtgtgtgctatggcctccagtgtgtgcagagcctgtttgtgaattaaaggcaatcacaaggagaaacggtcatggtgacccattctgagctgtacacagtgtcctctgtaggattgtagccagaggcagatggctttcctagaaatgcctcaatgttgagttttaaagcaactccttatgactgttatctgaatttaccaaactgtccctggcttttcttaggaatgaacttctgatgttgctgtggaattttctgcctggaaacttattgttatgaaacatgtgactgtaagccacattcctcgccttttatgcacctcacagtgtctatgcaaatgaacagtgtgattttaaatttgaggaagtttcaataagagtgagatctaagaggatctttaatataggggcatttttagagagctaaaaaccaaataggtctcagctttctcagggtgacatataatttagatttgacttggaactacagaaggaatatggggcaaaggacatgagaaacattgcagaggtcagtgccatatggagcttccacctcagctctcgaagtaaaggcaaccagcccaggctgggagccagtcagcagcagggtctcaatctccatccactaccttcccctctggggcagggagggtgttgcagggaggaggccactcttggagacctccagatccctgcctctgtgcagtctaacagaaggggcccccacagtggccatgaatctctttgttctgcaaggaagggggtgtcattgggcctcctgggtccctcagcatctgcgtggccacacaacgcggttttgttcaacacgttacatttctgcttaattaatgttcatttttggtccccagcaaagtccaatctgtttttcgttttctttcttttctttccaggcaggcattgccagggctaatcatctataaaagggcttactttcttaccttcacgctaagcaagaccatccaagggcagtgttagagggcacctgagaacgcaggaggggtgtgttacctggtggcctgtttcttcctcctatgggcagcccttctacaggaagcagaagcctcaggggcgatggtagaaatgaggaggaggggatggagctgaggtagcaggggaggggtcgtaagagcagaggggagggtcttgctttgttcgccatccaataatcagcaggtttcgggttggggtgaactactggggaggagcgccccagggcttctctcagatggaggagggacaggtcacccagagtgaaggaagttgtgagctctgttagaggaaaacagccaggacttagtcaggagaggctttgtttggaaggattgttgtaaggcagggagaggaatgatggcagcaagaggaccccgtgaccataggtctgcaagcacttcaaacagaaaaggcccttcttttatccagtaagggggagccactggggccagcagagtctttggaggggaccctggacaaacccgggaaaatggccagtggggttgagcaggacacaggtcctgctgtgtctagctggttccccagagagatgataaggggtgcgctccagcttctcaggctcactcaggcgtgaggacgtggagctcagggctctgcaggaaggagcgacccaggtgaggtgtggtcaagatagagcagagctgggcagcgggcagtggagcctcgtgggcagcctgggggtggggaggcacagtgcactgggaagtggagaaagtgtgagtccatcaggctggctgagaattgatcacgaacctattgtctgtaaaacttttgttatttcctgagacgtggttcacagcaacccaggtgcgaacagccttgtgattctagggttcttttctattttttaagcacttgcatctacaaataaatttctgagtgacttgtcgtcagctgctttccttgatatgtctaaagacagggcagtgacccgcatcgtcacccagagattctgtctctgtgccacatgaagattaggtgcccgcttttgattgaggagctcctctgttgctctcaaagtatcttgtaataatagctgagatgcatggagaaccacctctccttcaggcgctgctcctcggcttccgtggacgggcatggctatttctcggaaccctctgaggttagagctgtcatggtctttcttctgaaagaggaaaccgaggcttgctggggctcagtggcccttctgtggctgcacagctttcggggtggggccaggactgactgactccacacaaaagtgctcccggcccatgtctttaactcacacggcctcttgcaaacgttcccaaatcttcccagtcggcttgcagagactccttgctcccaggagataaccaggtaaaggagtatgaaagtttgggtacaaactcattgctgcaaattgaaaaccatgcaaaggctgtcttcctctggggagttcaatgcctctctttttcttatcactttaccattggttggactttgattccagggatcctacgattactcaataccctacaggatatacatggttaaccatttgcatttgggcaaataggcgttacttttcaataggaagtggcaatccagaacttgcttttgggcaattctagtagctcaccgcttttttcttaatgactgctagaagctgcatcttattgacagatggtcatcacattggtgagctggagtcatcagattgtggggcccggagtgaggctgaagggagtggatcagagcactgcctgaggtgagcatgccaaggcccctgagacttttctttcaaaaatgtaacttctttgatcccctagtctgacaggaatgggactgttttactcattaatcttccagaatgctggcatattgaccatgtttatgcttaacgacacagacttcctttcctgaaagcattgactttatggttttaggaagcccacttttcctctaagtgtatagtaagggatttcatactcgctccctgcactggagcttcggtgatggtctgggtacttgctcctcatacaggagatatcctcagggcatcagtctggagaggaatgtgattctttatttgatcaaatacactgaaagattttggaaaacaaaaaaattaagctaagaaatattttggaggcagtaagtcatttatgcaatgaaggctgatgagtgggcatcccggacagcctaagattgagcaggaaggagcttgtgagggggagttaagagaaattgacaaggtggaaatttcaacaagtctcagttgcaaagctctcatgagggctgccaatgccactgtgattatgaaggcagtatcttatgaccagaaaataatacacaatgatattaaagggagccaggctaggtgcagtggctcatacctgtaatctcagcactttgggagaccaagctgggtgtatcagctgaggtcaggagttcgagaccagcctggccaacatggtaaaatcccgtctctactaaaaatacaaaaattagccaggcattgtggcatgtgcctgtaatcccagctacttgggaggctgaggcaggagaatcactggaacttgggaggcggaggttgcagtgagccgagatcacgctactgcactccagccggagatcagctccaaagtccacttagcag

SEQ ID NO: 10896 - DNA, 6000 bp, Homo sapiens
ggtcacagagctgaggggaggggagaggcctccagttctccctcatttcccctttggggcagtggcgctgccatcccccttctgggagatgtgggatgtgggtgatgaggcatctaaacagctcaggaattgaaaccagactccacacagccattcacaattctagagcgctcctgagcacctgggctgggtgggccctgcagagacaaaggtgaatggagatgaaggaagtgctggtgggaacacagggaaggttgggagctgagaggaaggtgggagggagctcttggcctggctctttttgctgaaccccaaggggctcgggcctgagtccccaagcccttttcctatgggagctgaccctcagagggccaagagcaggaaccagggactctggcaatgaccctgaccctgggaaacaaaggacaaggttgttctctcgatttaccctttattctggtgtttgggttttgttctattttcttagttttggaagaataaaaagaaactcaatgaaaaataattgggggtttggtaaatcacagcagttctcttcggatccggttgttgttttgtggtttgtggttctttctggcttgggccctggatgcagagggaaggattgaagttggaaaagcacgaaggtcctgcttgttaatattatactaagaagagggccgggcaaagtggctgacacctgtattcccagtactttgggaggctgaggctggaggatcgcttgagctcaggagttcgagaccagcctgggcaagcgacatagtgagatgtcatctctgcaaaaaaaaaaaaaaaaaaaaaattatgtgggcatgatggcgcattcctgtagtcccagctgttcaggaggctgaggtaggaggatcgcttgagcctgagaggttgaggctgcagtgagtcgtgattgcaccactgcactccagcctaggcaacagaatgagaccctgtctcaaaaaaaaaagaaaaaaaagggacttagaagtggccacaaggcaggttcctggagttcctgcacaaaagccctagataacagagaggtcccagctgggatgtgtggggactcccccatcccccttaccctgactgttggttggggaaaggggtagtctgcagctgtcccccaccagctccccttacatccccattcactggaaagaatgttctggaaaacactgttggcctgagagctgttgctatgtggaggtgacccagtcgctctcatccctgcccctcagggctctcattcctccatgcctggctctgtcctcccctggaaccaaggaacctagtggagccagagaagaggagagagactgggagagggtggtggggaagggagaaggaaaggaaagggggaagaggcccgtctgggggtggggcccacactggcttggactcacagtcatcccgatgatttcacctggggaaggatgcccctaactgacccaggcttgagctctcctggctattttggaattggcgggggagtgtctgaaaactgggcaaggactttaaagaaggaccccttctatgtgcccccagctcttccctctgcagaaggaagcaggccctgcgggggaagggagcatccgcctggcccccaccccaacccaccccaccacaccctgcctctgctctcagtggctcctttcactcatggggtatttttacttttcccttgttcctgttacatgatcaaaggagggaggggaagctaaaagaggcagtggcttgcccagctctctggagaagctcagaaaaggcaggcctggtgggactgaggggtggatagggacctgtgggcaggggctgggacccagtcctgtgggagggaagtctcgcaggggatctgaccagcttgaggctccaggctcttgattctaatctgcgggtgtttgcctttctcctcttggaggcctccttcccccatggcatctgtccttccccgtgtgtgtgtgtgtgtgtgtgtgtgtgtgtgtgtgtgtgtgtccgcacgcgcgcatgcactgctcagcccagacgtgctccggcctcaaggagaagccagtgtgagccctcacgaaggatctggaagcctaagcagggcctgacttcaaaagctgctgtgcattggtctcccagcctgaatctgccctgctgtagccccagcacacagcctgtcatgatgccaaaaagccctctgtttgaaattcatggaaaccgatcataaactcacaggaccttagaactggcaaggcctgagagatcctctgggccagcacagaggagcagccaggggcacgggcagcctgcacaagctctgtgcccctggctagatgttgcttaagcacttggtgccttggcttcctcatctgtgagatagggataaaaataccatgaagctcatagggatgtggggattacatgagaaaatgtaggtaaagcacttagaacagtgcttggcacatggcagtggttgtcttttgctgtgatttctccacgaggcaccgtcggcatttggacaggatggtgtttaactgtgcaggctctcccacccacagctggccagttagcatctctgccccctgcctgcacacgggctagtagccgactctcctccatcattgcaacaactgaaaatttgtcagcaggggcagtatggcccccagattggatttcactccaactcacccattttacagattttcctgagaactagcagggatgtgccttatctctagctactgcagcaggaccatgagattcgtctatggctcttatggtttctctcttctgaattacctggtacttgcatcagcaactcataccccacctcctgtcactatgcatagccatctaggacagagatctgataaattcattcacaggaaggaatgagtgatgatgacagctccatacaggtgcagctccccgccttgtattttaatggctcttaagccttcctcaaagcactggccttggcccctagtcctaggtccctggctcctggctccaggggagagggtggtattatgaaactttctgtcagcttcgctggggcttcccagtgtggctgacatggcttctagtcctggatgcatcttgatttgctgtgtgactttgggagaattatgtgatacctctgggctaccggttcacctgcagcatggggccagggagaattagtagccatattcttggtttctgaggaggtaatatgaagggagcattttgaggaaggggtgaaatgtgaaatgagggtctagaaggctggagaagctcaggagctgaggctggactctggggcactgcagcttccttccctccccttggcccagaactggagcagtcagggattctgtagggggaatgacgggggagggatgaccctgagaccacggcttggtcttgatggagggaccacatctctggggaagcctcgcaatcccaacacaagctcctcttccaactgcttggggaaactgaggcacagaatggacaagtggcttgctggtcttcatttgacaaacccctggggaagggggccttgggtttggcccccagccaagccctgactcagcttccatcccttctccctgtggcctcctaagtggtggggagggaggttgctggctttgagtggggaggctggggtgagggaagtaaccccggggggaaattagcccaaattagcagtgagaatgaggaagggctggtgttctcttctctactcttgcagataaatatttaatcacaacaacaataatgatgatgatgatcttaataatgtgccagtagctcaggccataacccgagccccgctctcagagggaggaagtgggggtggggagaaagagcagtggagagatggagagatgaagaaagtcagggagggagggagggagggaggatgtgcaagctgaatggaggcctgctcctcatgcaggggctgctgggtttcccctgctctgcctggggtagctgtgtagctggggtggaagcaggagagtacagggtccaccttgcgctccctgattcaggatgaaaatccagaacccccacagcctcagctcctccctggccttcccttggccttcagagtgagcagctcccagcctacaccactgcgttccaggatgatttcttgagggggccttatttgtgttcctgggtctctgagtcccggaagagccaaagtgtctcgggttccagagctgacagcaggaaagctgggctgcagtaggcattgtccaagctttatctgagcttgtaattaaactgcacactccctgcgtgactcaggcaaaatgctctcctgctctgggcctcagtttcctcatctctgtaatgggattgggcccataggacctgtttcttgctctccttcatgtggatgtgttgaggaaggcccctcttccttccaagccagttcgaggctgttcctggggattgtgctctctgatgcccgggctactgatagcagtgggtacaggccttaggaagcttcaaacatgacctaatttctgccatacactctcccatttaagccagatttgagcaatggcggagaggaaaccaagttcaggagatttatggaatcttcggcgataacctctagcatctccttctctcaggctcctgatgagagatgagactagctaatgtcttctttgggcttctgtttgatattctctctctctcttccccttctaaggttggtaggaggagaggattggagctgttttctccttgatgccaagatacgccaagctaggagcattctgccctttccacagtcatccaccgagaacaggcctgcaggacgggacaaggatcagagccttcctgcaaccccggccactgcctgctgtctgtgggcctggactgtgcgggcaactgtgcttggcccgagtgacaaggaggtgggagagggtagcagcatgggctacgcggttggctgccctcagtccccctgctgctgaagctgccctgcccatgcccacccaggccgtggggccaggggcctgccagggctaggagtgggcctgccgttcatgggtctctagggatttccgagatgcctgggaagagaggcttgggctggtggtgggcccggctgcccctttgcctgctcctcagcctttacggcccctggatgccttcctccctgggaaagcccaaaggccaccctcacatgaattccatccgcatagatggggacatcacactgggaggcctgttcccggtgcatggccggggctcagagggcaagccctgtggagaacttaagaaggaaaagggcatccaccggctggaggccatgctgttcgccctggatcgcatcaacaacgacccggacctgctgcctaacatcacgctgggcgcccgcattctggacacctgctccagggacacccatgccctcgagcagtcgctgacctttgtgcaggcgctcatcgagaaggatggcacagaggtccgctgtggcagtggcggcccacccatcatcaccaagcctgaacgtgtggtgggtgtcatcggtgcttcagggagctcggtctccatcatggtggccaacatccttcgcctcttcaaggtcagtgccttggttggtcccctgaggtgctcttcccccaacggactctgcccgccccacttcagggtgccaggcctggccgaccagcccctttttcctccttttttcctcactctaagggacagttttttcctcagagcagtgtctgagaatttggggcagctcttcctggtttcagtatgttgtcttgtggtctcagcacaggcacagcagatgaaaggcatcgggacccagccttgtggcgctgaccgaggtgctgaaacagcacctgccgctggaggctcggtgagcaactccactcctctctggggaattctgtaccaggaggaaaaggatgttctggagaacgacagagggaggaggagataggcagacagacagataaaaagatacgcaggtggatagac

SEQ ID NO: 10897 - DNA, 6000 bp, Homo sapiens
atactgttattattagccccattttacagatgaggaaactgagactcagtaaagttaagtaaattacccaaggttatacatctggcaagtggcagagccaggatgcaaacgcagattgactggctccagtggtcaactcttagccaccccactctaaagcctttcattaactatgagattaatcagtctagattccgtgagtcccatgtcttctttttattttcatataaggcctaggcaacattgtagaaacaactagttattgtttgggctggacttggtagtatacagtcaggaaatggaagtatttttcttccaggctgacctcaatcctgctctgtccaattactctttcctactaaaagccaataacctaggaagaattttagcttttgcagtcacattaatctattaaacagtcccataatcagttattgaaaagtcatattctcatctaaatctactacactgtcattttatattcaatttaaattccctcttcccccccgcagcaggaattaaaaggagtttcctttctttgctcgttcgccctctggttagctgctgcttctgacttttccagagctggggcaaagggaagcaatgtaaagaaaattgaagggtcttacttaactgtaggtgctgttgtaatcttgctgtatgtctccatggcagctgcccaaatgatgacttgtcctctggggccatgatgagcaagggcctgctcacttagagatgggagataggggtgtcataacaccacagtgttccatcaggttaacaattattgtcaaaaaactccccacctctgcgcacggcaaaactcccatttattccttgggttggtagaaaagccttagagtagaaattgaaaacctggtttgaaatccaattttgccgctaacaggctgtttggccttgaataagccacttaattttatttgaaagtaagtgcatatttacgtggtcattggttagtccttcaagtgcatggagaacccagaagaggaatcaatcaagcattttttcctccagtgtccaggaagttgtggtattcctttactaaagcttgagagggaaaattaagcctcttcttaaccttcccagcagatgcttttgaagggcgattatttccattccatctcatttttgccgtcttctactcaggaacctatcactgcatatttagatataagaattcatacagtattgcaaccaaagacgtcattgttcacccgctgcctctaaagctgaacatcatggttgatcctttggaagctactgtttcatgcagtggttcccatcacatcaagtgctgcatagaggaggatggagactacaaagttactttccatacgggttcctcatcccttcctgctggtaagatgctgattgctgaattgttagggtatattatttcacatatgtggagtctaaaaatttagtcttaaaatagggatcaagagacataggattgtatcagagatagaattaacagagtagaatcccatgaatctttgttaccttctattttgctatgtggctagtggttcattggtttatggtacaatcttgggagtttgcaatggtggagcctttttttttaattgggagaagttgaagaaagtattgagataccttctaatgaatatggcagactagatattctgacaatcttttcctccatgctataaagttgcatgccacaaaactgccatgaaaatccctttaaatgcataattgagcatgtaagaaagtatgagaaacaaccaagtgccaaaaaagtagaggaaaataaaatagaaatgatgctttaactaatgctggagctttcctatgggcttttgccaatatcagaaacccagaaccttgggttttaaggctccagagggcataaaagtaaagactgtgctccctaaacacacaatgggtcactcacaccccattgacacaatgttaagaccttcaaaaagtggcacattcagtaagagactaagctaggaaaacaaaattcatctgccagagttgagaccttggcctcatctctgggtggacaaaaggtttcccccaaaaaatatagttgtcctgccatcactcaggtttgggctttgaatttatatttcctttgtggttcaggagtgccaacctaagtttaaagttgtccattggtagcaccctatgtcaaccagcaaaaaaagaaaaaaaaatcaaagtctctctggtagatggtgcccttaatccagatccctagggattcccagagattaaggtcaaccagcatgatctcacaacccaaaaatctcaaaacacagacaacttcatgagggatttacaagctcattcattttttcaataactattctggagggcttactcaacgcaagacaccatagtaggcaatgaaagggagaaaaaagaagtggggcacatattttaatatctagaagggcccatgccctgaaaggcaatgcatataatataaaatatccaaatagaataatacagactaaaaaaacagtagaagttcagaaaagtggggactcaataaacactgtagtctttaaagaaggctgcatggcagagggatataatcaatctggattttgacatatgcagcatttcaacattctgtgtttaatatgcatacattcagtgctttctatgcaccagatactgagctgagcaccaggagatggaaagataaataagacaaggtactttctctccaggagcgtatggtctagtagagaagacaaactcatgaataggtgactatataccaatatggtaaaggcagaataggataaatgctcagagcatgatgaaatttagatagggagaaggatttgtggaatgctgaaaaggcattctgaatgtcaaaaatgtgtgacttggagtcatgaatggtagaggagaagttttgactagcacacatgcaaatgtgggcttacatacttcaaaacccagaggtaaaacctgttaaaaatgaatgtggcacattcctcgggaaagcttggacaggtttattcatattaggttatcttaacacaatttgtgcattagagactcatgttgtgacttaattctttcaataattctgtcttcagcaaaagaagttaacaaaaaacaagtgtgctacaaacacaatttcaatgcaagctcagtttcctggtgttcaaaaactgttgatgtgtgttgtcactttaccaatgctgctaataattcagtctggagcccatctatgaagctgaatctggttcctggtaagaacgttttaaattactttaagatgttatagtcagggcagggacttatttatttattcactccctcattcatccccattcaataaacatatgttaaataccctcactgtggtaggccctgggctcaccatagtggtatttaaaagaaaagaaataagccatgtcccctggcctcaagcctagggaagaaatctatgtgataaaaaaatgttattggccgggtgcggtggctcacgcctataatcccagcactttgggaggccgaggtgggcagatcacgaggtcaggagatcaagaccatcctggctaacacggtgaaacctcgtctctactaaaactacaaaaaattagccaggcatgggagcatgcacctgcggtcccagctgctcgggaggctgaggcggaagaatcgcttgaacccaggaggcggaggttgcagtgagccaagatcgtgccactgcactccaggctgggcgacagagagattccgtctcaaaaaaaaaaaaaaaaaattattacatgtaatacagtaagagctaaatagaaatgttgtgggtggcttagctctgctaaaggagtttaccaggtgattagaagtggacagtatcaatgtggttgaggtcctttggggtttcagcaaatgaaaggtgtccacactgcactgtttttctgagacaaggctacatgaaaacaattaatctcgagaataggcagctgcctttcccatcctttgccaccactgagtcaatttgccatcacataatatctttgaggtgaaagttcatgttttacagagtcattgctatgctagcccatgttggggagctcccctcagcagcagggaaggatagatcatcctaatacaaggtcatcttaagggagaatcttatgttaagacaaggggtaaatgatgaccctgggcttctaccataagcaactcctcatcctcttaaatcttcccagcaacaggacttgtgatagacaaaggatcgttatcaccaagattgtttgagtttactgaatagtttgtggtcattctcacatgttggcaactagcccctgggcaccaaaacaggaaacaatttagagtcactttcacctgacctttccacgcacaagtacaacccctccagggtgcagcaaaggtcacctcttcttttccccatcactcatcttagccaacacattttattcacttatctttgttcttctcctctttctttataccaaatatggtttcgcttctttttcctagtagaacattacttatttaagatttatatacagtggttaagatcttaatgttaaagaaaagtgttggtgagggaggggtctcatcagagtcagggtccactggacatgagagattccacagcaagtgtcatttccccatccttgcctggtcatgagaagaggtgaaatagaatcacctctaagggaaaccagaaggaacaaatgcttaaacatattgattagaatattcaggtcatgggtacctagagttcctactagcaattatgtctttggattatggcagtgattctcaaccttgacagcacactggaatcaccagggaggcttaaaaacctgctgatgcctaaatcccgctctgacgattccgatttacttagcccagacactggtgttttcaaaagcttcccagatgattctaatatgtcacagttgagaatctccagatgaaggtataaaattctgttaggaaaaggaagttccgattacagaagtcaggttcatgtggaaagcagagaggggctttggaaaatcaagggcaaaattaagaaattgggtagttctgaaaaggtgacggaaagtaaaggtaaatgtgaattcaaacatcaaaattctaccttggcctgaccgtatttctactatattgtctcttccttgcaattatccctttatttcaatgtttccaacacaggggaaaacatcacatgccaggatcccgtaataggtgtcggagagccggggaaagtcatccagaagctatgccggttctcaaacgttcccagcagccctgagagtcccattggcgggaccatcacttacaaatgtgtaggctcccagtgggaggagaagagaaatgactgcatctctgccccaataaacagtctgctccagatggctaaggtgatccttaaagcttccactctgagctcttggtggggcgatctatctggctgatcatatttctcagcacttaggaaaatgggtttggtgctgctttgtgttgctccaaaactacttttatttgtgtatttccaaaggagatgcaaccctagaaatgcaaaaaaaaaaaaaaaaaaaaaaaaaagcctcaattcaaatactaagacaactaagtatgtgttctgctctcagaccgactagataccttaaccttgacttctcagtaccatgtgttccatacctccagggggcagcggtattatcctctctcttattgctctcctttgagtaattttgataccaagaaaattgctataatcctttcagaaaaaggagcaatataaaaaaacaagcttcatcaatttctttaaaaaaaatagctgggcttgatgctcttacaggtatgaaattttctgactacttggaagtaacttgtgcttttgaagaagcaactaccctgcctctcttacctataatagaggttaccgctatgtaacagggcagaagttcctttccttctgtcaatgtaaaaaaatgggacctc

SEQ ID NO: 10898 - DNA, 6000 bp, Homo sapiens
acaaataatgcgtgcatacatatacatatgtatgtataaaatatgtgtatatgtgtttatatatgtaaacataaatatagacatagacttgtgaaagagaccaatgaaagcagataattataatttgaaatggtgattttaatatgtattcagtcataaaagtggaccaacatcaatagaaaggaaaggacagagagctgagggtgtgtaaactgctgctctctttttgctgttgggtcaacatgtcagcaatgctttcatatggagcagcttgcagacatgaaacaaggtggttcctcctttctttgcctttggattgtgctgttgttagtgtccagagaccagactgtccatatagggttctttttgtgattctttattataatcccctgaggaagtcagacgagcctggggttactggagacagtgtcttgcttggcgtagttatcatccacaaatcatctgctataaatatatctcagaaggatcatcatcaggccagctcagtagcctgcaatttatgaaggttatgagaaacaatgtgaagggtgaagcgctttattaagggtggctttcttttctgaccctgccctgacttctacttgaatataaatgatcctgggagtaagtgaacctttccatttaggatttaggcttttaaattgtccctttcagctgttattcttatgccactgtgtcatgactttaagaatttctaagaaacatcaaaatcagtgttacaagataatatgagaaatcactagatgcaaaatagaggtataactgaacctcacattacattctttcctttttatgtataaaccatccaaagcattttttcctccgtttttattccacatctgtcatgcttttttttcctctggataaagtaacagaactgaccaaattgccttgcgaaaatcataattacgatctctagggaagttgaaataaataaaatgtttttctcctttgtgttgctcaatgttctttgtttttaaaagaaaatgtgttgcttaaacggtgtttcaaaatttgttctggacataaaccctaattatttccttttaacatttccttaaatgaataaaaaatattgtaaagaaccaaaatgacacaaaaccaaaatgccacccaggctgctctcttgccggtgatttgttactgggaaaatagttaaagcctgctggggaattattaactgtttccccttacagtgtttatcccaggcattcgtttaagacgggaaagccttgaagagggtcactctattaatatgcattaagaagtaaaggaccaattttaatatttcaaacaactccagtggataacagaccataaacttcctgttttcactatcaatctcttttaaaatggtgttcttggctatccataatcgccccaggggagagaaacaagcggaggaaaaaaatgcaagagtgaggggaacaaatgatggaaaattgctttattcaacttcacctgccgctcgagaaactcacccttacgaagattccagcactttatatgaattacccattatggtttcctcccaccacatcactgcactattttagcacttgttttgcaaaccaccaactgcgtttacaagtagaaacataatcaggaggcgaatgaccttttgtagcatgtatctgaagctggtttatcagacacttcgtcagccaactgtccaggaggcaaaatgactatctatgatgatagatagacagacagatagatagttagattaaaaggtggggaaacatcccttttccctttttcctttctatataatctggttttttctcttcaccccttttctcgcttcttcccaccccgtccccaaacctgttactagggaaacttgaaaaagaatcagatacattaagactacaaaacgaaacaaaagtttagaccccgaaaccatgattccattgccaagcacaaagcaatgcaagagcccaacgtcggtcgccgcaccgcgatcctgacaaagcctgtatggagccagaacaaataagatgttaattgcagcctcgcagagaaaaaaatactattgttccagccagagacactcagcagctcggtagctgggatgtgccccctccgctgcggactggatcaattctgaatcccggtactgaaatgacagctctctggctgcgacaggtctgcgctgaaagaaagagaaagacgatcaagtccagcattcacttcccacccttcagagtcgccttcccatcctccgcacccccctgcctcgcctcccagtgagtttctcttacagttggtcgccgccagccccagcggtgggaactgaggatgcaaaaacctcccagacgcagaaaataccgctttcgggacgtgcttgggtttgagtagccgtgacgtgcaggcgaaccgcggccctggctggagctccgtggagcccccctcccgccagcctctcccccgccctcccgccgggactccctcctctcccaccccgcggctcccttcgccttctctctcacacacccgcccgcgcccccggcaggcagaactccaggaagtcgcagcggccgcgccgcgcgagccgagcctctggcgggcggcggggcgcaccgcagctgtgcataagaagggcgcgcggcacccgggacgcgcgcgcacacgagcacgcgggaggccgccgcgcggacgcgctcccgggacacgcgcaccccccgcgcgcgcgcccaagggagagcgagcactgcgcgccggcgcgcacacccgagacagagctttactatctcgctccctctcgcgcctccctcctcgctgggcattcaaacagctttccgacatcaccagccaaggatttttttccccgctctccttagtcgccgtccgtccatcagtacctgcaggggggaggaggaggagggaggaaagcggaaagaggaaaaagcataagcttgagccttccgatccgaccacgaatactcctgtaataaacccaccgccccaacaaatctgccatagcagccgccgccgccgccggtcacttctcgtctcagcgctttctttgcttcttggtttgttgggggtagcttttatgaaacaaatctttgctattaagccacttacattttggggggttccttagagtctcccttgggggggcttctccctccctttagcccccctcggtttggaggttggattcagttggatacggcgcaaggttctgggctcctgctggcttttttttcctctctctcatcgacccccctttggttcccaccccccaccttttgcttttcgtatgtatgcatttttaaaaataaatcctgattttggaagctgagccggggaaaatgggcaacggtgattgggaccgaaggggagtctctccgtcactgttgctgggacgcgtgcctgtgctggtgtcttagagcaagagcctccctgagctttcggagtggaaggtaaggaagggggtccaggggtcaccttttctctgccgggggtcgccaccgtggagctttgggcttaatgtttgagaagggaggaaaatgaaaggaaaggctgttgctggcggatggggaggctgtgagcagatccgactgtctgcatttacttaaacgccgcagttgaaaagttagagaagtctggttttcaagagatgtgctgggtcagaaggaataagcggagagacctagaaaatctggcagttttgtgtgattggggtaattttatgaggggaaaattttaggttaaaaggaagttaagagaaggcagtgggtcttctattggggggaaaaatctgtggagtgatggcgccgtctatgttcgactaaactaaagtgtcacccagaaaatcagttttgagaatagctaaactcaatgctggtttgcttctcagcaagagataaataaataaataaataaataaataaataaataaaacatccttgacacctccgtggccagcctttgcccccgcccccaccccttctttaagagggaaacacggctttttgaacgggccctgcagtccaaaggggggtgagggtaatgatttattttttattatttagaacaaaataagactgtgtactccagactgattaaaaataaagagcattatattgagtgcgctctcttgagcaggcattaaagtgaattcagagctatttcctcactctctgatcattgatgagcacggcattgcagacatgcactgtcaaataaatgaaagcaaaagtaccaatttcattaggaaaagacatacgacctctttttgagttcctgattataaaatgaagtcccctttcatggatggaattcctaatttagacacttattgtcacattggctctcaacgcctacactctatcctgaagaacactgcgcagacctgcattgcctgcaaagtgcaacaccaaaaaaaaaaaaaaaaaaaggaaattatttccagaatttcttacaactttctctgtttttttttaacctttaaatgctcattggctttattttctcatgaagaaaatgcattattcattgagctatttgcttgaaacagagaacactgttttgatggtcccagcagttctgatgttattttaaactgctgctatatagagatttagagttggggctgtgtttgcctatatcaagacatagaatttgaattataatctggaaaatgcagatctatcttcagggacttcggtcactggatttggtgtgcatgcgttggtgtgtgttatgcaatgggaaggaagagggttttatcctttgattcagagaagacccaggcaaaggcatgaaaactcttaactatctatatgtctgtatgtctgtctctgtttacagaacagtggaagagactgcagcctaaagacttttaaaattaacttggcatcacttttatcagctcaaaggctaaacaaacaaacaaaagcagtgtcatttattctaagaaataacttcttaaaggttaaagctgaaaaatattcaagttatttttggataacaacttacagaggtaaatataaccaaggactactttattatccaaagccagggttaaaattaaaaaagaaaagaaaagaaaagaggagctttggagttgttgttggaaagggagcaatttaataattgaaatctgctaggaacaaaaatgttaatgtattttattaccatgtgtaagccttaaattacagttgataagataatttttcaaaaattaaaagactgaaaccagctcaattactatggttctggattttttttttttttaactgatatcacctttggatacagatactaatacagtgatccactttatgtatcccaaaagggcatgtcacattgaaatgactgccctaaatcctggttctcaatggtgatgttgaacaacaagtcttccctatgtatttatccatctatgccctttctcaaatgatggttttaaaattaactaatccacatgaatgcccatgtttttgcaaaggaatttctgagcagttcacatggtggcccctgcaaaggcaagtggggcatttgggagatgatgttccatctgtaataaattattatttgtgcttttaaaattgtggccataatttatcatcattacttttcacgtttaagaggagagaaataatgtgatgacagctgttcccagattatcagattagattttgtatgatagtgtttaccgcagaggacagagagagaaaaggttgtatagactatagactgattaatactatttcgacaattaacatttacattatgacgttttaaaactccatgttttcccttttcattcgatagaatgataatggacgtggaggatatcctagtagataagttagggcattcctattaataatctattaaatgttatttttaaattgaatgttgcgaatttgaccattgtgaatggccacatgagggcgctgttcacacagcaacagataattttcctgtgttataaaataaaaattacctgcccttctttta

SEQ ID NO: 10899 - DNA, 6000 bp, Homo sapiens
agattgagaccatcctggctaacacagtgaaaccccatctccactaaaaatacaaaaaattagccaggcgtggtggcgggcacctgtagtcccagctacttgggaggctgaggcaagagaatggagtgaacctgggaggcggaggttgcagtgagccgagatcgtgccactgcactccagcctgggtgactgagcgagactccatctcaaacaaaacaaaacaaagcatttttagcaagaatgctacctaggtggtatcatgtactttctgtagcacatctggggacacacaatgtcagtggtgatgctgaactggatcacctgcttaaggtggagtccaccagattttccatggtaaaggtgcctttctccttttccaggtttttactaagatataattcagagtccactattccaggtcaacttctctaaatacttgatgggccccttcaatttgtagactcaagttgttcatttctagaaagtttcctctttttgcctggggaggggttatgctttagtttgatattttttctgttgttttgttcttcttcaggcactccaattatgtgtatgttggattatctttgcctatcttctttagccatgtctttctctttctctctgacatttaaaaaaatatcttttttttttttgcaacatggctccctctgtcacccaggctggagtgcagtggcacaatcctagctcactgcaacctcaacctcctgggctaaagtgatcctcccaccttagcctcctgaggagctgggactacagacgtgcacaactatgcctggatacttttaaatttttttgtagagatgaggtttcactttgttgcctagactcgtctcgaactcctggatgcaagcaactctcctgtctcagcctcccaaagtgctgagattacaggtatgtaccactgtgcctggtggaaaactctttttattgattttatttctgttctcttggctcttttcatttctttcatgaatctcttattatattttccattaaatttaatttccccttagagtatctttcaatttatttatttaaatattttattttattttatgtttatatttatatttttttgagatggagtcacccaggatggagtgcaatggcccaatcttggctcattgcaaactccacctcctgggctcaagtgattctcctgcctcagcttcatgagtagctgtgattacaggcgtgcaccaccacatctggttaatttttggatttttagtagagacagatacctgtctctactgtttcaccatgttggccaagctggtctcgaactcctgatatcagatgatctgcctacctcggcttcccaaagtgctgcaattacaggcatgagctgctgtacctggccatatttttaatttttatttttatgggtgagtaccttgcaatttaatcttcatttctgaaatgattttgacttttctttttttttttttttgagacagggtctcactacattgccctggctggagtgcagtggcacaatctcagctcactgcaacctctgcctcccgggctcaagggatccttccatctcagcctcccatgtagctgggactacaggcgtgcgccaccacacctagctaattttgtatttctcactatgttgcccagatctgtcactttttctttaatttctttcctgatttttgttaactctcatttcctgcttttccccttttttggtctatttctgtttggtgttttaaaagtttttatttaaagggtgtttcaggctgcaaatgcttatgtaagaatacttagtttgggttggagtattgtgttacagttttctgcttggtatttttctggaggagaattttcatcagctaaaatgttttgattctcactttctatttttttcttatagtagattcgtatgaatgtttgcttttttcagttcatgttgaaatatctgctatttcccttgaccagcaatataggcacttgcagacagaagcagggggtttgggtggattactaggtttcttagttcaagggcaccctcttctaaagaaatttttttcccctaggctctgttgcccaggctggtgtgcagtggcaccatctcagctcactgcagcttcaacctcctgggctcaagcgatcctcctgcctcaggcctcccccatcttcccccagtagctgggactacaggtgcacaccaccacacccagctaatttttgtattttttggtagctatgaggttttaccatgttgtctaggctggtctcgaactcctggactcaagtgatccacctgcctcagccccgcaaagtgctgggattacaggcgtgagccaccacgcccagcctctaaagaatttttttaaaaaaatcagtgatacttttgttgtggggaggggatgatacgtcttttgattttgtgattgttattgttttgtaaaacctttaacttccacagcttactcccttctctgcgttcaccaccaagcttccaagggacaccttcccctttcgggtcgccccctctcccttccacttcctcagccctttcaagactgccactctggccctgcacattctcaattcccccagaagtccgtgctctgatccacccagcatcagccctttctcagcattgccccactcagagcaggccttgctctctctggggtcattgtttgtgtctacactcaggccttggctgccctctcctcttttgtatggagtctccaccggactgtgtactctctgggctccagaccttgttctgtcattttcagatgtttatttctctacttggttgtggaaggagtttgtagtgctccatccacagatgatgttaagggcagggtgtaggaatgactttctttgctctccctgttgttctgcatggctttggggggctatgcaaagaggctgggttacggtggctgccattatcctaagggagcctggaaggcagctcacgtcctctcagtgaacagcagtgaccgtcagcaagttacacgtgtgttgtcaagtcagttcctgttattttcttttacaatttttacatttattgcttaaattggccagaggcatcctgctgtttgcagctgaagaatcctagatgcagcagcgtacttcctgccacctggatgaggctggattgcagggcgaggcggaggtgagctggagggagaggtggagatgcttggagctcctgtttcaagccatcccgagtgcaggggcatttctgggaactggacacctttggaattcctttatttatttatttacagacatggtctcactctgtcacccagggtggagtgcagtggtgcaatctcagctcacggcagcctcaacgtcctgtgttccagtgatcctcccacctcagcctcctgagtagctgtgaccacaagcacataccaccatacctggctatttttttttattgtttattttttgtagagacagggtcttcttatgtttctcaggctggtctcaaacttctgggctcaagcgatcctcctgccttggcctcctaaagtgttgggattacaggcatgagccactgcaccccctccatgtatttattgaaacaaaacactttcagagtgaacacacccatgtcatcagcacccaggtgaaggacagaacagcacccaggtgaaggaagaagcccccaggggcccctgcatgtcccttttggtctctacccacttcaaaggtaaccaatattctgacttctctcactataggccggtttttatactttgtagaaatggaatcacatagagtttgtgcatgtctgcttgagtctggcttcttttgctcaacattacctctgagttccccccatgtggatgtgtagatgcagaatatgttttggagttggaagtgacgggacttggagattcatccagtgcccttggacaaaccacttcacatctcccactcagtccctttgtctttcaaatggggcagatggtgacaatacacagctgttagtgctgcagttttcacatcccggtctgttaacggacctggaatagggcagaggccccagggccctctcccccactttgcctgagagggtggggcctgggagcacttgagcttcagttggctccagtgtgtgaaactcacacacctctccctacccacacactccttgacatttgcacttttaacttttaaaatagctcttttcttttcttcctttctttctctctttctttctctctctctttctctctttctttctttcttagatggagtctcgctctgtcgcccaggctggagtgcaatggcgcaatcttggctcactgcaacctccatctcctggatttagcgattctcctgcctcagcctcctgagaagctgggactacgcgcctagttaatttttgtatttttagtagagacggggtttcgccaagctggccaggctggtctcaaactcctgacctcagatgatccaccctcctcggcctcccaaagtgttgggattacaggcatgagccaccgcacccggcctaaaatagctcttttcatggagtgcctgcctgccctggctctccactctgtccctctgtcctcagcgcttgggcccctggcaggacatggctgtattattagtaaaaatattaaaatattgcacaggtaatgacacatgttagtgacaatctctctcagcatatggggctttagtttgcctggacagacatggcacagggctgggcgtagggggttgaagcccaactcctggctaagttctcttagcttctgaagatagagaacgccctatgtacctctggggctgtgatgaagatgaaaggggctaccccctgccagagtctgccgacgctgtgcctataatgcctggcagcgcctgtaatgcctggcatggaggtctcaggcgtggctgcacctggcatcttctgggatagctggagcctgggtcctcccgcacacaatctggtttaggccggcgccgcagctcctgtccgtaatcccagcgctttgctggaggatcgcttgagcccaggaattcaagaccagcctgggcaacatggcgagaccctgtctgtcccaaaacaaaaaaacagattttaattggtttgggatgcggcctggacacagggaaattttaaagctctctaggtaactccaatgtgcgtcgaggttgcgaaccgccggcctgtcacacagagggagctcaggagatgctgagagtgggaggatgccggcttgggagcctggagttgcagcttcctgcggctggcgcgcccctccttgctcccctctacgcctctgcatcgcaccccacccctgtaccccaccttcctcccaccaaggaaacctcacctgccgcctcccgcccaggtcctttggattttgccggtgtgtgtgggtgcgcacaagaggcccctccctgccaggagagcaggtgagcctggccgcgcacgaatccgagggggcggccgcccagctgggaagcagccctgaaatagacccccgccgcccccgctgcctccttccggaatctgctcaggtgaaaaacaagcctctcaatccgggcgtgtccccgggcgtgggacggggaggtgcccagcactgtgggaggcgtagactgggcctgggtcccgctcggacccgccccaggcccggccgctgggtgcaatgagggcgttcggccaccgggcggcggtgctggcccgcgatggggagcctggctggtggggcgctaggctcgcgctcgggcgcgcgggaatcgaggctcctcacgttcttctcagcgatcttgccgcgtttctggggtggctgaactggccctccatcctgaggaggccggcgcaaggggcctgcccggggcagtggcactcccttctgcgggcacagagagccgggccggggtgccgactcccccccacgtgtctgtctccctgccctcctgctgctgctttttgtcccgcatttcccacgagcttcctgaagtctaagagtgtgt

SEQ ID NO: 10900 - DNA, 6000 bp, Homo sapiens
caagtggtggtgcggggggatgggtctttgaaggcaggtgatctggaggctgctggagggctggccttgcaggatggaggggggactttttgagacaggtggggtggggagagccatgccagggaggatggggaagtgctgcaaggagagcatcccaggcacagtgggggctcagagggtcctgccacggtcagacctcctgtaaacctaagctcacctcaggctcagacaaccccaggtcgtgcaggacagaaatgtgaattcatttagcagcacgtcccgcctcacttgaaggtaagtgggatttacaagtccagagtgttctcaattcctggggtctcgggcaaggcagcagctcctagagaatagtcagacccgagttcagatccagcctctgcctctccagctgcgtggcccagcccaagcctccctgttctccagggtgaatccaggtgggctgaggggatgcagcccccccgtctccctccagcacgtcatgctgctgctgtcctcctctgcaccgattccaggatgtttacggttccttcccaccctgggacgcaggctgcatggcgccgggcttctgtcctctgcatggctgcatcccagtgtctcacgccatgcctggcacataggaggcgctcagtacacgtctgcgggctccacgaagggaaagtggtggcagcaggcaggcaggtgatgtgagaggggcctgtacttccctgaagatgtgcctgcagatgctcagtaaatgtgggctgctgaagaatggtgcttaggggttgtgcggtgggggtgtggctccagggggcccttcctctgccacctgcatgctcaggctgacccggagcactgtctccttgtgcttctgctcaggatgatggcttttccttctggtcttgcttccccagctagactgagagctcctgaggaaggagtcttactcaatatcatttcttagggactgactataccaggaactgagcagggcagtggaaggaaggaggaagggagggaggaaggcatgaagggaggaagaaagggagggaggaaaggagggagagaggaaggaagggaggaagggacagagggagggaggaagaaagggagggagggatggaggaaggaaggaaagaaggaagaaaggaaggaagagagggagggagggaaggacggagggagggagggaaggaaggacggagggagggaaggacggagggagggagggaaggacggagggagggagggaaggacggagggagggagcgaaggaaggaggaaggaagagaggaagaaaggaagaaaggacatagacctgaccctgaccttgggaagtgcagcgggaggtggacattgacacagttatgtcagctgggcctggagaccaccaggaaaggtcaccagaccacagatggaaaggacggagagactgaaaaatacgacaggaaactgataccaagtttcatccacgaagtgtctatgtcatgttcacgtggggatgcctgaagcctggggtggtgacggttccagctcacaccagcggagggctggccaggtgagagcctgctctcacgggacgatgggatttcaggaaccacacggctgggaggacaggggcagccccaggcaggtgggcatggaggaaggtggaggaaggcaggcagcttccctatggaagcccctgggctagctgcggctatgcagcccatttcacagatgaacacaaggaggctctggtgtgccctgctgtgttctctgtcaggcggcaccacgtgaggaccgcggcacccttgctgtcacccatatctaaaagttttgtccagctggggttctgtggcccagatttgctgagtagtcccatgttgccacatctgcttgattctgattatttttttaaagaaataaaacatggattgagtcggaaccttcttcagtcctgttcctctcttctcccttgaggtaaccatgattttgagaggtggcaggttcccttcctgtccttgtttagtcactcagcgaacacttgagagcacctactatgggccaggcagtgttctaggcactggggaagagtgtgatgaaaacaacggacaaagtctcccgccctcatgcagccttcactcatatatgtatagtacatatatatgcatcttcataaatattgtatgtggtctttagattttacataaaatctaaatcctgctgcaacttgcttttgtccgtcaattttatgatttcaggatttgtcatgttgacacatgagaactgttattcatcttaactccataatatcccattgggcaaacacaccacagtttattcattcttctgttgtaaaacatttaggttgtttccatttttttgcagtttcagacagtgctgtgttgagcgactctgtgtgggtctcctgtgcccacgtgccggggtttccctggggacgagtgtggacggggaagcactggcttggaggcagccggcacgttcagctttactagacgctgccgtgtggttctgcagagggttccaatggacacgccttgatcaggtgtccagctgtcttgtagtaaaggcgggccccgagggatggggccaagcataagtcggttttgatgggtggggtagcccagggaggaggggaggtgtggaacctgggcgggctggggaggaggcgcagagctgggagagatagcggttcctgctggaaagcagtcaggggctggcctggatcccaaacttcccagcgcagtggtgagagcctcgtctgaaggtggctctgctcctgctactgtgtgcccctgggcaaggcctctctggcctctgtctcctcactctccatccaacttgggccaggaggtctccaaggtccccacggacttgatatgctcagattttcttggcaagaggctgtggcttcctgcccctggccggcgagcagacgcaccagcttggccgggatggcagagcttgcagctggcaagtggcattcgggtgtttgtcaggagcctgggcggctggggtcctggcaggaggctgggcaggggcttgccaagggagacccaggaaagccaaggaggccatggggacccccagacttcttcatgtgtgtccccctccccgtatggtcctgtgcctggagcctggggagtggagggctccagcctctgccctgagatacggagtgggcttgttccctgagggctttgtgggctttcatttgattctatctactctcagtatggacccatggattcttactttattcaacgagagagacttggggcacagggtgaggaggcgtgcccctccctaggggagaggttagaagcaggcgtctgcgggagtgttagtcgtgtggcccaggggctgggcacagggatggctggtgggcttggtgtgactttgggtctgtagcagcgtggcctggaatgcacagggtgggctgtggtgatggtggatgttgatctgtgccagtgcgtgcattctgtgactgtgtgtggacacatgtgtgcacacatgtacatgaacccacctaaacaacaggggctgcagaagaggctccggcacatgaaacactgcccctttattctcagtggctgctgcggagtcattgctttgcaaggaaagggaactgtccaggagcggctgcaggaaatgggggcctctccgcctcagggaggctctggacacagaccaggattgcagtcccactgactggctgtgtgaccttggttaggctatttagcaacctgagcctcagtttcctcatctgtgagatggggatattagcaccggctaatgtgtaaggattcattgagactgggcctcgcatggtgccaggcatgcagggggtgctcagtggcctctcgggccgctctggtcttctctggctgcagcaggcaccaagagagcagttgaggcagagattgtgccactgccaggagcttgtgtcatcccaggagagggcctggcttgtgagccagttcctttacccactcccctgagcggacatgctgacaatagggctgtgaaacagagggaacccacgggcacttggtttctcatcctgggggcagcaacaccagtgggcactcaccccagcatgggcaccatgccccatcatgcccatgggcccacaagccccctcaactccacaatcctatccattcactacatgactggatgaaaggtggccgctggagccagatggcccaagttcaaaccccacctcttcccctgactatctttgtgatcctggggaagctacttaacctctctgtgcctcaatttcttcatttataaattggagatatggtgattacactggcctcagatgagtgaatccatgtaaaatttgcagaatagcatttcccatgcattggacactccataaatgttcattagtattacggagctctgcacacccccgccccccgcactcccttctggtctgaatctcttgcagttgcaagaatatcaaaccctcctcagactgcacttgcatctcaagttgcttgtggctcactcacactcccgctgactgagccgtggtcacctaatccttccttcaccagcaaaacgaagcttgcaagatatgccctgaggtgccaggcaagaccatcacgcggatcctcttagaggagcatctcagaaatatgacttaacctaacagtttctccctgtttgagagcaattaactcccttctcctgccttccttcccgctcctggagccaggtggctcatccttcccttccctctcctcccagtccagcctcttcctctgtccatctgtctccccagatggggggaggaatgtcgcaattggcccactttctaagtggaaagaaaccatatggagggtttagctgggaactgagagccggcccggccagtggtgcagccagtggctgcctcccttggctccctctgtgaccccagactgacaggggccccagtcctgcccaagcaccttgctccttctcccccctccccatgagctcctagtaaacatgctcttctctagcacttgggacttcttggtgtcttaggagagacctgaggagctgtgtgtgtgtgtgcacgcacatgtgcgtgtgtgtgcatgcgtgtgtgtgtgttgtgtcctgtggccccaggccagcagggtgcctggcacagagcagccactccttccagagcgtaccctgttctctccagaatgcctgccgcctggccacttgcatcctctgaggactcagcccagtgtcactgcctttgggcagccttccctggcggccatctccctgcccacaggtagggacccctccatgggtggagctgggtgctggcactgccctgtggggctggtggtagtcgtgtccccggcactctgagcccctggcagctccacccagagttttctgatgtaatggggcaagtctgtgtagaaggctcaggtggccccagcctggacctccaggtcatttggaagcccagcggtgcccagcctaggtgtttggtttgaggcattgtgttgagttgagtgggacccagaggagggcagcccttagataccaagaccggcttcaagattaatccctcatgcttttccatcgactgccaccaggggcttctggggtcttattctctgggggtctccagctcctggactccagtagggcaggtaactgtgtggctttgggtaagccacttctcttctctgagcttcagtttcctcatccgtcaaaggcagtggctgacacaagcatggcccacagatgctctgtaccacgaggtcgggtgagatttaaatacgtgaatgacatctgtcccctgccagcacttgagaggcacatctggggctggggatggctgggacaaagtgctcccagggtctctgatggccacccagcctggtcgtgaatcctgacaacatcaagtactgaccctctcctgatggttccagccagtggccatgcacgctgctcctaccaagggcctggtgatgggcatggggcccaggg

SEQ ID NO: 10901 - DNA, 6000 bp, Homo sapiens
gtgctaacctctcccagcatggggaagggccagggtggggtgaggggcctggggtgaagagccttaccatcctgggggttcatggtgtcccctgtttgtctggccacagaggagcatggtgtggtctcagtttggtctgtgcctcctcagaacacaggatggagtggttggggcaggggtcaggagcccctcaggctgcacagagagcaaggcaggaccgggaggtagagacctggggagtggagaagaaagcaggacagcaaggaaagggagggacagcggggagaaaaccagccggctgtggcctgcattccctgggtcccttttaacagccttaatgttccaggctggtgacaagaggcctcctcaataattaaactgatagaaatgagaggctgggtgagaaacttaaaagccatttacagaagcaaaaagattgaactttggggagggaggtcgggagcaggagcctcgggaaggagagggtgagggagggatgccttgggggaggggacctgcgcccaccaccaggtgtccatttcaaagggcaccactgcagcccccgccctgctcccctaatgatgggttaatgtggcctgctgggaacttggcaccagaggctgtgatgatagctttccttcctgcaagaggtggacttccggtgcttggctcagaggggagccctgggtgtgggggcactcaggtgatttcctgcatggagaatgctaatggagtgcagtcagggtcaggatatgagcaaaactcacaaggctcagagctggaaggggccaacctcttgctctagagatgtggaggctgaaccctgataacatgacagggcagggctcaaagccgggtgccctctcccaggcctgactcctgggagactgcctgctcaagagacagctgagtcagaagtgggacttgaacaggcctctgttgcggaccagaaggcctgactctgggaactcataggtctgacagcttctatccctaacttccctgctcccaccccttccttcatttgcaatttgtcccattctttcaggacaggggtgctgatgggtgtgaagaataccttttggtgggcacccaagcccagtggttgtagcctgtacaatgcactgttgtgggcccagcccaggttgtggagaaagtcaggcctgggtttgaatccctgatccactagttacctcacctccacttaccatgtcagttatttacaccatactgtgaatgagcccataagacctttctgtggctggcgcagtggctcacacctgtaatcccagcacattgggaggccaacgcgggtggatcacctgaggtcaggagttcgagaccagcctggacaacatggtgaaaccccgtctctactaaaaatacaaaaattagccaggtgtggtggcatgtgcctgtaatcccagccactcggcaggctgaggcaggagaatcacttgagcccgggaggcagaggttgcagtgagccgagatcgcaccactgcactccagcctgggtgacagagtgagactccatctcaaaaaaaaaaaataccttttcctgaaaagtcattgttcgggggaggaagagcagactggagacacccccagagggaagcagtttccaaattctgtacctgtaagagctcagggggatccagaaataatttctttgagtcttttattcattttgcagtggaagaagctaaggcttggagaagggggcgctgcacagcatgggggtaagcatttggactctggagccaggcagcctgaggtctgaccaccctggcaaactgcttaacccttctctgcctcagtttcctcatttgtaaaatagagatgataatggtgccagcctcataggacagcacggggattaaaaattaaggtccagctaggtgtggtggctcacgcctgtaatcccagcactttgggaggctgaggtgggcagatcacttgaggtcaggagttcgagaccagcctggccaacatggtaaaaccccgtctctactaaaaatacaataattagctgggcgtggtggcagttacctgtaatcccagctacttgggaggctgaggcagatgaatcgcttgaacccgggaggcagaggttgtagtcagcgagatcctaccattgcatcccagcctgggcgacaagagcgaaactcagtctcaaaaaaaaaaaaaaaagaaaagaaaaaaaaaagagttaaggtccaagaaggcctagcatggtgcctggcacacagtcagcccacaggaaatgtcacagcacagcttgtagctgggccttaagtcagcatgagggactccggcgatgcggaagaggatggagcgggcaggcagcgacagacggtgacctttaaggctgatcccggagagttccccaccatctgctgggcctcttgcgtcttcctgccacgagtgcagcactcagtgttgagaccgagcagacaacttaactttgagtaatgagaatttcttgctatcacgaaatggggcatgggaagggggagcagaggtggcctgtatgtgccacccctagcctggcggtgtgagttccctcccctcgtcccatgttgggctgcatgtgccccctgggctcttggctgcttctggagccggggctatgggtgtggccctgggggaacactgtcttagatcccacaagatgttctgtcgaggacgtggctttgtgtctttatgtgttttcactacacagccaggaggaactctagagagagcccacccaccctactgcacccatcttgaccaggccaaggaatctggaggcatttttgaccaccgtctttctgttcgtcagctcaccctgcaggctccactttcagaacttgtcctgggcatgacaactcctcacggcctccatccccatagtctcttacccagcccattacagaagcctggtctttcctctccctgcctccaaatggcctctccacagccaaaccttcactcagcagccggagagatctttctaaaacccagatggaatccactcaaccctctgcttaaaccttttattggcttcccgttgctcttagattaaaatgtgaactcctttcctgtctgagaggccctgtgctacctggtgcccctgatgtccctttgtctctctgggcactgcccacaccagtcatactgttttctttatgctccttgaagacaccatgctattttccaactgcagggcctttgcacctgcttgccttgctgtctggagtcttctcttcccactctttgaagctggatctttctcattcagccttgagcttaaatggcctctcttcggagaagctccctggcccctggctattctgtctctttccctgttcttttccttgatggcgctcatcacagttgcagtcatgtacacatttgttttcctttttgctattgagttcccctctagcccaggggttagcaaacgatagactaggagccaaatctggcctggttttgtacagttcatgagctaaaaaaggcctttatgttttaaagggttgaaaaacaaaatacaaagaaaaataatgtcatgatactggaaaatcatatgaaactcaaatttctgtgtccataaataaaggtttatgggaacacagtcatgccgattcacttgtgtcttgtctagggctgctgtcaagctacaagcacagaactgagtagaggagacagagacagagctggcccccgctaggctctacgccccacccatagaactcccagctgatgcaggcagacggtggccctcaggaaaccctcgccaaatggactcatggagggatggggaatgggagggagacctctgcagcccccatgtctgcagcaacagctgggctggtcttgggagctgaagtcttgggagctctctgcgagctcctggctgtggggatgggtgtggctggacctaccttaccattgggtcaagccagtgcccactagtgcccactactggtggtatccagggtcacctggatatgtttcttcccctcaaaacaccttctccaggtccccactgactcagggaattcctttcacctaaagctttgctcctagtcaggggggattgccatgtaccattttaggctgtcattagagatttgtcccaacagggcttgctctgtaaatgttgggggtgggggctgaacgagggaccctctctaagaggtgactgaggtgaaataattggaacatttacatagcacttaccctgtgccaggctggtcctaaccctcatagcaaccccaggggcaggtatacagttgttatccctattttgcagaactgagaactaaggcacagagaagctaagcaacttgcccaaggtcacacagctagtaagtggtggagcctggatttgagcccaggccatctggccctgaatctaccttttttcaccactctgctctcctgcttcttgaccaccagctaggggtgggtttgagacctggcctgatgcttacttactgcatggcctctacaagcgtcagtttactcgcctgtgaaatgggtgtgatgatacccagctggcagaagcgataatgtgcccaaagccctcaggaggtgctcaggggaggctagggatacagaataggattcaatagatgctggagtgctcgtgaggtgctggggatggagagaaagggttgtccgaagtaggtcttgctgagggtgactgtcaggggcagttctcctgaggggagggcagagaagccccctgccgagatagtctctctttcccccaaacccccactgtggtgagagcctgggaaggggaacctccagaccagagccaggcctgagcctgaatagagaggggaagggacgtggaaggaggggaaccctggcattgggcagccccaggagccctgaggggaagctcagagcccccgtggctactggcagccaatcctctgcgtgcccttgggcaggcccttccctgtggattggggccagtggggcagaagttgctttgctctagttgctctcaagcctagcagcttgtcacagtcatgggggagttcggggagcattggattcctggatccccagcaggttgataagactgtgagcccagggtctttttttggacacctagtagcctcagctggccactgacccagatgcctcgagtccttggttttcttctccagggagcgccccacccaccctgcagtcctctcaagcctgcttcctccgaggggaaccctgaggtatggggggtttggaatggaggcaggcaggatgtcagctttagcgtgcggtgactggatgggcaaacaggctcattcctgcagagttaaaaggtaagcgtcctttgggaagccaaggcgggcggatcacgaggtcaggagatcgagaccatcctggtgaacacggtgaaaccctatctctactaaaaatacaaaaaattagctgggtgtggtggcgggcacctgtagtcccaactactcaggaggctgaggcaggagaatggcgtgaacccgggaggcggagcttgcagtgagcagagatagcgccaccgcactccagcctgggcgacagagcgagactatgtctcagaaaaaaaaaagtaagtgtggaggcctttgggggcctctgggaagacctcctagagaggctcctggagcccaggtaggagctgatggggcctctggatgtgatgcatggcattatggaagggctgaggtgaaggctgagtctaggggggggtcctcaagttcatgagtgctggcttctggctttctgtctcccatctggaactcactttgtccatctgtaaagagtcatgcatttatttgttcatttactgaacctactggccatctccatgcccggcactgctagagcagcggtccgtctcagctgcacattggaatcacttggggagtttagagaagcctcataccccggcccacctcaggaattcagatttaattgaaattgggcctgggctgcccgagtgatgacaggtgcatt

SEQ ID NO: 10902 - DNA, 6000 bp, Homo sapiens; identical to SEQ ID NO: 2458

SEQ ID NO: 10903 - DNA, 6000 bp, Homo sapiens
agaaagcaggagaacagctccacatgggttgactttttgaaactttagctgtattcaagaaaataagtcgctacctgctttgtgaacgaagaaagaagagttggacactggaagaagtttctaggtatctcctggtatatataaggcagagaagagtagtgctgaattacagtgagaataaattaaaaacaaaaccatgtgcaacaatattcaggatgcataaatagaaaacatttaaaaagaagaaagttatcattttacaacttagcaaactcaacatatttttacatgataagtttctaaagtattgtatggggattttcagtcttcttcatgagtaagtttggttaacaacttcaagattttatcatcaatggcatctgaatcctaaaaagttaaaattctctgagccaggaagttttgtggcagataaagttataaacttctgaaaaaccgtcaaacttgtcagaagtataccaggaatatcataagattctacctgcacttttcaagctacttcacagcaacgctttattttctaaaaagtaataaaatagcacatgattatgaacactgcataaaatcatgatcactgaaatattccataattataataaaattgtttttaatttagtctacactcacaacatcttaaggaaaaaaaatatgtacctttgaaaatggttagcaatcctgtgatagaaagtaactgatcattcttaattaagtttcaaatgtactccttcacacagctgcacacacaatgtgtactaacctaattgttagttgcacctgctccaagttaacaatatttcatacagcccatggcaatagtggcatttttcaagtgttattctgtggagtgtaaatctaaactttctttcaatagtttatgacatgttttgtgccacccagaagtctaaagtacaaaataggggattttgagtttccttacttgaaaacaaatctgtcctttcagtctaaattaagttatattctttcatattttaacgtattttttcacactgagagatatcagagtaattttttccacatttataaaagaactctgattcaatcaaacattggggaaaacatgccaaaactttcacaagttgaaagttacaaatagtaaataagaagttaaaaacttcttgtcctataccactacatccaccattgcaaatgcagtgatgatttttgttactatctgaaatcttcagtttctgagtattaaggacagcaatgataaaaagaaaattaccttcttgagattatgagcttaagctctggattctgcacatggaataaatctgtttccagagatcatactcctttacgtaggaatcaccctaaaatctgaagttggcataaccatacaactcaaagattttaatttatgatatatatggaaacagtttttcataaaatggaagttttgtatgaatctctatggtatggaattctagtttcttgttttataaacggatctcctgatttttgagaagagtatatgtttatcaatacttgtagtctgccaaacattaaattaaatgtatatttaactaatttaaagcacagatatagaattctgacaggtaaatgtctctgaagaatctgcctctgtccctcaattgttaaatggtcaaaacaccgtgtctggtctgataataacttaataaatgagatcaccatatccacaataccaaaagccacctcatcctctcctaagattagctgcaaattggtacagatgtaaatattcccttaaatttatttaaaatacaaatactttgctccgaggactggagattaatgtttccagaaccttaatcaagtcacataataaagcaactgaataaagtttctaacttagagtctctttggccttttttcctgtacagttaccaaaaaaaagatgcccaaatgttacaagaacacatactaaacacttgagaagtaaacaaaactgggttaacttttatttcagtcaatggtacatgagtcataacttagtctagaaacctggtttatttgtaaaacaatctactcataatagcgcaaagacataaaaagtttttaaaaatctattgagagcaaaaggaaaacatacacacccacctattttttagtgcagggctttgcaactattaatttgcaaaagaattattttatttaaaatcaaataccgtatttccaaaaagcaacaattaccaagaatctctgaggtcctttgaggtgtgatcatttcaccctatcaaaacaattgcattttctttgtcctttgttttttgttctgcatctgcgttaacatggctgctaattatattagcctggtggcacataaagtctgaatgggaaaaatcacatgattctcatataatataaaaactccttaggattccaatgtacacttacttagattgtgctcttctgtattacagctacgtctattctgttagagaacttaattataattcagaatttctgtttcataagtgatggtgcaactctccaagacaccattgtatgtatggatgcatgcatgtactcaagagcatatgtacatacacacatatgtgagcacataaaaacacaaaggaacctttagctttatcattctactttgaatagatagcttccctactggtatatttatgtttttctaaaattaagttcttgaggagtttgtattcatcacacaaaatgtcatacagacctagtgcatacatttgccataagaaagccctattatattacatgattagaagttaaatcacatttttcaaattttaaatcgaaaagagcataagaatgatctacacacccactcattctcacatttttatgctttcacacagtgaatcagcaaatgtattctttttctgaataatatataaaaataagaatgttttgaaaacctttatacagtttggcagacttagcctaatgggttgtttaacaaagtaaactccctcattgttttggttagctttattattaagagtaaaaatccttcattgcaaaacttatatgaatctgtggtacagaaaaataaactggtttacacatcattgagaaactaccacattctgaaaattacatttatagttccatctttgtcttacaaccaagtgcataagcgcataaatcacagatcaaaatagacaccatcagataactttcaggggaaagaaaaacatcctaagacaacacacaacaaaaagcactgtttcagctaaatattaaacaaagcagcaataactaacactcatgggcttcacgacaactgataaacaagaacacttaaggaattcctctgccagtttcaatggcaaatccttgctcttttgaacactttactgattggacacttaaacatcttctgccttgtagtcacttcaacctttatgaaacagttgttgaaaacggacatgactattccagttaatttatactttctaaggaaatatatttaatgacaagtgtgagcaagtagctcctacctcaaattaaccacttagagtggtgtatttttcacctctcaactctctactcagaccctccttccattgcccttagggaattgaaattcagagacatgacgttttccattattggttccttgcccctttgcaactgtacaacattcctcaaaaagtacatagaattctccatcctataggatcagacaacagtatctatttcaggagcaataatatgcataatgtaagacagaatagtttttcttggaattgtctgtgttaattgtgatttaaaggttactggttccgtctatgacaatggtgttgctgagttcacctaagtatttttgttcaatctgcatactttaaaaactcaatgtggctaaaactcaaacagtctaaattagactgttgtaaggataccatgtgccctaaacagtggtttttttagagcattatacttaaagacaacattttccttaaaaaaagaaaaaaaacatgtctatgaagaaacaaagatactgcaaaattagtatagagaagaaaagtccaaaattccgtattcctctgtttaacaacctgtacggtaaattgtaggtgacaatcacgttgttacatgaataggaatgcaaagcataaagaacaagagctacatcttgcttttcctaaagaaattaaagacaagtttaacccgcacctgccaaactgtcttaaaagggacagaaataggtgggaacggaaaggctcacctctcctgtaccccagagtgcgtctccctgaaatcatcttcaatataggcaatatatctgtcaccttctcttttatctttttcgtccattctagtcaatggcagaccctttgctgcactcccctgcccactatctcaaagacacattacagaataaggggacccaagtgtcacttaccagttgcatgccacagataaagataagcgtgcacctgccactgcaataacccatggtttccgagacccctgccacagccagactgtcccacgtcggccaccgtcgagcccccactttatccaatcagatcgcggggaaggacacgcaaacctgccgagggctcgggggctccgggctgctgctgctgccagcgtcctgggaagtgacaggcattaggacctgctggcgcggcggcggcggcggcggcagctccagccgcgcccgccacacataccttcactcgctcggtgcacacgccgcgccgcgggcagtgccgcctgcggaggcgcgctcggggcccgcaggggcagcagcggcagcctggcagcgccgccgcgccctcgggcatctggcccgcgaagtttcgcccctgccgctctccgcgccgctcgcctcacgccccccagcgcggccgccgcccgacgcgcgctcgccctgcgctcgccgcgcgccggctccgggggcggcagaagcgcgcgagggccgctgcccgcctccctgcgcagcccgcggctcctaggcaccctgcgttgctgggcccggcgggcgggggtggggcggggagcggggcgcgggccgagcgggggcgtcccggctccgcggtccccggcggctgctgcagcggctgctgcgcgcaatgatgcgggtccgcgccgcgtcccagcagcggcgctgcccctcccttcgcccagatgtgtgaatcctcctcctacaacaaatccttcatcctgctccctgccgccccctcccagggggccaactttgaggaccgcaggggctgccgcccaggcggccgcaggcggcggtgtctaggcggaaaggagcggcgcgaaagcggcggcggcggggaccggggcctcggggcgaggagtctgggcggcatgaccgcggtttgctgagctgaagtcggtcgtgctcccagagccactccgcgggagcgaaccgagtgtgtgtgtgcgcgcgcgctcgggggagaagggaccaagaggagggttagggaaggaagctggggtcatggaacaggggtgcaaccgaggcatccagagcggccggaaagcccgagtggcggagaggccagaggtggcgagaaggggcgcggcggcaccggacgcaccgcccagcacctggctcccctgggctcccgaggatctgaagggtcggagcgcggagagctacggagccgaccctgcttggggaaggggaccgagttgctgctggagttgggaaaaattagcaaccggagggaatagggatgcaatgagttgctgttgctgcttcaaactgttgtttgttttcacttaaaatactaaagagtcggagactagtttaatactcagttacttcagcttcacagcagtcccagctgggtgtggattcctagtggagatgcaccagcctccgctgagcaccggcctgaaagctgtgaagcggctgctacctgcagagacaggcttcggagcccgctgctgccacctgcgggcggaaagctgaagggcgcaacatgctggcccaagtggctgcccctggggcgtggatatttaggaccaagt

SEQ ID NO: 10904 - DNA, 6000 bp, Homo sapiens
gttatgaacatatattttaaatatgaaaaatgtttaatacttatggcctaataaataacaccttcagatcaatcatgcactcgttccttcaacaaatatttgggctgccattagctgccaggaactgtgctgggctagggctgctgctcatctgtatgctgcacttgtgcaaactagaacagggtgccctccctggacagataaagcagggcccatgtctccaaatgcccacctcagctggtacccttgggtctggaggcttttcctacagtaacaaatgagagtgagtctctagggagttcagattctagtgagggggacgggcaaacacattcaattttcaacgttttctatatgactataaaaaatcagatttccacacaccacacttgttctcatgtaaatctccacctcattgaacactggttactacaatcatcaatttgaacttaggctgaggcatccacctgaggcaacagagatttctagacaggaaacaagcactatttccagattcacggaggccataaaattgactgcattttcaaagatcaccttatggtgactagccaaattgattttaccaaaaaacatttcaaattaatttatttgatttttaagtcacttctcccctacatacgcttcagaattttttttctgtaatggtaaatatttcataaaacaccatagtcagtttggaattatttgctttaatagttcttgtttttagcactactacattcttatctcctgaagtttaatataaaagataattgctattcaccattgatataacacgagaacaatacaaatctttttaaacaataagctagaatacacttacttttctactattaaaagtattcgcggttgatggaaaacacacacttttctgtctttgcatgaaatgtgtatcatatatatatttgtgacccactgcttcttcgtggaaaataactcagtttgcctctgacttctgcaagtaatggtctgagtgaatgcctacaattctcttcacttcttatcttgttaatctaactgatggagtggtacaaaaataaacctcaaaagaactatggaggaagagtgaaaaaaaaacataaaattcttaatgatccagttggcaaagaatatttaaccattactttcagattccttgacccaaatatggttcctattaacaaatagcaactttcagcctttaataccccatctaatggtttggaaggaatgcactgtaatttcgtcaaattcaattcattcattcaacagatatttattaagtatctcctgagagacaggaattgtgcaggactgctggaaatgagcaagagaaatagcgctcctcaccaggcagggtcaacatctaacaaacggccattcctgtcaccaaagagatactttgttaaaagatttacagcaagccttacttctacttaatgcaatgctttacctcttagatttctgggatgaatttgtttagttcgaggcatcttctttgactcagggccttctttttcttcttaaaaactgcagataaagcaagccaccaaaaggcagctccataaactcaacatacatcaattaatccatgtgctgaaaaagaaaaaaacggagaagcacattttactaccttcagaggagaaagatactttaaaagttactgcctagcagagcactaacctaaactcaagaaaaagtaaccaagctgggcaccactgcaaaagattactaacttttaattaaacagaggtcattttgtcagtatcgggacttctcattaagaaaacagaaaaaaaacaccgtatctttatcagacaagagtaaaaaaactcactttgtgttttaaaacaacaataccaggaacaagtaaagtatcgcatcaggctacaaaaggattatgttaggcatgtatagtaaatctgcccattcataggggcagggacaatgtcttgttcatcttgttttagagttaactcagttaatacaaggggttgctactgtggctactccagttattccagacctctaggttcatggtaggaccacactttctgcttccctgtgtttcccaggaacgtgtgaggagctgtagctaacgacctgtgagcggatgagacttcacttccaggctggagcatttagttattaccacagcatgatcctccagagctcttctctctctgccatgggatcagcactgctccagacagcaaatctgacaccaccacaaagtcagctctggctaacccacgtgatcacacagcatacgccagaaacacctttttgtttgcttaaataagtgaggtttgagagttatttgttactgcagcacaacctagcctgtcctgacttacagattttaaaacacagtgatctgaaatataataggccaagataagaatgacccaaaaccgaatcacctatctccccaaatcagccacctcaggctcttccacaagattctcaaggatcttaaagctgaaattttaacttactgcaagaaaactgagaagcaaagcccactgtcactgttaaacatgaaacaatgtttagtcattaagcaaagacacaagaatagaacagtaaggaaggcttaaagcttttgttattagtggtactgtagaagacaagagaacacttatgagcacctactatgtgcctgtgtactttctacacattccctaatttaatctgttaactaagaaggtagctatcatttattcattttacagattaaaaaaaaattggataagtaacttgtccaagataaacaactaaagaatgtggtactgcatgactcagttatatccagtgcttattttgtggagctgataacatctactttcaggatttctttcaagaggcgcagcaagtcatgacgacttatcttggtgtcaaaccggagtgggttcaaagccaggctttaccccttactgtgtggccttgttcaggttacttaacctctctgaagatcagatttcccaactgtaaaattaggaaatattatccacatcagaaggttgttataaggactaaactaaacattgtagacgctttgcctgtcacacaaaaacgctgaactattaattctccttaagaaagcctatatgggaaggaatgtgtctaacatcccagtataaggttttagaaatttatggtttcattacagcaaagaaacagaaggtaaagaaggccacgattaacttcagtattttatccctgatctggctgtatgtcagctcagcacaaaattatttgcaatttttaactacatggtaaaataatacaaaaaaaaatgatggtctaagtatttcatctagcattgtgctaagtgatctataaaagatagggtttctcagctccttgctctaaagaaacatccactatctaattcaggaaggttctgattcaataaagaattgagacacagctgaaccaaataaattgcatgaatgcttaactacgttcgttgttaaacttaaagcttttaaatggtaacgatatttggaagtttttaaagcgtgaactctgactgtaatccaatcatgtgatcccatgggatccggagcataaatgtaaaatatgcacattccctgtccgtaaaggctttctgctaccccgttcattgcctacccactgtccctagctgtccatcccatatttaaatccttgtggggggaagtgggtatttccaaagacagcagcattgtagcgactaggacgagtgataaaccgttcctttacgggaaagaaataaatactacatggagcaaaaacatgacacgatcaaaaagcgtaaagacagttgcaaggagaaaaaacatgaatgaatgtggagggcggagcctgggaaaacccctctgcaacgctgcactgaacaaagcgcttcgcatgccaggaggagggggggaatggaagtgccagctcaggaaggagcctggagtggatgcagagagctgaggaggaggaggacgagatgaggcgagcgcggcagccctgagactcctcctcgccgcctgctccgccgccgccccctcccctctccagccagcaactccttcccgagcccgaccccaaggcgagcccgagccgacccgcaccccaacccaccgcccccttcccaactgcagctggcgcgcactcccaacccggaaagaaactacccaggtggccgggagtaaacaggcacttagagcaaagaacgaaagggaaagaaacccacaaagccgggaggttgggatgccgaggcctggtctctttcaccccccaccctcttgcaaaatgcgtctgcggctggaaggcggctggggaggctgggtccctctgtacctgctcggctcgcgcgcggcgagggcgcccagaagtgccaagggtctcccgcacgcagccatcccctctgcaaggtcggcggttgcacacacacgcacacacacacacacacgcgcgcccgcacgccccccgcccgccgaagggatgtgctcctgcccccccccccctccgccccgccgccctccccagctgcagcgcccccgccgcggagcccgcgccgaacctgctgccaggacgcccggcggagccgctgccgctgcagccggccctggagctgcgctgctgatggcggcggccgcggctcgggatctccgcgacccccgcgcggcggcggcggcggcgcctgggatccctccttcacttgacaaccccaaacacaaacataacctcctccggcggccgccgctccccggtcccccgctccgtccgccaccctgccgccgcccagcagccgccacgctgaaggccggcgactggcgctcacaccacccagcactgaaatattaaacaggggagcgggccggggggcgggggggggagcgcggggcgcgcgggcgggggccgcagccgccgggcggaggaggcggcgaagctcgccggcgcccggagccacggcatgatcgcggccgccagggagccgggcagccgggctggggggcgcgcgccgcggcggggcgggcggacagaccctggggccgcggggcccggggcgggaaggacgggcgcgggctttacctctcccccggggcagagtagggcacgtttagcgtctttggggccggcgggaggaacgcgggccgggcggcgcgggggaggcagggcgaaggtcggaggctttcccgcgggtgggcggggcggcaggggatccccgggggcgggaggaggggaggccgcgggcggcgacgcgtgggcgggggagggggcgtccccgcgggggctggggttgaggccggggcgaggggcgcgggacgcccaggcgccggggcccagctgggccggcgcggccgccagctctgaccgggtgtagggactggatgggcgcccggcccggcacgaacccggagccagtgccccgggtctccccggcggggcgggccccagaccgcgccggccccgccacctacccgccgcttcgcccctccccgccccgcccggccgagccgccgcagggacgggagggggacgcgggaggaggtggcagcgcagcccgggggggaggggcggggttagggacgcggggggcgggagccctgggtcgcgacgcctggggaaccagcacacggcgggggcggaggggcgggcccggccagtcacgcggccccgggaaggcctggcggggtcgctcagttgggggcggttggtccgggaagagggacgggacgggcggggccgtagtttctctttaccgtctctttactttctacagcaggatgtgggccggccgctgacgtcatggggtctcccggccccgcccctcgcccgggcagaatgggggagggggaggcggggggggggggggaccccaagggggtttcctcagcaacgcgtagaaggaaggggaaagtcattgtgaaacttaaaactcattaactttgaaaaacaacttttaaaaaaacggagggggcagggtgttggtttggagagtggaaggggacatgttaaccctga

SEQ ID NO: 10905 - DNA, 6000 bp, Homo sapiens; identical to SEQ ID NO: 2439

SEQ ID NO: 10906 - DNA, 6000 bp, Homo sapiens
ttcctcacgctactcaaaacagcacacaatttaaaacttatgaattgcttgtttcaggaatttcccatttaatattttcagacctcagttgacttggggtaactgaaacttcagaaagcaaaaccatgggataagggagggactactctatagcatttgaagcctatccattaagttaacatcccacaaaccctctggtttaaatacccctgctccagaacatcacctcacctactctggctatcttcctaaattttaccatggcttgaaattatctcaatacgagtaggaagtaaactctaatataaacattatttaaatagtcacattccctggattaagcaggctcacggtttcaaattaagctaatttgtttcacgagcacattaccagtccataatcataaaataattgtattttttcatttctagagacctgtgctgtccaatatggtaactactggatacatgtggttatttcattaagttaattttttaaaaaattgaatttcggttcttcagttgtccacatttcaaatgttaaatgccacatgtagctagtagctaccacactggacaatatagagaacatcaccaagcactctatagggcaagactgctatagactttttctaaaacattattctaaagcataaaactgatttagctgatatgctggcagaattcaaccttataattttcaattctccatgtcactggttctcaaaatgtggtccctggaccagcagtggcaccacttacaaatctgttagaaatacaaattctcaagctccggcaatctgtattttgaaaagctctccaggtgattcaggagattttgaagcatgctcaagttttagtcactgttctaagttacttaagagtggttataatataagccatgacataagaaatctaccattacaatctgaaatattctataaatgatgcatcaactatgaaatcatacaaccacagtcctattatgatagattttaatacaaaaggaaaacaaaatattcttaacaaattatattaagcttcatttcttaaaaacaaaacaaaacaaaacaaaaaaaactattggccaggtgtggtggatcatgcctgtaatcccagcactttgggaggctgaggcaggcagatcacctgaggttgggaattcaagaccagctgaccaacatggagaaaccttgtctctactaaaaatacaaaattagctgggtgtggtggcgcctgcctgtaatcccagctactcgggaggctgaggccagagaattgcttgaacctgggaagcagaggttgtggtgagctgagatcgtgccattgcactccagcctgggcaataagagcgaaactctgtctcaaaaaaaaaaaaccattaaaaatgtaatttccttccccttctagtaagcaggccccttttcatttcaacatcaacacaatcacatttttatatttttctaagatttcaattaaaagcctttaatttaggaagaatatacacagtagaataatgaggaaggaaggcaatattttcaaattttatgtcaattacaattttcacatgagcaagtattacttttataataagctaataaaaagaaatctattagctagaattacctcagcaagaagttgaaactaaagttgcacaagtgttacaaaagaggctaaacaactattctactctaatttcctcttaccaatcataaatctagtataaaactatttgcaaaatcaacatctatgtatattaaatattccttattaaatttcctgacagaaaaacatccttagaaatttcagctaagaacagtaatgcaatacattaaagtgattatgaaaccaccgggaaaagatctatctagtcttggcttaccacaaatttggcccaaaaaaggagagactttaagagcctgattgattacaaatttctgccacagccaagtgcctactatgataacctaccggtggaaaattacttaatcacaatttgtgtacaaaatgtttcaggtacatatactgcaatagaaggcactgagatcatgttaagggatttcgtaaaaaatatttacaacatattgagcttatgtgccatccatgagaacccaaatcatacttcatactactgttgtagcacataaatgtccatttccaatcaagcatcattccataaaatgaacctgacaatgcttgacaaaatattgacatctaggctgggcgtggtggctcacacctgtaattcaagcactttgggaggccgaggcaggcagatcaccttaggtcaagagtttgagaccagcctggccaacatagtgaaaccccgtttctactaaaaatactaaaaattagccaggcgtggtagtgggtgcctgtaatcccagctactcgggaggctgaggcagaagaatcgcttgaacccaggaggcagaggttgcagtgagccaagatcacgccattgcactccagcttgggaaacaagagcaaaactctgtctcaaaaaaaaaaaatgttgacatctaaacattcaccatggccaggtgcggtggctcactcttgtaatcccaaaattttgggagcctgagtccaacaaattgcttgagtccaggagttcaagaccagcctgggcaacatagcaagaccccatctcataaactaccaaaaaaaaaaaaaaaaccctaaaaattagcctggtatggtggcaccactgtactcaggaggctgaagtgggaaaatcgcttgagcacagaaagcaggggttgcagtgagccgagctcacaccactgcactccaacctgggtgacagtgaaaccctgtctaaaaaaaaaaaataatcaacattctctcttaccaaacactaaagactcagtttccacattaagtattgtccccccaccaaaaaaaaatccaaaatgactaatatatcaagtaccggcctggcgcggtggctcacgcctataatcccagcactttgggaggccgaggtgggcagatcatgaagtcaggagttcgacatcagcctggccaacatagtgaaaccccttctctactaaaaatacaaaaattagccaggcgtgctggcaggcgcctgtagtcccagccactcaggaggctgagacaggacaattgtttgaacctgggaggcggaggttgcagtgagctaagaccgcgccattgcactccagtctgggctacagagggagtctctgtctcaaaaaaaaaaaaaaaaaaaaaaagtaccaaccatgtgccaaacagtactcctaatttctctcaattacctttgtctgtctagcacagatttaggcatataacggacatttaatgggcatttatgaaaaaaagggatgactgttaaattcttagagaaaattcaaaaaaaaattttttttttgaggcggagtttcctcccttgttgcccaggctggagtgcagtggcaagatcttggctcactgcaacctccccgtcccgggttcacgcgattctcctgcctcagcctcacaagtagctgggattacaggcaggcaccaccacgcccggctaatttttgtatttttagtagagatggggtttcaccatgtcggcctggctggtctcgaactcctgaactcaggtaatccacccgcctcggcctcccaaagtgctggcattacaggcgtgagccaatgagcccggccaaaaaaaattttttttaatggtgccagccgttaaggaaattacaaatcgagttgagaaataagacaaacacatgaaaagctaagtaacacaggacaattaaaaataccatgtgacaagatatgattactgcatagtagcgaataatgctataaattctgaccagtgagtttattatagactgcggcccttgtagtctcccaacaaaacggggacgctatatttcgatttaaaaaaagaaagtgacacagcactcatcctatcctaaaattatcatcagaagaaggaatacagtaactaaggagagtgatataaagaaactccacataaggtttttaaagcctatggtagccctgaaaaaagttagaacatcagacacacaaccctctgctgatccaggacctgcaaaggctcctgaaatacaagtctctcaggaacagcatcccctgttctttctccgccccgcacggagctttccactggacagccgcccgagaaatttctcccagcatctgcaatggcaatactctcatcttcctcccctcgcctgtatcagacggtggcatctccctccaggggaaaaaacggagggcgggggaggctgcataagagggaaagcttgcagcgaggttgattatggaggaggaaggtgagaaaaatgcaggggacgagggtggggtctcctgagcgccagcccactctccataaggcctagcccacacgctcccaccccgaaggcacgcccctcacaagccggacccggacgcggacctgagtgacagcagcatcacctgtactgcactccctcccccagggcctgcagggagacgactgcccctgcccccaccagcagcggcccctggctctttctctccccttccagtccacgtcgtcgacgagtgacaggtcccgagggaggcgactgcaagcgcacgccgttcgggactaccggggcaactctgcgccgaagccctccaacaggcgcgcggggacagacagaacgttccggacggcccagggggacccggtccaggcccagcctgccccagctgccctacaacgggcggaggtggcacttactgcggagattgtggattagctccgagtggctggcgccgccggatttccaggccatcgctaagcacactcggagcaggtacagaaccaccttcagcgcgacgacggtgcccagcagttttcccaagagtgagaccacctcccacaccgtcaccgccccgctcgcgtccccgctgtagctgccgctgttactgccgtcgccgccgctgccgccactgcgcgctcccggcatcccccgcggcacgcatgcgctctgtgacgccgcgcggcttagggtgcggccgggtggggccgagggcgggggaggcgtgtggcccagccgcccgcccctgtggctgctaccgctgccaggggactgcagggaggccgggctgagtcagcgccacttccgctgctgcgtgtccctttctgaggcctcggaccgcaccgctttcgccctgcggcccggctcggtagcctgatcagtcgcgttcccggctgtgtctccggtcaccgagcgggacggcgggatggcggggtcgatctgtgcagacgctgctagtggttccgcagtcgtcgctgggtcagctgtttcgagcggcggatctgctcctatagatgtccagattgttagacggtgggcttcatccgtcctacctcgcccaacccagttgactaatatttgggtcggtggagcccgaataatacaataagaataaaacccaacgacaaaggccctctctaacccgagtacaccggcctctggctttgtgacaagcacgtcactgttaggctaagcagagactttggaaccccggttctaaagctctcagagtggaagagtaccaggacatgggggtgggggttggggcaaagctttgctcccttagaataataccaacgtacagagttgcgattggttaaaaaataccactgtgtcctttggtgaacgtgttattctcccgacgtaagtgtgcatttccacctaattaagcctcacaaattccaccgtggctttattgctctcagctctgcaagaccatgagtgagaagctcactgagaacattgcttgtcgcgtccaaatcgctgactcctaattagacctgagactgacagaatccagccatcatctagtccagtaacttttttttttttttttttttttttttttgagacggagtctcgctctgtcgcccagactggagtgcagtggcgcgatctcggctcactgcaagctccgcctcccaggttcaggccattctcct

SEQ ID NO: 10907 - DNA, 6000 bp, Homo sapiens; identical to SEQ ID NO: 2440

SEQ ID NO: 10908 - DNA, 6000 bp, Homo sapiens
ttgcagtctatccatctgacaaaagtctagtaatcagaatccacaaagaacttaagcaaatttacatgaaaaaaaacttcaataaaaagtagacaaagaacttgaacagacacttctaaagaagacatacatgtggccaacaaaaatacgaaaaaaagctcaacatcgctgatcattagagaaatgcaaatcaaaaccacaaatgaggtaccatctcatgccagtcagaatggcaattattaaaaagtcaagaaacaccagatgctggcgaggttgcagagaaataggaatgcttttacactgttggtggaaaagtaaattggttaatccattgtggaagacagtgacaatgtggtgattcctcagagatttagaatcagaaataccatttgatccagcaattgcattacagggtatatacccaaaggaatataaatcattctattataaagatatatgcatgtttacattcatggcagcactattcacaatagcaaagacatggaatcaacccaaatgcccatcaatgatggactggataaagaaaatgtggtacatatacaccatggaatattatgcagccataaaaaggaatgagatcaagtcctttgcagggatatggatgaagctggaagccattatcctcagcaaactcacacaggaatggaaaaccaaacaccacatgttctcatttataattgggaactgagtaatgagaacacatggacacagggagaggaacaacacacactggggcctattggggcagggtggtggtgggaggatcattagcaaaaatagctaatgcatgccagggttaatacctaggtgatgagttgacaggtgcagcaaaccaacatggcacatgtttacctatgtaacaaacctgcacatcctgcacgtgtaccctgaaacttaaaaaaaattaaattaaaaaacaagcttaaagaaaaagacaagctgaaagagttaatgaaaaataattagataaaagaagtctttgattttcaaaaacctgaaacaatagttataattttgcttttaacatatattcaaaacatttgatactgttcccttccagaggtgcatcttaattccctctcctgagtgtggcttggacttaatgaggcacttctgatatggcctggttctgtgttcccacccaaatctcatcttgaattgttatgcgaattgtaatccctacctattgggggagggaccacatgggaggtgattggataatggaggcggtgcccccatgctgttctcgtgatactgagggaattctcatgcaatctgatggttttataaggggcttttccctgcttcattctgcatttctctctcctgtcatcatgtgaagaaggatgtgtttgcttccacttctgccatgactgtaagtttcctggggcaggctcctcagccatgcagaactgtgagtcaattaaacctctctcctttataaattacccagtctcaggtatttctttatagcagtgtgagaatggactaatataacttctaacttacagaataatgctgacataatggtttgtgactctgggtgtagaacctaaaactcactgtggcttccaccttctctctctctgtctctgggatcatgagctctgggggaagccagctgctgtgccacaagcagccctgcaggaaggtccatgtggctgagaaccgaggcgttctgggaacagacaacaaagaactaggccttttccaacagccatatgactgatccatgtttcatgtgaatcctcagccccagtgaagccctcagatgatgcagcccttggctgacaactgtactgcaaccttgtgagaggccccgagcaagaagcactcagggaaacctctcctggactcctgaccattggaaactgcggcagatgaggaatatttgttgttttgagctaagttttacataatttgttatgcaatagtaaataaataatacactttcacaagagaggatgtattattacacattaaattgcatttgctttaaatgtatcatcgtcatcattattatttttgagacacggtctcgctctgtcacccaggctggagtgcagtggcatgatcaccatgtactgcagtgtcgacctcctggggtcaagggacccactgatctcagcctcctgagtagctgggactaccgtcatgaactactatgcctggctaattttctaattttttgtatagatgggggttttgcccaggctgatcttgaacttctggagtcaacaaatctgccttcctctgccttccacagtgctaggatggcaggcatgagccaccatacctggcgtaaattaattataagatattaaacacgtaacttagttttaaaaggtaaggagaatttccatggctgaagaggatgtattttatgaccattcacaatgatcactttacttgaacttcaatttccaactgtgtccgaagtaaacacaaaaggaagatccaacccttgctaggctgattctattatgccctcaacaaccagctcctggtcattcaccatcctccagttattcaatcaactctaatgtaggtgctgctgtgaagggagttagtggatataattaagggtctcaattagttgactttaggctgggtttatcctgcttggactgtcctaatcaggtgagaccttgaaaggactgggttcttcctgagcatagagactcacagtgtgagagggactcagcatgaggggtttcctccagcatgggctttgaaaatgaaggggctgtgggccaggtgcggtggctcacgcctgtaatcccagcactttgggaggatgaggcgggcggatcacgaggtcaggagatcgagaccatcctggctaacacggtgaaaccctgtctctactaagaatacaaaaaaaaaaaaaaaaatagccaagcgtagtggcgggtgcctgtagtcccagctgcttgggaggctgagacaggagaatggcgtgaacccgggagccatagctggcagtaagccgagatcccgccactgcacccaagcctgggctacagagcgagactccatctcaaaaaaataaataaataaaattaaaaatgaaggggctgtgtaggaaagaatgctggtgaggaccaggaatcaagcacagccctccctgttctctacattgacagccagcaaggaacagggacctcagtcttacaactgccagaaactgcattctgccacctctgtataagcctgaaggaggattcaaaatgaaaacacagcttttggaagcccagaagagagattccatccacattttgcccagatttctgatcaaggaactataagcagataaatgggtgttgtttcgccaggcgtggtagtgcacgaatgaattgatgaattgatatgcacactagttacataaaataaaatctttctgaacttcttccgtgttttgcactttataattatctgtaatgcaatttaatacactcatatttcattcattcagtcgacaaaaattaatttagtccctacgataaaccagatatcccctcatatgctcacgtgcctgacactccagaagtttcacaagaccgaggtggagacactggagtgttttaagtggagagatgacacattctgactcccaggagcaggaccactgtgaaaagaacagtcacgtaacaggtcatgggacagtgctagtgtcacaattcacaagtgacagtgtggtggggactaaggggacaggacggcctgaaggatgagaagaatggagggaagggttggagaagcaggaggtgaagaaaaggagcagaggaaagaattcgaaagcagcagaattcttaggtttaaatacattgttttatggattttaatacatccatctacagagccctgcaggatgtccttggcagttggcctttaatactttatgtgggtctgcctaaaaactaattttttaatgttaatcaggtttaaaaattactaagtgttcctataaaatatacacaacacttagcagtggatacttcctaaaaacagacagtgcatgagcactagtgaggggcattgcgactacattgaacagttgcaactttgaggtgaataaagcctgtactgactcctggttgtaacgtacctggttgcaaagtacacagtgtgctactttgtattgaggagatatcctggactcacacagaaactcaaagctatggaatgatggcaaatttaaaatatgacaagcgggagtcacaggtacactgcaaaagtgaaacttagaagctttgtgagtcctgttgtaacgcttttgggcacatttatacatcatggggccaaagtcacattttttaccgattagattcctgatcattcaggggttaccaaggttctgctatccaatgtatttaataaacaaataaataaataaactggtctctattctgtctcatgcactcaggcacaacttttcccaataaaaaaaaaaaacaaaaaggaaaacaaaaaacagtttctacacctccattcccagagcaagctcactctctgtcaccaaactccgtgggtgagttttcttctagaagagtccaggtggacagggagtccagttcagggacggagattccgggatgaaaagtgaagggagagggacagggcccatgccgagggtttcttcctggtttctcagacagctcctgggccaagactcagggaaacactgagacagagcgcttggcacaggaggagcggggtcagggcgaagtcccagggccccaggcgtggctctcagggtctcaggccccgaaggcggtgtatggattggggatgccccgccttagggattcgccacctccgcagtttctcttcttctcacaacctgcgacgggtccttcttccttgatactcacgaagcggacacagttctcattcccactaggtgtcgggtttctagagaagccaatcggtgccgccgcggtcccggttctaaagtccccacgcacccaccgggactcagattctccccagacgccgaggatggtgctcatggcgccccgaaccctcctcctgctgctctcaggggccctggccctgaccctgacccagacctgggcgcgtgagtgcagggtctgcagggaaatggtcgggaggagcgaggggcccgcccggcgggggcgcaggacccggggatccgcgcagggaggagggtcgggccggtctcagctcctcctcgctcccaggctcccactccatgaggtatttctacaccaccatgtcccggcccggccgcggggagccccgcttcatctccgtcggctacgtggacgatacgcagttcgtgcggttcgacagcgacgacgcgagtccgagagaggagccgcgggcgccgtggatggagcgggaggggccagagtattgggaccggaacacacagatctgcaaggcccaggcacagactgaacgagagaacctgcggatcgcgctccgctactacaaccagagcgagggcggtgagtgaccccggcccggggcgcaggtcacgacccctccccatcccccacggagggccgggtcgcctcgagtctctgggtccgagatccaccccgaaaccgcgggaccccgagacccttgacctgggagaggcccaggcgcctttacccggtttcattttcagtttaggccaaaacccccgcgggttggtcggggcagggcggggctcgggggaccgggctgaccgcgggggcggggccaggttctcacaccatgcaggtgatgtatggctgcgacgtggggcccgacgggcgcttcctccgcgggtatgaacagcacgcctacgacggcaaggattacatcgccctgaacgaggacctgcgctcctggaccgcggcggacatggcagctcagatcaccaagcgcaagtgggaggcggcccgtcgggcggagcagctgagagcctacctggagggcgagttcgtggagtggctccgcagatacctggagaacgggaaggagacg

SEQ ID NO: 10909 - DNA, 6000 bp, Homo sapiens
ccagcagcattcctctgttttcccttttgttgtttgccagttaatttctattcactggaaatgccaattttccacatgctattcaatgtggtgtgcttgtttgaaaagaagcaaagaaaaagcactaaagatgctaaggacttaactcattcctcccttctctcctctcctcctccctaacaagttccctttcttccaggcttagtgagaaacaaaagcagactcattcaacctcaaaacttgaacacatgccaggtgaaatattttagtgaggcttatcctcaacttggtcatactgtataggtgggcctagttaagtggtttttgttggctactctgctttgcgtcacaccctctgtgtcaaagtggagctcagcaaagtatatatataattacatatatatatatctgtattttatatatacacatacatatatcattttagaaattgaggaaacatttcagtaaaaattttatctacaatgaactaatttgatctttactatatatagtatatacacacagcagcttatatatatccttattatttttccctaattaagtaagctggaaaaaaaagtgctggttcacttgctctaggacaggtttgaaagtcagatagaaaacaggagtataaaataaaactttcagcttgaattattttgcctgtatcaacaagtctctcggcctctggaagaacatggcaaagttatgcaaatagcagaatctaagcaattcttacgtaaggttcatctccagagtcacttacacagcagagtattccttgctcagagttggcaccaattaggagcagttatcagtatacaatacataaatacaccttagcatgtttgctaataaaaagagcctaaagaaaactgtggaatgcaaactttcttgtagattgtgggtgattcgcagcaaaggaaatccaaatattttgggatataaacatgttccacatgttccttgtgtgttaggttaatggggatgactaaagattggttattactattatatacttggtaatattttaggagtagatatcagcttcaagatcagctagttcaatcctttcattttacagatgaaaaaatctgaggccagtaagtgattcatcaaatatcacttggatagttaacagcaaggggggaattttaatgtggttttcctgacagccaattcaactcaccaaactcctggttctacttttcatacggaagaaatgtttcctactgatgcaagaggtgtaatgatataccacagtccctacctttaaagaaagaataataaagaaataagacaaattttatgaaagcaaatgaagatataaatttccatggggttcaaaggatggagaggagaatttttccacattttctcactactctaaatcgtaatgattcttttttcacaaatatgatagaggagacacctgaaaaggacctcagaaaaaaatccatcaacttcatcaggtgttgggagaaaagctgagtgttgggaaaagctgagtcagggcttgcatgtctgacataatgtaaaagagtcttggaacatgtccggggtccagggtctaaaacccctgtggcctttggaacaccaagctctgtgctaaagggtggaaggctaccctgacgcaccataatctaagcccagggcataaaacccctcatggcttggattgaatccagggctcgtggcctctggaatgtgtctagacttgctggctccttgctccttgctcccccaggatccattgtatcttgagttaaaagaacctgctctccattatctcaaggagcgagcagatgctaaaccatcacagctgtaaatcatgtgcttaatgcaaccctccctttcatccccacattctcaccacctgtttctttgtttgatcaccaataaatagtctaggcttccagagctcggggcctttgcagcctccatacttagcgatggcctcctggacccactttctctctcaaactgtcttttctcattcctttgactctgctggacttcgtcatccccacgacccggtgttgagtctgatcacccaacatcatcaggtagctatccaaattaagggtgacaaactcatgccttaggatgtaggactcttcagagcatgaggtttactcattgaagaaagaaaggtaaaactgatgttactatgaaacagtactctattttaatgaaatgcctattttgttaaaaactctaaatgataacaatgtaaagcaatatctctactttcaaaccaccaaaaataataggaaaacatactgtataatggagccctttgttgattctgtattctattattatattggtcacttttggataaaatcttgtgacttgtgcccttaaaaatgttttacatacttgaatatataaacttcattagatttttgtagattaatgtttccaaattgtcacagcatatttaaattaataatttaaaaaattaagttcacatttaatcaactttttcttacccctgtaaatttagaattagcaacaaattttataagcaaattcttaactctgtaattcaagtaatcaacagagatggtgaatgaaaatcacgaatatcattagtgaatcccacattatttcatattgatagttcatctttagacaggacatttgatttaatcatttatccaagcaaaaggactatgattaagagcactttttctaactgactttaagagcatgtcttatcactatatattgaatattcttggaagtgtagccctccaagcactagaaagtacacaaaatgattgagaaaaaaaattaatgctaccattaataaatttttcatctaatgaagagatacaattaatgtaatatcaatgtgagtcatctaatgaagagatataattaatgtaatatcactgtgagtcatatgcgaaagttaacccaaacactgttagaaatgagattgtacctgagagactaatcagtcctgtccagatgcagagcaacattaaggaacaatcaaagcaaaaagaagccagcttcaaagggaagggaaagtctatattaatgcaaatgaaaaatgaactttaattttgtgaatctttatattcatgtttattaattggttgctagaggtacagcctagacaatattgtacattaaataatactcaacacggggattatctttttgagtttaatattcattttcataaattgtcaaggcactgtgatgaactcaaactcctaagaataaacaacttctcatgaagggggcttaaatacatctatcacatttaagatgagaacaagcagattaccccagagacaatgagaacattgagatgagaacaagcagattaccccagagagaatgcagcagtcaaagacaaagtgtggaataggcagaggcaatattgtgcaaaacacattagaggaatgcataagtactacaaaaacttctaagaaaagaaatatcaaagatgccatcctcaaagactgcatgtgggagaaatacctaggcaagaactaagaatctcataagaaatgcctgaaataaaatgtgaacatctctgcatggactaatcaatacagaataatgtaccactcgagaggatgcatatgagactgatactgtttttgctgttctgatactggataaaaattctcacctattctttagaaaaggaacaggcattgaaattctgatgccttcaatgcataattaagtttgttgcaaataacgttataaaatcctgtttatgtttctcattatagaatttggttgaatatttctcagcacatctctttaatcattttattgttattgttataatatgaataactgaattggtagatgataatgtgttttagagattcagagtcacatccaaaattatttgaataagcgatttacaaaaaaactaaatatggataagtaccataaaaatgtacaattctcgtcagattcaaataatgtaaattaacatgagatgtcgattttcaccttacaaaatggcaaatatgttttaaaataagagcaaatttgttaagattatatgaactgctgatgaatatgtaaatgtgcacaaccattctggatattttaaatcaaaataatatatttaaggaatataaagtattgtattattatttcttattgcaatatactatgtagcctgatttatgctgggagaaatatttaaatgattgtatattcactcatttctcctttcaacaaatatttactaagcacctattacagacttcacgctagatgtgcaatgaatgaaatatgtcctcatgcatataatttatatttgaaattaaatctgatgaatattgaaagatgttttgttgtatgaagctgtaagaacatattataaaccttatagtgtgaacttatatatatatatatagcatatttatgtatatgagtaaaaaacagtctgaaaaaatatgcttagaatttaatgctgataatgtatatctagtgaaactaagggcatttgaatttgtttttctttatgtttattagtattacctaattttctgcaataaatatgtatttaaaaaataaactgtattttctggtaagacaagaagccatcctttatagaggcctttaaggcttactgttatctgagttggctataaaacataacatcagagatttattttgttgaatcatattcctagaatcttcatttaaaagcaagatagtggaaaatgaattatttttacctgttgagttagctacacagaataataatttgaaaatataatactatttaggtttattttctttttaccattacataatactttctaatgaagttatttgattctaataatcttgtaatgtgttcaggtcacaggtaattatctgtattttacaagtgagaaaaactaagactttggaaaatttgagtcttttgctcacaggcccaaaggaagtaagtagtgaggcaggaattggaattcagatcttctgaaagtacactttctatctatgtatggtgtgtacaaaggtttttaacacatggaaagcctgctgtcaaaattaaaacataatgaaattccatttggtttatgatgtgtccttttccatttggtttataatgtgtccatggccaaatgataataagtccttttcccaactgcttatggtagaaataaagcatctctttaagagatcattagttgagcttcttaataaaatgcaaagtgtttaaaaagtgggaacgggagtatttccagtacttgtgaaatgcttaagttttgagaatttgacatatgtgcctcatgaaaaatttttccactcccaggggaaggccctggttggtttatgagtgggcatgttacctaaaaagtttcaattagggtgaatctcagaactctcgtttcaaatgccaggatagaagcttccctctcctcctccagaccttgtggtgtgcacgtgggagtccagggactagaatactcattttcaaagcctgacattggacccgggagacagggaaaaaccatcctcaggaagtcacagtgagttccttgatttagttatacaaccggtatgtttcctttttttttaagccatttaccatacgataatctgacccttataacgaacagtattccaaatgacattatccttataaccttctgtaaagttcttagcctgatccaaactttgtgatctgattccttcctgcttctcttgctttgtgactcgtcatcttcccatactcacctttttctccagatgtgaggtactgtgatgatgtgaacattgtgctgtttcagatcttcacatatagacttttgtatgcgtttgtccctcttctaggaatgtctttgttccctttcttggtctaattctatttatccttcaaaacctttcttctatgtgatgccccaaaaaagattttctgcaacatctcctacctgacataactgtccctcctatgtatgtctatggcttatctttcccgtagtatttatcccattgttt

SEQ ID NO: 10910 - DNA, 6000 bp, Homo sapiens
atcttgaattgatttttgtataaggtgtaaggaagggatccagtttcagctttctagatatggctagccagttttccctgcaccatttgttaaatagggaatcctttccccattgcttgtttttctcaggtttgtcgaagatcagatagttgtagatgtgtggtattatttctgagggctctgttctgttgcattggtctatatctctgttttggtagcagtaccatgctgttttggttaccgtagccttgtagtatagtttgaagtcaggtagtgtgatttcttttggcttaggattgacttggcaatgcaggctcttttttgttttcatatgaacttttaaagtagttttttccaattctgtgaagaaagtcattggtagcttgatggggatggcattgaatctataaattaccttgggcagtatggccattttcacgatattgattcttcctatccatgagcatggaatgttcttccatttgtttgtgtactcttttatttcattgagcagtggtttgtagttctccttgaagaggtccttcacatcccttgtaagttggattcctaagtattttattctctttgaagcaattgtgaatgggagttcactcatgatttggctctctgtttgtctgttattggtgtataagaatgcttgtgatttttgcacgttgattttgtatcctgagactttgctgaagttgcttatcagcttaaggagattttgggctgagacaatggggttttctagatatacaatcatgtcatctgcaaacaggtacactttgacttcctcttttcctaattgaataccctttatttctttctcctgcctgattgccctggccataacttccaacactatgttgaataggagtggtgagagaggacatccctgtcttgtgccagttttcaaagagaatgcatccagtttttgaccattcagtatgacattggctgtgggtttgtcataaatagctcctattattttgagatatgtcccatcaacatttttaaagaaaataattttcaacccagaatttcatatccagccaaactaagcttcatacgtgaaggaggaataaaatcctttacagacaaacaaatgctgagagattttgtcaccaccaggcctgccctaaaagagctccagaaggaaacactaaacatagaaaggaacaaccggtaccagccactgcaaaaacatgccaagttgtaaagaacatcaaggctaggaagaaactgcatcaactaacaagcaaaataaccagctaacatcataatgacaggatcaaattcacacataacaatattaaccttaaatgtaaatgggctaaatactccacttaaaagacacagactggcaaattggataaagagtcaagacccatcagtgtgctgtattcaggaaacccatctcacgtgcagagacacacataggctcaaaataaagggatggaggaagatctaccaaggaaatggaaaacaaaaaaggcaggggttgcaatcctagtctctgataaaacagactttaaaccaacaaagatcaaaagagacaaagaaggtcattacataatggtaaagggatcaattcaaaaagaagagctaactatcctaaatatatatgtacccaatacaggagcacccagattcataaagcaagtccttagagacctagaaagagacttagactcccacacaataataatgggagactttaacaccccactatcaacattagacagatcaatgagacagaaagttaacaaggatatccaggacctgaactcagctctgcaccaagtggacctaatagacatctatggaactctccaccccaaatcaacagaatatacattcttctcagcaccacatcacacttattccaaaattgaccacatagttggaagtaaagcgctcctcagcaaatgtaaaagaacagaaattataacaaactgtctctcagaccacagtgcaatcaaactagaaatcagcattaagaaactcactcaaaactacgcaactacatggaaactgaacaacctgctcctgaatgactactgggtacataacaaaatgaaggcagaaataaagatgttctttgaaaccaatgagaacaaagacacaacataccagaatctctgggacacatttaaagcagtgtggagagggaaatttatagcactaaatgcccacaaaagacagcaggaaagatctaaaattaacaccctaacatcacaattaaaagaactagagaagcaagagcaaacacattcaaaagctagcagaaggcaagaaataactaagatcagagcagaactgaaggagatagagacacaaaaacccttcaaaaaatcaatgaatccaggagctggttttttgaaaagatcaacaaaattgatagactgctagcaagactaataaagaagaaatgagagaagaatcaaatagatgcaataaaaaatgataaaggggatatcaccaccaatcccacagaaatacaaactaccatcagagaatactataaacacctctatgcaaataaactagaaaatctagaagaaatggataaattcctcgacatatacactctcccaaggctaaaccaggaggaagttgaatctctgaatagaccaataacaggagctgaaattgaggcaataatttatagcttaccaaccaaaaaaagtccaggatcagatggattcacagccaaattctaccagaggtacaaggaggagctgttaccattccttctgaaactattccaatcaatagaaaaagagggaatccttcgtaactcattttatgaggccagcatcatcctgataccaaagcctggcagagacacaacaaaaaaagagaattttagaccaatatccctgatgaacatcgacgcaaaaatcctcaataaaatactggcaaaccgaatccagcagcacatcaaaaagcttatgcaccatgatcaagtgggcttcatccctgggatgcaaggctggttcaacatacgcatgtcaataaacgtaatccaatatataaacagaaccaaagacaaaaaccacatgattatctcaatagatgcagaaaaggcctttgacaaaactcaacagcccttcatgctaaaaactctcaataaattagtttggatactttctgttgctgttgttgagacagggcctcactaggtgcccaggctgatctcaaacttccagcctcaattgatcctcctgcctctgcctcccaaaacgttgggattacaggtgtgaacaactgtgcttgaccttaaaattttttatagatatttcattgttattgatttcccatttaatccccttgtggtcaagttctatattatttcctatttgaaatttattaagagttatttaacagcccataaaattatagatctttgtgattgtttcatgcccatgaatttggcctccaccaggtcaaatgatttacagtgtaatacatctcttctatattataatttatctttgcctatttattatattaattatataataggggtattaaattctataacaataatcttgaatttgtctaatttttttcttagtctgtcaaatattgctttatgtatcttaaaggtctgttattacgtgcttaccttttactggctcttttatctctactaactttggtctgtccacatcctgacatcctttaaggaagtgaaaaataaaaagcttctattttgctttaggcacttttcttttgggtttttctgtaatatgtaatcatatctaatgctaaatgatacaaatactatgacaaaaaagtacaagacaccgtgaacatgtgtgtaacggggatctaaccttgttattggagtcagagttttcctaggtcatacatttaaggtaaagtgggtattagctctagtcagaggttgtgaaagagtattccaagagggagaaagttatgtgcaaaagccctgagtcaagggaagcttggctctttggagaaacagaaggaggtcctgattagcttccctgtatactaaaagcagaagtggtaaaggaatgataggcattctagatcacactttcattaggcaagaagaaagatttacaatgttctaagcttctagatgtggaggctttggagcttcctgagagtactagaaatattaagagattttaagatgagaaatgccatcatctgacatgcaattttaaaagatactcaaagtactgtgtgagaataaattgtaggaggaaataaatggatgcagagagatcagttaaggggtgattgaggccaggcacagttactcacgcctataatcccagcactttgggaggccaaggcaggcgaattacgaagtcaagagttcgagaccagcctgaccaacatggtgaaaccccatctctactaaaaatacaaaaattagccgggcatggtggtgagtgcctgtaatcccagctactcaagaggctgagacaggagaatcacttgaacctgggaggcggaggtcgcagtgagccaagatcatgccactgcactccagtctgggtgacagagcaagactgtctcaaaaaaaaaaaaaaaaaaatgaggtgattgaagtttgaagtgtttaaggtgggagagaaatgatggaattttcggttaaattatatgcagtagagctgagggaagtggaaaaaatcaagatatattttgcaagcagaattaataggaggtggtcatgaattggatgtgtgttggaagggagaatattataaaatgtcattgatcacttttggcatgtgtggaaatagggaaatatgaaagaagaacagattgtgggagggggggagataggtttttaacatgttgattttcaagatgcctgagttacattaaagagaaccacacaagctatgagatacatgagctggaaagaagatctaggttgaacacatatatctgagagttatgaatgcagatggtaaccaacgctatgagagtgcatgaaataatttaggcagggctctctgctcctcctgtttgacagacagctgcatcttctcttgcattgccaaccacatccctgagacaccatggggaaagtgaaggttggagtcaatggatttggttgtattgggcgcctggtcatcagggctgcttgtaattctggtaaagtagatattatcgccatcaatgacccattcattgacctcagctacatggtctacatgttccagtatgatcccacccatggtaaattccatggcaccgtcaaggctgagaacgggaagcttgtcatcaatggaaatcccatcactatcttccaggagccagatccctccaaaatcaagtggggtgatgctggcactgagtatgtcatggagtccactggcatcttcaccaccatggagaatgctggggctcacttgcagtggggagccaaaagggtcatcatctctgccccctctgctgatccccccatgttcacgatgggtgtgaaccatgagaagtatgacaacagcctcaagatcatcagcaatgccacctgaaccaccaactgcctagcgcccctggccaaagtcatcactgacaactttggtatcgtggaaggactcatgaccacagtccacgccatcactgccacccagaagactgtgaatggcccctccaggaaactgtggcgtgacagccacagggctctccagaacatcatccctgccactactgggctgccaaggctgtgaggaaggtcatccctgagctgaatggtaagctcactggcatggccctccgtgtccccactgccaacgtgtcagtggtggacctcacctaccatctggaaaaacctgccaaatatgatgacatcaagaaggtggtgaagcaggcatcagagggccccctcaaaggcatcctgggctacactgggcaccaggtggtctcctccgacttcaacagtgacacccactcttccaccttcaatgctggggctggcactgccctcaacgaccactttgtcaagct

SEQ ID NO: 10911 - DNA, 6000 bp, Homo sapiens
ccctattctagttcttttctgttctgtcccctgtgccatgacatcccccaaccaacttgagttgaatccttcaacctttgcacacagataaccccctccctctgcatctcacacaggagaccctacattacatcaatctcatcccacatgctccagcccctgtaccggtcatggtcagcacttcggaagcgaggcaggatctggcgaaagctgctggtccggtcaagtttgggttgtgacttcgttcgtttgatggagctttttagccgtcggctcaggaagccttgctgggggggaaatggggatggggtgggttggggcagggtcagttctacctactcatccctcagctggtagagagcccctggatgaaagtgggatggggaaaagggaagtctccagaggcgaggaaagggggataggaaccctaataccagtttgtcttccttgctcccacgggtacagtgcaagcacacacacacacacatatacacacacacacagcttggagaaggtgggagggctggtctcagaagcaggggggcagagccaagaagggggaaaccaaagaggtggggagacacacacagacacacactctttttctcactctcactccctctctccccctcctgccctctttctcagactcctagggccccagttggggctggaggggagggggcccaactgagccacatctggtaggcaccactcaccgagggccggaagggcgcagcaggggcaccctccatgctgtactgcttcccccctgggacactcttcctcctcgagcgacccaagtggtattctggaggggaggaaatggccagaagggaagttggggagggggccagaagggaagctgttaacccaggttcccacccctgaccccagtgcatgcccccacctccctctgcccctcagctccggcctcacctaccccccggaaagcagcaggaagagcagcgacggcggagaggctggcagcgggaaggagggggcaaggaacctgagcaggagccccctgagggggatggggtgggaggccttaggcccatgactggggctggcagtcagcaggggagcatggctgagagggtcagtaaaaccccagtaatgaaggacaccaaagatccagggaggctaggtccctggtgcccacccaccccagaaggggctagctggggggaaagatgggttaaaggtcattgcccataggcaggctttcctcttccccctggtgggcacatcttccacctgccccccacctcctggaacccctgtctgtctggagggccagggctgcctcccatgaccccctccctggactggagggggaggtcttggaagagacctgtgaagagtagcagggggagaagctggggacagaaaatccaaggaaggggcaggtggggggaagggagaaggagccggttccacgtgcactgcagtggcaggggctcagaaggttggtggggggaggggaaaagcaaagaatgcaggggaatgggcagggagcaggaaggatggacagtgggggttctcgggactcccaagtaaggatagggaaaggaggaggaggggaggtgaatgcggatgcagctcagtctgccaagagcctagagggatggcaagcgctgaaaaaggaagctgaggctcggctgcaagggaatttagaggggccgaggggctggaagagaatgtaagtggggggatgccaagctccggctccagctccagaatggctgcccaggcctgggctcccccctcagccccacagtcaccactgcagccaatgggggggcaggtgctgcatcggggcggggccaccatctccacggcaacaagaagctacaggctggaaggaggggggtggaccggaagagctgcctgttaaccctctaggttccagaacagaacaagggaggaccacaattatattttcactgtctgcttccagaattgcaaattgcctgcaaactgccctagaatcagtcctcagcttccctttacctgtaaaacccaggtgttaggaggtttgcatacaaaaatgtggaccccatgacacgagaaccctatcactccctcaggaacaggtgtatagtacagaaacatatactgagctatggaggtacgtgtatatgagaaccacaatacagaaaaataactggggatctatgtgcttttgagacatacagacaactgtgagcacgggcatagcacggatccacattctgagaccctgaggcccacacaccccacaggatacatgctttgacatatgtgagctctgcaacaagggagtacatacttgaacccagtgacccacatgagagctgctggtgtggactttgtggcccaagtctcttgggcaatcatgtggacagcacactacagaaatggacctataaccctaagacacacatatccccatgcaggggaattccagtttaacccctgaaatacatgcttgagtacaccatgatcctgaccacagaaaggtatccccatatctcagaagcacaaacatcctttcattcacgtgaaaagtacaaccacatccactctgtctcaggacaaccccctttcctcccccagcccttctctcactctaacacaggcatccgagattgccaccagagtaaagaaaaaccaggagcaaatgtgttaattatccttctggtacacactaagcaatgcatccaatggttcaggatatctcttccctagtaacattttttctgcatttctcaggtatggctgcctcactctcatttcagggaaccgagctcagccattattttcatgtgcaagctcatctaataaaggcataaagtctaactttaaatgcattaaaattccgctttggaactaaagcattaacagaagaacaaatttgctaattggcttgcttggttcttggaagtaatataaccttacacatattaccaagaactaagatccatgaactcactcataagtcacaggtacacagaggccacatacacatatgcttattaaacacttttgttgccgcaggaaaagaatagcagaaacacagaggaaagggggggcagagtgacagaaacacagaacatcctgttattaatgctgcatgcagtgacatgtacagagaaaacaacacacacccgtgtacacacacacacagcaaacctgaaaagcacaaactgtgatcctgggtctccatgtcccatgcctgcacgatgtatacacgcatgcacacacataacagccacctacacaaacccgtaacacaggcattgtgcacacacccacacatgtacacaccctgtgtacacacacaatggcactcacacacacacagcaagggcttggactcctgcccctccaacatctctaatcttgccatcacccacagaatctccccctgccctccaaatccctaaccttccctttggcctttcttcctctccacacccagctggcagctctcaaggggagccagaggagggaggttgccagagaagggcgaagaacagggttggacacagagcagagaaatgggagacagagctctgtgctggggatatgaacctctaatgacagtccctgctatgacaggcctcactgtgagccagcccgtatgcctgagtggccttccctgatccaaaaccaagcctgatcctgcaaggcctacaagaatccagtgccttctcccatcttcttccctttcttctttcagagatcactttaccagaaggcctgactctctcctccccactgcctccccagctcccagaccccttcttctcccaccatctctatccagttccccatcttaagctcttatcccctgttctctcttctaagtctggcttggctttctcccacattcccattctccagctattctttctccctggcctgctgctctctgctctcttcttcaagcctctctcattccttctctcctatcccctccccacttttcctctttaccccatttcttccctttttaagcttttctgtccccacttactgaccaagcagggcttacacctgcccagcccaaaggtgtttcatacacagtagaattccaaggaacacattcacacacttactccccccagccacaccacccacatccagacacgccctggacacccatgctgggattgacacagatactcaggccagtgctggaacacacatgcaaagacacacacctgccaccagggacacagaaaatcctgctcatagggccacacattcccacacacagaagcctgacaggaggtgagccccagccagggatatgcatgctcagggtcagaggtgacatggaccagcaaggccgcggactgccccacaagcccgtggctggcccaacagccccctaggcaggaaacaggcagaggcaagataagacaggacacacttgcacaaggatggctgcacatgtgtgcacgaggaactgggcccccgtgtgcacatggcaccgacacacaggagacacgagcatgggcacgaacacacacgcggacacacgggctgccccttccaccaggggctccaagatcccacacacaccggccgcccccgcgtgctcaagaccctgtccgcacgaggccggtccccgaccctcccgtcctccgctgtccccctccggttaccataactccccccactcggaagatgcagcgagaacatgcggagggagcagctgccgccgccgccgccgccaccgcggcttccccacccccctccccgcgcccacgcacacgcgcgcccccgccccacgcgcgcggcgcccccccctctacgcgcgctcctagtccgcccggccccgcccttacctcgcaccgccccccgggggggccaggggtgtccccggtgggggaggggccccgcccctgcgcgggggaagggcggggtgcggagggagagggggcggtacggcccggctcgcgccgcccggcgcggtgggggcggcggcggggcccgggacggccgggacggccgcgcggtgacggccgcgggaacggctccctccgccgccgctcccgccgctgccgccgttgcccgggccccgccgccgttgctaggcgaccgctgctgccgtggccgcctctgtcacgagccctgtcgcccggagacagcgcgagagagacgggggaggggggcaaggggacccccaaaacaaaccaggccacccaccatcccctcctgagcaggacccccccacacacacaaaaccgcggagagaacgagggttcgcggctccacccagcagaggaggagcccaggattccaatgcccctcaaaggtccggcgacctctcccgggctggagagtccacagcctcagcaaacaccttggcattgccaagtccccaaggtcccaacgacccctatgtccactgcacatcctccatgccctttacacattccatgtctgcctgaagaccctaaacgttcacccccatcaactttcactaagccctccccccaaatacatatgcccctggaacccctcccagcccctactgaaccccaatacagcaacctccacatgccacctcaactccaaacacacacggtgtccccacccaaaacacacgggagacccccgccagagacccctagaccctgaggactcaggataaggagaaagatggggaataagtgggcagatctgccaaccacaggacacatgataaacatgctctgtgagcatgtgaccattctggcctggaaacgcaggtgtacacacatgcacacaaacacacacatcttccccagacatgaacatgacatacacacatatacatatacacacagatgtgacagacatcacacacattctctgtatacactccaccaccacctgactttgcctcacagagatgtgctacccacacaccccgatggtatggggtttccatgacaatgacacacatccctgaccacccacccacccacccaaggtccccaaaccggcccacaaggctagtag

SEQ ID NO: 10912 - DNA, 6000 bp, Homo sapiens
ggcatgaccttggctcactgcaacctctgcctcccagttcaagcgattctcctgcctcagcttcccgagtagctgggacaataggtgcgcaccaccatgcctagctaatttttgtatttttagtagagatggggtttcaccatgttggccaggatggtcttgatctcctgacctcgtgatcccctcggcctcccaaagtgctgggattacaggcgtgagccaccgtgcctggcccaaagaacattcttaagtacagtaagacaaagatgacatctatgattttcatcaaacaaaagccaacatcaaattttagatcgatttgcttcactaatttttttaattcaataaaagacttcaaaattaaattttgaccaaactttgaaagtaactgggccctagccatcacatttacaatggagtagctttttgcatagaagtcttatcttcactttttctgttttcacttggccttttgatgaatttgtcttgtactagatgagtaggtagtttttctcaagatactacctgtaactttccttaggatagattatgtgacatttttattacttctgtcacttaaccaaagtagctttttcattttcatttatgataggttttgtaaatgtcaaatttcttgttaaagagtcagacttgatattccaaaaggcaaaggatgatataaataatattcaagtatacacaactagagttggaaataatttcaatcactttctcccaccctcccaaaatcaaggtaacctaattttcaaatagttatttgaaaggaagaaatcaagctgcagtttaaaaaaaaaatgacacaggatattctaaaatgtgatatatctatctataattcaagtataaagaccatgaataatcagagaaaccaacgtgaaatacatttggtatgacttgcagcgtacatttaaagttaattaaccctgacttgaattccttagaattaacttttacagaattatagaggatttaaaattaggtttccatcaattttagaggtaagctaaaacattttttctcctgttatctccaaggaaataaaactgttcaaatgtattggtgattaggttatgactttcatttcctttccttattttctcaatttttagaaaactataaactggtagattctttaacatactttcaaaggaaaagggaatgactcagcttctttattaagatcactgggttcaggatactcacataaatttagggtcacaaacacagctacttttgggggccaaatgtcatgcatgaggggcatgtgtcaggcagggatgagggcaagctggagagtgcctgctcatttactgcagtccaagaaagcacggtcctgcaaacatggggcatcaaaaggacaatggcttctgctatgatgttcagagaagcccaaaacacatttttttctaagtattcaatctcccaattttgaaatgttagcaattattttcctgaaaacattgcctatggtctgtgagctgcatttggcctataagccaccatctgcaagccaatactgcccaagagaagataatattgggagctaatccagtaaccacaatgccttacaacaagacatataattgtcaaattcatttcaagtctcatgttggctgatctgagcaccatctttgagagatgaacaaacacaaaaaggttgcttgatgatttaagaaacaaagtaaacagtttgatgatttgaatagacagtatcatcaagtgattaataacttgatacactcatttatttgacaaagatgtattgagtgccttgcatgtaccaggcactgttttaaccaccaagcatacagctgagcacaaggcacctatccccgaaggtgcttacattctagaggcagaacgtaaatctaactaagcaaacaagaaaaatagcagctgatgataatgctcattcagaaaattaaaaacagtaattttttaacaggtgtctggctttcctatcctggtccatggatctcaaacctcacccactgaggctgtcagagtgtcaaattcttcctctttactccttttgctcacgttatgagatcacttgtggtatgttttaataaattgaaggccactttattttaaagtagttacactttaatcttcttgactagatttggtggaaatatcaatccaggaggaatttagggaaacctctaatctaatcaacagcttaattacaatgcctgggtcagtgctgcagctagttaatttcaaacattttatgttgcctccttttagcttcagttttagaggataccattttccagtgtgtccctaaattctaagaatgtaccatttgaggatttttaccaccttttgcgaacaaagactaataacatcttcacaatgaaactcttttcctagggccagggcttctcccacgtaaaaatgcacattaacaaacatctttgtaaactcttccctatagttgcccctgtatgatgaaatggagaaatccggtaatgtccagtcagaaaatctgggttcaaaaccagatatttggctcagctggggaccaactctttgatctggtagtcagtcacctgatccttgctgtttctctttgaaagcccacttcttggggcgctgaatgtgaggactgagtgagagtgtgaatttgaaagccaactctgaaacgctggctatgatagttattctgattggaagggccattaaggtcaatggcaatgctccttttgtgatcagttacaagaaaacaaatgggtccttgtgactgtgggggaagggaggcagagccagacacaaagtggacctcttctggaaaatcagccactgaaaggaaaataaataaaatccgtaaagttatatttcaattcaaaaagaaatgtggattgtatgtaatggcaagaggagcactggtaataatacatgtctaacattcattgcgcacttactctgttccaggcatggaggtcagaactttgcatgtattagctcttcaaatgaggggaggagagggaaggaaaagaaaagttaagctaataaataatgtgaagttgaaaaattaccacgtacacaacgtgcactatcgtgtccccccccgccccaagcccccagctctttatatatgtggtttccagacccatttctcagcggtctggtgtcttttgcagcccttagggccccttccgcccattgttatctaatcaccccttctcggccacgcaggaaggtccacaacctcccctgtcccccaagacccgccccccggcagccttcagaaatagttctctggtacgtatgtgccagcattttatgcagtaaacacatgttgcccttaacactgaactgcaggttaaaaatgtattccactaaattgtgcagcggttagctgagcaaataatgaaaatgcaaaagaatacattcagtatatggagcttagaatatatccttttggaaagctaaacattttttttttttttgccccaaataagactagaaatggattgctccatttaagacttccattaataaacttctcagaatatgaaatgcctccaaaatgtggggacgctgggttgaaaggtgccggataattctctttggtgcgtgcgctgggtgcaggaggaaatatgctaatgtagccgtttgccgcagggctggtgttatttatacagcgctggctgggcaaggttggcgctggagcaggagaggagggagaggtttgtcttcttgtgtgagagtatagatgtgtgcgcctgtgcacacggcgttccaaacgtgaatacaagatcttagggagggggtggggaatgccatcacgtttatactgtgtgtattataacttgtgttggagatatatcccagcatcgtgcttacatcgcatgcacttaggagtgggggaagaaatggcgatttgggagtgggtgcggcgggtcgcaggtggccagacactgcgggggactggcgacctgaaattggcaaaggcgcctccttgaccctgctccacggacacaaaaatcaaccttattcgctcctggaaaaagcgcagagggttgttcccgaaggctgaagaccctcgggcttgggactgggagcggggcgcgggcagcgggaccgccgggcacctctgaagagacagaggtcacggagacctggcgcgcgcggagtgggtggggggcccgcgcggctgcgggagcccagcctcagagaagacccggcccacacgttctcagcgcacgccgactttgccgggacccgtcgccggccggcgacccctgctacgcgcgtctcctcctcccccgccccgcccggcgcgaaacgggcaacgggcaggggatcctccagccaggcgggcccggggtgtcccgtttcccccgcccccctcccgtggatcccgggcggcggcggccgcgcgtccgggctggagggggcgctcgcgagcaggagccgagcgcagcaggtgccgcggttacctccacctcggcggggggagagggggcgggccggggggcagggaggagggggaggaggaggaggaggaggaggagtggggccggctccaggagctggagagcgcggccggctcggcaggctgggtccagagctcgcggcttccgggaggcgcccgaagtcggagaaatacagcgcggccaccccgggagcagcagcctttgcccgcaccgccgcccgcagggccctgaaccgccggcaagggcgcgggccgggcgcggcgccggctcctcctcctgccgcgtccggcgcggagcagcggagagcggcgggctcggcagccggcgcccgggccgcggaactgatgagccgcggcggctgagggcccggccggcctctgcccgcctctgcccggcgcccgagcggggccgcagcgcccggggcgcggggtccggcgggtgacatgggggcggcctgacgcacccggagccgccgagcgctctctctcgagccgcgggccctcctcggcggcagcggctgcaggcgcctggcccggcgcgctgtgcccggggcgcccgcggagcctccgccgcgctctatgcgcctctgcgggagccgcgggcccgggccatggccatagaccggcggcgcgaggcggcgggcggcgggcctgggcggcagccggccccggccgaggagaacggctccctgccgcccggggacgcggcggcctcggcgcccctcgggggacgcgcgggccccggcggcggcgcggagatccagccgctgcccccactgcatcctggaggcggcccgcacccgagctgctgctccgcggctgcggccccgagcctcttgttgctggactatgacgggtcggtgctgcccttcctcgggggcctgggcgggggctatcagaagaccctcgtgctgctcacctggatcccggcgctgttcatcggcttcagccagttctcggactcgttcctcctggaccagcccaacttctggtgccgcggggccggcaaaggcaccgagctggcaggggtcaccaccacaggccggggcggggacatgggcaactggaccagcctccccaccacccccttcgccactgccccctgggaggctgcgggcaaccggagcaacagcagcggcgcggacggaggcgacacaccacccctgccatcccctccggacaagggggacaacgcctccaactgtgactgccgcgcatgggactacggcatccgcgccggcctcgtccagaacgtggtcagcaaggtaagggccgcagccgcccagtccctccaaccctctccctgcagaccgaggtccaagcccgagccagcgggagaaccgaagtccccaaagtggtggtgctagagtgtgtgtagggcattccgcattggcttaatctccttccgtcccccaaaccacatgcctttacttgggtgtaaagggagcaccatagcctttactagtttgcacccaaactcctgtcccagtacgcggatggaaagcgcgcccttcccccaccctcggggcgaggca

SEQ ID NO: 10913 - DNA, 6000 bp, Homo sapiens
aaagaaatcccttcaaagagattggtacagacatggggagagatttggaaagacttaaataaattagtaaatggaattcataattccataaattaaggattggaaccaagtagggcagagagctctgggtgggcaccaaggaaaagctgcttattacgggaagaatgtggatcacagtgatgcagaattggtgagcacactggtcagggtgagccccttacttccttgatcacagctgtcattttttaatactaattggacagtcacacaggtcttctgttttctgtttacatgttattttccctaaattcatcacatcagtaatatctcgagtaggcacactttatttttcctgttgtaccaatagtagctggttgtgtaaaattcaagtcccaaataaaatccgatagtaatcgattgatgacatcatcattggagtggaagtcacaggttaagcctaaactaaattatccttacatgttcaggctacgtctaaacatctgagaaccggtgagacagacctactaggaatctctttaccataaagaatgagacgtcgtccccttcagtaatcagtcctctgaatggggaaagcaagccagtaagacacggtggtgccgtgatggagagcaggtgtgattttgagtacagcatgaagtctgtaacttcaccatctattacagttcccatcaattgtttttggtgttaggagagagtagcaagttaaacagaaagatgtatttgtcaaaacacctgtcagacatcaacaagctcagagcaggtctcatttgaaactcatgaaagggtgcctcaaagtaggggagggagattatgctgagtcagtggagaactctgtaaggtacagtcacctcaaagcagggacagcgtgctggcagtccttgctcgctctgggggcctcctcggccttggcgcccactccagcagcgcttgaggagcccttcagcccgccgctgcactgtgggagcccctttctgggctggccaaggccagaagcggctccctcagcttgcggggaggtgtggagggagaggcgcgggcgggaaccagggctgcgcgcggcgcttgtgggccagcgcgagttccgggtgggcgtgggcttggcgggccccgcactcggagcggccagcgggtccgggcagtgaagggcttagcacctgggccagcagctgctgtgctctatgtctcgctaggccttacctgctccgccgtggggcaaggctcgggacctgcagcctaccatgcctgagcctccccgacgagcgccacccccagctccacagcgcccagtcccatcgaccacccaagggctgaggagtgctggcgcaccgcgcgggactcgcaggcagctccacctgcagccccggtgtgggatccactgggtgaaaccagctgggctcctgaatctagtggagatttagagaatctttctgcctagctgagggattataaacacaccaatcagcactctgtatctaactcaaggtttataaacacaccaatcagcacactgtatctagctcagggtttgtgaatgcaccaattggcactctaatctggtggggatttggagaatgtctaactaagggattgtgaatgtaccaatcagcactgtgtctagcccagggtttgtgaacacaccaattgacactctgtgtatagctaacccagtggggacatggagaactttgtgtctagctcaccaattgaaaacacaccaatcagctctaaaataaaccaaccagcagaatgtgaagccaaataaacggaaaaaaaagcaggctgcctgaatcagtggcaacctgctcaggtcccactccagtgtccagaattgggggctcattagcctccctgacttaaagaatgaagctacagaccctcacagtgagtactacagttcttaaaggcagtgtatccggagtttcttccttctggtgggcttgtaatctcactagcccaagagtaaacccacagacctccacagtgagcgttacagctcttaaggtggcatatcttgagttattcattcttcctggcgggttcgtgatttccctagcttcaggagcgaagctgcagaccttcataatgagtgttataactcataaaggcaatatgagcttaaagagcaaaagaacagatattttcccagcatggaaagaaactggagcctgttgtcgctgctaagctcagggcagcctgcttttattcttatctggccccacccacaccctgctgattggtagagccgagtggcctgttttgactgggcactgattggtgcgtttacaatccctgagctagacacaaaggttctccacgtccccactagattagctagatacagagcgtggacgcaaaggttctccaaggtcccaccagagtagctagatacaaagtgtcgattggtgcattcacaaagcctgagctagacacagggtgctgattggtgtgtttacaatccctgagctagacataaaggttctccacgtctccaccagactcagaagcccagctggcttcaccccgtggaacccgtactggggctgcaggtggagctgtctgccagtcccatgcctgtgcacctgtactgatcagcccttgggtggtggaaggaactgggcaccgtgcagcagggggtggcgctggtcggggagattccggctgcacagaagcccatggggttgggggaggctcagacatggtgggctgcaggtcccgagccctgccccgcgggaaggcagctaaggcccggtgagaaatcgagcacagcagctgctggcccaggttctaagcccctcactgccccccgcctggcccagttggccgctcccactgcagggcccgccaagcccacgcccacccggaactcgcactggctggcaagcaccgcgcgtaaccccagttcccgcccgcccacgcctctctccacaccttcccggcaagctgagggagctggctccggccttggccagcccagaaaggggctcccacagtgcagcggtgggctgaagagctcctcaagtgccaccaaagtgggggcccaggcagaggaggcgccgagagcgagcgagggctgagtactgccagcatgctgtcacctctcagaagctttgttttttgcaataaatcttgctgctgctcactgcctttatgagctgtaacactcaccgcgaaggtctgcagcttcactcctaaagccaccgagactatgaacccaccaggaggaatggacaccttaacagctgtaacactcactgcgatggtctagtagcttcactcctgagccagtgagaccatgaacccaccagaaggaagaaactcggaacacatccgaacatgatgaaggaacaaactctggactttaagaactgtaacactcagcacgagggtctgcggtttcagtcttaaagtcagtgagaccaagaaccctattccagacacagctctgacatagagtggcaacactggtagcgtgcacaggagcagaggcagcagcaaagtgagaggaggccctccacttatgctgggcgccctagtagcagcagcaacacagcagcggtgccactggtggcctggcagagtggaatttggttgattcagcccagcaccatcaggctgtgactttagcagactgtaggtagtggtggcagtgggtccaagctgcatttacagcccccaggacaaggagacctgaagcggaaacaatgcaggagtagaacagcaaatgtcctaggtcagtagtgtatggaatctggaaccagatagccttgttcaaatcttgcatctgccgtttgctagcgttttgaagctttgagtaaattactaacctctctgggtctgttttctcctcagtaaataatatccagctcatagagaggtttagaaaattaaatgaaaaagcacagctctaaggaggtgattgacaatagtaagcatatgatttatttcctcatctttatgacatctcactctggtccagaccaagattacttaatattcagattaatttcatgaactgctatattactccagcaactcaaatccaaaatagatgaaaaggaaactaaagaaaactggacagccattgctgcacctattgtatagttacaaatgctgactacataccaaaacactgtttaggtgacttataattctggaatgtcacatacgaatttaagaattgctggccaggcgcagtggctcacacctgtaatcccagcactttgagagacccaggcgggtggatcacctgaggtcaggagtttgagattagtctggccaacatggtgaaacccccgtctccagtaaaaatacaaaaattagccgggcgtagtggtgcgcgcctgtagtcccagctgcttaggaggctgaggcgggagaatcgcttgaacccgggaggcggaggttgcggtgaacagagatggtgccactgaactctggcctgggcgacagagcaagacttcgtctcaaaaataataatttaagaattgtcattacttaaccatgggagagggtgtgggcagacaggggacaaagattttccactgtgtattttcatggtttttcctttgaacaatgtcctctcttccaacaaaattttttgcttttaagtgccacataaaggcagctcatgttccttacatcgccgttatcaagaggatcgtcattcaaataaagtaaccactgacaatgctaattaattggaagtaaagaactgggcggaaagaacggctaaccgcaagctgccgggtcgcaactgcggcggaaggcggactctcgcgggagccacaaagaggcagcagccggccacgtgacttcccggtggcctgctctccccacctctccgcgctgagcagccacgtcggcggcggtccctggtccagggaggggcgtggcaaaggcccgtgcgcggtacgtgtcccgcccctcgctgcccggagcccggatgaagagtaacgccattaccgccggagccgccgagagccttagccgacggaaactggacactggaccggcagcgccatgagactcctcccccgcttgctgctgcttctcttactcgtgttccctgccactgtcttgttccgaggcggccccagaggtgaggctgggggagtgtgcggaggggatggccaggaaggagatgccagtgatggcaagtttgaagttggaggcggtggccgctccgggtcctggggtccgcgtccaccccgctggcctctctccgccctctccccaagcctaggctcgtagcagcaggggtccccgcgggcgctggagaccccgctgcggcctgccccttgcacgcggagcgcggggccgtgcccgggcgaccttgcttcgtggccggccgagggctgggcttgctcctcttgccctggaccctcgcctgcaggagcggccagaactggagggtcctcggctgcaggaggaggcgctggacacggctgcgctccgagcgcgccgcagccgggctgtttcttttggccacctccggctccgctccacccccagcccctcgcgctcagggctgacgtgtctttagcttccacgccgggagtccgtcttcattcatttgccaaaacccttgttttctacacatctaagccatcagagtgtcttgttcaatggtcatctgccttgttcacgccctgcttgacccgtatgtgttactaggaggcttgatttcagaaaaactaccccatcgtcacccccgttatccgcccctgctgccaagcagactgaagaatccctgtgggatgtctcccttctgccttcttcctcttcttgtctttccatggaacaattttttgtttgtggaaacatcgtattgtgctgaaaaaatgtggcctacttcgagtgtttttaatacatagatttattctttcaacaattaacccagcaattaagtgtgaaaataacttagcagaatataaaaatatggcaacttgacttcctgcacaggttttgtcgtgaacttcg

SEQ ID NO: 10914 - DNA, 6000 bp, Homo sapiens
tagtttttctgctcagtgcatctggaaccatatatctatcaatgaacttcctagtttggaaatgctatataacctattccttatggaagagctagaaaagtgacaactgatgactatatataaatggattattctaatgatagtaggctatattaataagaatattaatagctaacttttactaagtgtttgtcaggtaataggtgttgtgctaaccatttaaccatctttaaacatctttcacttactcatcactacaatttaccacataggtactactgtcattcccatttcacagatggggagattgagacttagagaatttaagcaatttgcacaaagacactcaaagagcaaggggtggtgcaaggatttaaatttaatctgacactagaacctgagacttaactatgcaagatgattcttcacagacacatgactaagtaacaccaattgacacgaactgacattgttgatcactccttcctcctttaaacattgtcttcacctggcttttagaagactgtacattcctggacccatcctatgtcaacagctgcttcttctaagtctccactgctggtttctctttctcgctcccccaagtcacatgacttgattatctaggacatcctaaaatacataaaaacacctcccaaaaattgctcctaggaaatggaaggcatttatccataggtgcccattccccattggtggatcattgcctgggggtgttaatgccaccaaacttcccaagggccaggtgtgtgtgtgtgtgtgtgtgtgtgtgtgtgtgtgtgtgtgtgtcaggagtgacggcatctcaaccctatctgagcactgttcctgaaaaggatacttgctgatgttcacaaaacaatgtcagtgttctatcaggccaatttcctccagttgatacaatatatggtaggaccagtggaattccatggtcgtgtgtcattgtcacacctcttttaccataaagtgtgtcctttagttggaggcaatacatcagaaaatcatgtgtttgggctgggtgtggtggctcacgcttgtaattgcaccactttaggaggctgaggtgggcagatcacttgaggtcaggagttcacaaccagcctggccaacatggtgaaaccgtgtctctaccaaaaatacaaaaaaattagccaggtgtagtggcaggcacctgtaatcccagctactggggaggctgaggcaggagaatggcttgaacctgggaggcagaggttgtgccactgcattccagcctgggcaacagagtgagactctgtgtcaaagaaggaagaaaggaaggaaggaagggagggagggagggagggaaagagagaaagaaagaggaaggaaggaagggagggagggagggaggagatggagggaaggaagggaaagaaagaaaaaagaaaggaaggaagaaaaaagaaaagaaagaaggaaaagagagagagaaaggaaagagagaaagaaagaaagaaaaaggaaggaagagaaagaaagaaaaagaaaaaggaaggaaggaagagaaagagaaagaaagaaaaagaaaaaggaaggaaggaagaaagaaaaagaaagaaaaaaagaaggaaagaaagaaagaaagaaagaaagaaagaaagaaagaaagaaagaaagaaaaaagaaagaaagaaaggaaggaaggaaggaaggaaggaagtcaatcaatcatgtgtttgtaactctgttatataatggtactggcagaggcaccatgaacaagaccagtcatatcaagggaagtgtcagttccgtaagtacaaaccacggctctctccaggaaggaaggacttttgtgtaattgctctccttatggaatttaccatcaatctttgctgctgatgggctggacatccaaagaggcagtagtcatatcggctttagtaagaaagagccttaattgttgggccatgcacatgtcctccccttaatatcactaagaaagtccttgttgtcatctgactgcaaagtaacccacttccagagttctgaggagctgcattctagactttcttcttacatcaaatttcttagcttggtttccctcaaaacctgagacaactacttatgtggggacaggtaatttgggatgtgatcctagtgagaaacaatgagagaatggaagggagaatatagacataatacaagaatgtgttattgaagttgctgttgtgagaaaccagaacccaatttcactgggactttttgaaaaacacacagaatggcctacaaaactatcttgctcaagtgtaagaagcaagagcatttatccatcagtgactgtcaccccttggttgaagggccccagatgtgttgacttaccagcacttcaaagctgtgcaggacaggagctgagagagctactgctggaatgtgtgaagtccgaagaacctcagggaagaaagcaaagaggcctggtaaatgtgggagaggagaagctgtcagggagaagaatgtgtaagattgcatgaaactgccccccacaaccaagtcagaaatgagaggtgatgctcagaagatgtgaatcaagacaccaaaggtttctgatactacagaattattaatttcttaaaaatttaaaaccaattcataggaccaggcgcagtggctcacgcttataatcctagcactttgggaggctgaggtgggtggatcacttggggtcaggagttcgagaccagcctggtcaataaggtgaaaccccatctctactaaaaatacaaaaattagccgggcatggtgacaggcgcctataatcccagctactcgggaggctgagacaggagaatggcttgaacccaggaggcagaggttgcagtgagctgagatgtgccactgcactccagcctgagcgacagagtgagcctctgcctcaatcagtcaatcagtcaataaaaaacaattcatagctgcaagtctttaattttgtttaccacgtggttatcacaggagtaaatgggaagtattgtaagagagtcgatatttattaaacacctactctataataagtactactccagatagtctctcctacatttcacatttgacatgtaaaaatatttcactgacatggtagtcagagaagagccaggtgacatttgagcagtgactggaaaaaaatgaggaagcaagctctgtggacatctgagagggcagtgttccatgcagaaggaacaacagctacaaagcactgatgcttgctgtgcttgggggcaattagaaaagctctgaagtgtagcttggatgtgatccatcaagaataagttcagtcttaaaagtcagggtaagaattttgaactttaatctgagtaaaatggtaaaccgctaaaaggttctgcacagaggagtggcatattcaggttctaatgggatcactccagctgctgaatgcaactatgtagagaaataaagggaatgcagaaagctatgctcacggctactgcaattgtccaggcatgagcagatggtaccttgtaacacctcttgtaccttaagttgttttatactgccatttactttctcatggaaacccctaatttcttcaggacagggagctcatacgcatagtttacgatatgagctatacatatgcccatttaataaatacttgataaataaccaccatataaatggctaacagtagtactaaattcacattatacagtgacgatatggcatcactgaaaggttttgtcatttactatctctttaggaaatttaagttctctaagccttaattccaacattcctaagtgttgctaacaccagcctaacaacgttggcaagtattaaacgaaaatgtctacccagacctttttttctcaccaccaaagtaggtgccttgctttcttacaaaccctcgatcccaatacaagacacaaatgctaccctttctgaagagtgcctgtaaaattttaaaagttgtccataactgactggattctaacatacatattaatccaattcatccctttctggtattcaaggcatgctttcaaaaattgtccatcttcgttacagtaatattttccttaattattctctgaaaacagctcatccccaaaccgtcttggtttttacgttattacatctcagtggtgatggatgaggccctaaacgcggggaaaaccttttacaaaagttttgatggctggtcctcaagctttgagatttaccttccaagaattaagcagcactatcgaaacaatgctggcaacatttttatgaggttgcaaggaccacggttgctgcagctacaggatgagttataacgtcagaagcaacccaagcgttacttcaggcccatcttcaccggagaagcccgtatgaatcaggcaaaaacataaaaacaggttctgtgactttgccgtatctcatttagatcaagtagcacgcagaaggaagacaaggattttaaaatctggctccaacattctccacttggtcgcgttctcaaatctcagcccagggccgctgacgtaaagtcgcctctctcgtgggcaccacgggctcgagggtagccggcagctgaaacccgaggggcttcagaggcttggaggccaggagcaggcagagcgccgatgggataatgagattctccagcagatcggcgctcaccgacctactccatttcagtgggtagaggtaaaggctgaaaggcgaccctcgcaccgcccggcccacctaggcagtgccggcctagcgtctctaccccatagagcatgcgcgggaggtaacggcccgcccgccaccggccacacaggcctgtcgggaggcggggccacgcgtctgcgcacgcgcgcagggacacataggcggaagtggcctgcgggcgccggagttgagagtgctttccggggaggcgaccgccgcggtggaaagtgcaggagtgggcgaggaggaggaggaagaggaggtgatggcgacggaccaggggagggggagatgctccgtctagctcagacgccacgcaggctgccgtcacccttccgggtgacataccggccttggggtacgcgtgccttcggggcctttcctgtgtttgggacccagatctcctctcctccagaaaaccttgacactgcccatcttcctcatccagaaggagcgttcgaggaatggatgaggtcgggatggaagaaacgggtgattcccttttttgaaagagcggaaaccggccgggcggtttccagggaggagcatctgttcctcctcgcccgtttttcgccctcgggctggcgagaactccctcaggtcccaatccgtggactcgcaggggtgaggtgacctcaaggggtcttttacgctgttctcggggtctctggagaactgtcagtcacctggatacctctagactgtatttacagttaactgtttcctcgttccgtgtttattaaataggggcactccaaggtactcttttctccatttggcttgcagtagaatgtgattgttctggctgggctattaagtttatggcataaacttccactagaagttctgcaagtttcctccagtctttgcaactgaattatctctcccgtctttttattatttaaggaatattgaaagtaaaagatggaatgatttggtgcgctaacaaaatcttaagtgttgagtatctgcattttttctacattaggatatcagaagcctagaattgttttttgattaaacgtttttctaagtgaattgagatagtttggaacttggaagagaggcagcatttcaaaataatttagacagcgttatttttacttaattacttaatatataaagtcctagtgttaactttttctcttggaaaaaaaaaagaatagtcttcaaacattagcacagggtttctccacctttgtgtaatgatgtgtgtacaaagaaatgagatggaactttgttttttctgttttataatcgtacaccataggccatgattgattccggagcgcagttaatcaaggcata

SEQ ID NO: 10915 - DNA, 6000 bp, Homo sapiens
aaaatctgtcggggttggggggtgatggaagggagaacattagaacaaatacctacctaatgcatgcggggcttaaaatctagatgacgggttgaaggggcagcaaaccaccatggcacacgtatgcctattaacaaacctgcacattctgcacatgtatcccagaacttaaagtaaaataaaaaattataataataattaaaaaagaaatctgtacttgtatgcattaaatatataaaaattaaaatacataaaaaacttaaaaagcaaaaacctagaaaaataaagtgctacccccaagtcactctatcatcatactgtttcttcatgacatttctctatctagacttattgtcttcttcctctcgttgaaatatgagcttcataaaacaagggaagtcacctatattgttccataccatattaatatcatccaagttctacagaaattggcactttttcttgtaaagggccaaatagtagctatgtggggacttgcagaccatacagttgtgtcacaactctgctgtcctaacatgagagcacccacagacaatacgtaaacataaggacacagtggtattctaatacaaactttatttacaaaagcaggcaactggctggatttgtcctgccactgtagtttgccatcctctgctctagaatgttatactagaatatagtactcagcataatattttcaaatgaattaacataaactttattttaaacctggattgatacaaggtcatgattgtctccttgttactacatccaatcaaatgaccaatatatacatatattgctttgtcataaatccttagtcctaacatatcgagtgaaagctgcactaaatttgatggagggaactcagttttttcaatgtgccttcacttgggcttaatctttactctttatcttactatttttcatttctaaactcatataggtgcagagctttcttaacacaaagcagagcccatggccaaggaaaggacgtgatttccagagtctgtttctactactaccctaaaagtacaaatactttgaagaaatgtagtaaactgatttaaagtcataatacattgtaagtgagtatttttctcaagataaaacacaaagatgctaggtatatcaaaagaagggatgcttcagaagagaaccacactaaaaggagattaaactccccccaaaacaaagcttgcctacttcataattttgatgagggctggcagactagcactgcagaggcagtagagacaatgagaatactcacccaggattcaggagatccaggctttagcactgtcatctattaatcggtcttctctaactcctctgagacacactttctgaacctataaaatctacgatatgtgacagagggagagaaagagcatcagtcagatctctatttttaggtttaagattcttagattatgctaatcatcactttatatagcaccacatccatgtaagtacctaacacacaattagtctatgttattgtacacatgctcaatatgggcttgccgtacagctaagaaacagagtccagcttttgtgtaatccatacaagagaacaacgaaagtaaatattataaaatcatgtaagtgatggcatgttaaattttccattaagtgggaattcatgttatacccagttaagaccctctcccagttatatctggttaagatatgtttccagtcctgtgtttatacaggtagaaccacttccttttttaaaaaaattaattaatttatttatttttgagatggagtcttgccctgtcacccaggctggagtgcaatggcgctatctcggctcactgcaagctccgcctcctgggttcaaacaattctcttgcctcagcctcccaagtagctgggattacaggtgcccgccaccacgcccagctaattttcatatttttagtagagacggggtttcaccatgttggccaggctggcctcaaactcctgaccttgtgatccacctgcctcggcctcccaaagtgctgggattacaggcataagccaccgcacctggccaccacttcctttttctatttaataaaatattggtggggaaaaagaccctctggcatttgccgtctcatttgttcctttgttgtagtgataaggaaagccataaaataatattttaagaaacagataagatatagatgactttttagatctccttctggccttatgggttgatgtgtatttttagagaataaaggtaaaataatgattatcaggctaaatggtaatgtggaagtatagggataattcaaagtttaagaattccttccccatgtttacctggtgtgctttgcaaggtttagatgacatcaatgatacaatttttgcaagcaacagccgcagggttcttagaggtcggttgtcacttaaaattgttttttcccttcatgttgttagaaaaatagactaaagctttccctgaatggataatggaatttagtttctcaaaatatcatccatggactgcctggctgcaccagtatcatttgtggtgcttgttcaaaattcatattccttagaaatggaggtttcaccacttcaagacccatagagagtccattatactttatgcagggtcagagatgcctctggaatgaagtagatactcccgcaatgtgaaactgatagcaaatattaaacccaaagcaaaaccaaaaaaaaattcatattcttggtctgtacctgaggtcatcttgatggatctcaagtatccctgtatagtattaaaccctctggtgctacttatacacaataatgtcaaaaaatcactatctagattaagaattcacattatactgcatcagattagtgatacagtgaaattcaggtccagagtttttatcattcaatatccaaaagacgtggaagctacttttatagctttcaaatataacacgtatcaaatagaagaaagaacacaggtaaaacagaaagaataaaatcattccaaggaaaaacaatatttggggactattcgtgtgaatttccttcaagtctctcaatatcataatatagatcatcacaggttctaaaaactcctaacagcagggactgtgtttttcttcatcactgtaaccctagctgttaccaaaacgcctagcacatagtaggcactgaaatctttgctgagtgaacaaagtaagtgaagctgaaatcaaattgtatctttgatttgggccacacttttttataaaaatatgccagcattaaatagaatatcactttctgattctcaaatgcatcaaattgataacaaatcaataactagtacttttgtaccagatatttttctagagttttacccatattaatttaaccctaacagctacatgtaatgttaagtgctattttatcccaaattcgtaaatcaggaaactggagcatagacagtttaggtaaccaacccaataccacacacccagtatgtggcagagctgactcctgagatttttatcagactaggttaacctgtttatggtcataaaatcatccgccttttataaacaaatatatgcctaatatttaccacttcagctacagaaattctatattaggaagaaaaactctctattaggaaactatatattaggtgattgtatgacagttaagatttagccccggtacctacagttactcactctgctactgcacaaaactctgcaagggctcccacaccgccccaggtgtgggatgctaagtgtatggtgcaggtacctccgtgcacagccacacgggctgctctcaaccccaataaacatgtttaccacatgagcctcacatgtggtaaacattttttttttttttttttttttttgagacagggtctcattctgtcgcccaggctggagtgcagtggcgtgatctcggctcactgcagcctccacctccagggctcaagccatccttcacctcagcctcccgagtggctgggatcacaggcgcaggccaccacacccagctaatttttgtattttttatttaagaggcggggtttcgccatgttgcccaggctggtcccgaactcctgacctcaagtgattcgcctgcctcagcctcccaaagtgctgggattacaggagggaaccaccacgcccgccaacttcccatgcttgagggagaaatggaagaaagttcatgtaatactcaggcaagtccaattttttcgacgtctttcacttgggccacacacacaactaaagtaactagaagcgcaggctctaggaggccaccgttctgttcacagtgaagagggtgcgctcaccgttggtcgtgtccgctggaagccccgcgtcaggccgggagcgggacagagactcttgctcagggccgttatccgaactgatccgcttcccaccgcacccccagagaaacccacccaaccccctaaacctaagaaacccagactgcgcaaacctgcaggaacagagccatttccccctaatgtgtgcttcaaacccaccgaagcccaactgtaagcaagaccagcgtgcccgccctgcacgatactgcttctccccgcagcagcggctgccgatctgggcagcgggtgggtattcctggggctccgtggacgttgagccgccgcgcgaaaccggcgccggctggacctgcaaatcgccgcccggccggcaggggacgccgcggacgcgagggcgaggtcggtcgcccaggagggggcgcgcgaggccgcaggggcggggggcgccgcctcacttgccctgcgcccctcccccgcgcgccctcctggcgcggcggccggcgaggcccctgtgggagagggggcggggacgaaacggccccgaggctcggagcgccgcgcggcggcggcgcgagcccgagggggcggggaggcgcgggcgggtgtgcgcgcgccgggcgtgggtgtgggtgggggtaaccggcgcgggcgccgagatagcgccgggcagagggacccggctaccctggacagcgcatcgccgcccgcccgggtcgccgcgccacagccgctgcggatcatggtgagtggggccgcgcgccgccaccgacaccgccgcgctttctttctctcctggacccacgcaccgggcgggaaagggccgagcgggcgccggcgcgggcgctgcgggttcgccgctggaacccgctaccctcggaggggccgggtccgcgcgggcctggggagcgggagctgagcgtttgggccgggggcgcgcgggtcggcccgaggcccgcgggtctcgggaactttgtctcggtcccctctccccggtcccgccccggcacctcgaggcgcccgctcgcgcccagtcccctgttgcatgcacggggccgggcgcccgggatgcccgaggaagccgcccctccttcgcggcggccattcccgcgcgcagcccaccctccgaccctccggacccccgaacctgctctcgccaccgcccgccgacgcctggagcggagaacggcgtttcccgcgcgcggcacacaccctgcctcgggagttctggggttcgggccctaacggtcaagctcttgcccctctcctcccttcaccgcgcctgcaccccgggggtgtgtctgtgcactcgtgggtgcctcctgggtttgcagattggcttgggaagcggctgggtttctatcagtgtctgggctcggaggggcttctggtgtgttctttccgacaactcctctctctgcccgatttcccaggccagtcctccactctggattagtaacgcttctttctcctcggcagtaagctgtgtgtgtgtgtgtgtgtgttcacccgtgtccgatgaactgcctgacagtaagctgtgtgtgtgtgtgtgtgtgtgtgtgtgttcacccgtgtccgatgaactgcctgacagttttagtagcagagcctggttctttggttacaaagggagaacatctgttgtgccatcctcaaaggactggtctttaggcaaaatgtgaaatccgcgtttg

SEQ ID NO: 10916 - DNA, 6000 bp, Homo sapiens
aacaaacaagaaaggacacaaataatcaatatcagatcctacaggtgttaaaaggctaattaagaaatattataaactttatccctgtaaattatacaattcagagtaaacagacacagtgcctgaaaaacacaaactctgaaagctcattcaagaagaaacaggtaagtggaatagtccaatatctaataaagaaacagaatttgtagttgaaaatctttccaaaaagaaaagtcccagcccagatgaattctaccaaacatttacaaagaaattatgtcaaatgtgacagacacactctagtaatcccaatgagtcaatcctttgtgtaatctttatatgactcctcctcttgaatgtgggtagaaactgatctgcttctaaccaacagaacatggcaaagctggccaggagcaatggctcatgcctataatcccagcactttgggaagctgaggtgggcggatcacctgaggcccagagtttgagaacagcctggccaacatggggaaaccccatctctagcaaaaaatacaaaaattagctgtgtgtggtactgcatgcctgtagtcccagctacttgggaggctgaggcacgagaatcgcttgaacctgggaggcggaggttgcagtgggcagagatcacaccactgtactccagtctgagtgacagagtgagactctgtcaaaaaaaaaaaaaaaaaaaaaaaaaaaaagaggaaggaaggaaggccggccggcagggcatggtggctcacgcccgtaatcccagcactttgggaggccgaagcagttggatcacctgaggtcgggagttcgagaccagcctgaccaacatggagaaaccctgtctctactaaaaatacaaaaaaattagccaggcatggtggcccatgcttgtaatcccagctacttgggaggctgaggcaggagaattgcttgaacccaggaggcagaggttgcagtgagccgagactgagcaattgcaccccagcccgggcaacaaaagtgaaactctgtctcaaaaaaaaaaaaaagaaaagaaaaaagaaagaaagaaagaacatggcaaaggtaatgggatagttaatccctttattaggttatattatttggtaaagatgaagggattttgaaactataattaaggtctcaatcagttgatttttagttattcaaaagtgaaattaccttgggtgggcctgactcaattaggtaaaaaccttaaaagagggattgggaccctccctggtgtcagagattcaactggcatgaagaggtgagccaccttgagtcctcagtcacaaggaactgaatcctgccaacaaccacataagcttgaaggaggaacccaagctccagaaaggaacgcagccaggccaacaccctgactgcagctttaggagcagaggacccagctaagccaggtggagactcctgacccacagaaactgatatctaataactgtgcgttgtcttaagctgctaaatttatgggaatttgttatgcagcaatagaaaaccaatatagcaattgtatgtaaatgcttccaaaaatccaaagagacaggaacagtacccaactcatgtaataaggtctgcattaacacgatgacaaaaccagacaagggtgtttaagaaaaccacaagtatttctcatgaatataaagagaaaaatcttaaatgtttactaaattaattgctacagtatagaaaatggataacatgtcatgaccaaaacaggtttatctgaggaatgggttactttcacattcgaaatgcaacaaaatccaccatattaacagacttaaaagagaaaaaatacagccgggcgtggtggctcatgcctataatgccaacactttgggaggccaaggtaggtggatcacttgaggtcaagagttcgagaccagcctgatcaacatggtgaaaccccgtctctactaaaaaatacaaaaattagctgggtgtggtggtacacgcctgtaatcccagctacttaggaggctgaggcacgagaatcacttaagcctgggaggaggagggtgcagtgagccgagatcataccaccacattccagcctgggcgacagagtgagactccatctcaaaaaaaaaaaaaaaaaaaaaaaagagaaaaagtgcatgaccatctcaatacagaaaaatcattaaaaaaaaaaatccaatatccactcctgatttaaaaaaaaaagaaaaatcaccacaaagtagaaacagaggggaagttttcttcctaaacttgataaagaatatctattaaaatcccacagctaataatttatttaatggtaaaaggctaaatatttcactccaaaagatcagggaggaaggtctgctctcactcctttcttgcaacattataaggccctagccagtgcaatgaggcaaaagctaaaagacaaatgtacacattgggaagaaaaggtaaaactaccttcaactgcctgtaatcccaacactttgggagggcgaggcaggtagatcacttgagatcaggaggttgagacaagcctggccaacatggtgaaatcccatctctactaaaaatacaaaaatcagccaggcgtggtggcgcgcacctgtaatcccagctactcaggaggctgaggcaggagaatcgcttgaatcctgggggcagatgttgcagtgagccaagaccgcgccattgcactccagcctgggcgacagagtgagattccgtctcaaaaaaattaaaaaaaaaaaacaaaaagaataactttatatgtcataccttaaaaacttgataagaaggacttatcaaacaataacaacacaaaacaaatgacatttaaaaataaaaaggcagccgggtgcggtggctcatgcctgtaatcccagcactttgggaggccgagatgggtggaccacctgagatcaggagttcgaaaccagcctggccaacatggtgaaaccctgcctctactaaaaatacaaaaattagctaggtatggtggcacatgcctgtaattcccagctactggggagactgaaacagggcaaccttttgaacccaggaggcgggggctgcagtgagccaagattgtgccactgtactccagcctgggcaacaaagcaagactccatctcaaaaaaataaaaataaaaaggcaagctacagaatagaagaaaatacttgcaaaacatatctgataaaaacaaacaaaaaaaacttgtatccagaataaagaattgtttacaacttgataaaagtaacacaattttttaaatgagtagaaaaaacttgtaaagatgatttacacagaaggtagaaagaatggcaaataacacataaaagatgctgaaaataattagtcattaatgaaacaaaaatcaaaagcataatacccatcctctagaatggctaaattaaaaacagacaataccatcaaatgttggtgatggatgcggagtaacaaattctcactcatgactgctggcaatgcaaatgtttggcagtttctcaagagaaatgaagttactcaagagaaatgaaaacatatgtctacaccaagatttgcaactgaatgttaataatactactaactactaatactactactacaggctcacgcctgtaatcccaacactttgggaggcccaggcgggtggattacttgaggtcaggagttcgaaaccagcctggccaacatggtgaaaccccgtctctactaaaaatacaaaaaaatatataataaaataaaataaattagccaggcatggtggcaggtgcctataatcccagctacttgggaggctgaggcaggagaattgcttgaacccaggaggcaaaggttgcagtgagccaagatcataccactgcactccagcttgggcgacagagcaagaccccatctcaaaaaaataaataaataaaacaataataatactaacagccaaaagctggaaaccactctcatgtccatcaatgagtaaatggataaacaaattgtggtatatctatacaatggaatactctttcagcaatacaaaagaatgtattactgatatacacaacacaaatagatttcaaaagcattatgctagcagaaagaagtcaaacacaaaaagcatgttgtgtgatttgatttacattagaaaggtaaatttatgtttatggaaagcagtttgggccaggtgtggtggttcatgcctgtaatcccagcactttgggaggccaaggacagcagatcacttgaggtcaggagttcaagatcagcctggccaccatggtgaaatcttgtctctactaaaaatacaaaaattagctgggcatggtggtgcacacctgttaattccagctattcaggagtctgaggcacaagaatcacttgaacccgggaggtggaggttgcagtgagccaagattgcatcactgcactccagcctgggagacagagcgaggctgtctccaaaaaaaaaaaagcaagcagttctatcaggaggccattaggttaagctggttctgttagagtaggtagtcaggcagacatgagcagggcaggagagggcccccagctcaggaatgtcaggcgaccatcaggtgatgatcaggcggttgttacactgtttctctaaaataataataatgggttgcagccagtaccagggaaagacagtctcccaaaagacaggaaacaccggaagctggtgatcagcaacttcctgataagatctccgaagctgggcaagtgggctcaagcatgcgcactaagaagcaaaatgacagtttaaccagtatgtgaccttcctctaggaacacctgactgataagggaaaaatgtctcaagaaagcatgcgcacaacttcagtaaacaaatgcacatgtggctcctcccaagtgctgacaggccactgcacagcagacagcccaccccaaggaaaaaaatccaaggaggagaaatggaaaccccggaaccatgccgatgtataaaaccccaagtcaagggctgaacagggcacttggatctctcaaatggtgcagtgactcggataccttccctagtggtaagacacctctacgccttgccttcttcggctggaggcgttcaaccctcgtacgtggtttcgttctcctctttcactctcctgcttactaacctacccctggaacgattcctctcaaccacagtggctctgctccccctggctgctctctctgctcaccccgaaggatggcttgcaggggtgggaaggaccttggagtctgcactaagtagacctgagacactaatggcccccccagacaggaggctgatgagagcggtagggctaaaacctacaaccatgtagtatctggggtttcctctgctttttcaactaaaatcagctctttcccaaaaacccaccaccacctattttcctttctctgtatgtattccaaaatgacctcgcacacccattggaccaactgccttgggggtaagtctgtcttttctctgttcttactttgcatgccctgcaactttcttctctgccttaaacacacattccctatttgttattcatgcacccgcagctcttgctgtgttagcctggcaaccaagagatggactcccttacggatgtcccttgatatttatacttgttaccctaccagctcggatgacctccaaccctttccctgtctgttggctcactgccgggatagacactaatcagaaccttagctctgtcagctccttatgacttaccatatgcttttcatccctgttatgctccagggccatgtttctccctggcttttgaatggtttgcttgcttgcataggacctcactctgtagcccttaaggaccccacccactcgctttttttctgagttagcacccctttgtggggaaggaaaattctctgccgtttgcagggtcttatcccaaacaccaagtcctccagaggttcctcctttatatcaagagggcaaataaacgttgccctctcaaatccaagggctgctgtttct

SEQ ID NO: 10917 - DNA, 6000 bp, Homo sapiens
aggagtaaaggtgccggtatgtgacatagccaggtgtgggtgaaaagctctgtcaatgcagtgttgttggagtgacatccaatgtgggatgccacacgaggatggagagagccagtgggaagtgggcaggttattaaaagctatgaaacttggatgtaatgctgtgggtgatgctgatgtagtaaaacgacatgagctggtgggggatgtggcatttcagagagaatcactcactgaccttgtgaaaaacagcgttggggcatcaaactagattcaggaaaaccagctaggttgctggttgctatggtggtggcaagagatggaggccacttgaacgagggcagttgtagaagggatggaaagaaagggactgatttgaccctgatgtaagaaatgaacttggcaggatttggtggttaactggatttgaagagtaaaaaagcgggaggacacaggaagctcccaggtcgatggtgaggccatggtcacaggacagagactagagaagaaaagcctggtttggcggaagtcagtgagctcgttttagacgtatggagtttgaggcgtgtctgtctccttcaggagattccaacaggtagtcaaagatgtgtttgaagcttggtggggatagggagagggcctggaccagaggtatataatttgtggtcacaaactggaaggcagtggtagaaattatgatcatggataaaatcactagggtgagtatgtgttgggagacggacggtaagctggaccagctctctggggaatgccaacacagaaggagctggtggaggaagaggagctcattaaacagactgagaaggatagtaagagcatgttgggagaataagccttgctcatacgtggcttccttagggctagcttccctgacgccctacccacaccaggtctgatactgccatcccctctaataagtctgctgtgtttgtccttcacagaagttgccatagttataaattaacacttgtttttgttgttgcttaatgttcatctttcctgctaaaatataagctccatgagggcagggtttgcatcgctcttcttcctcggggaatccccaggacctagcagatagctgttgcttaataagtatttgtgaaattaaagaatcatgttgcggactcccaggggggtagagagtttcaaagaaagtcactcttagtaaccaagtggcctgtgtagtatccaaatcaaagtatgaaatatgcttatttttaaatgtttaaaatttcctgtgtaaaataataaaagttttgaacaattccttcccacttctcctggatatgacgtgaagccctcagatacttggagaaaggaaaaggcagacaaacagcacgcttagtatgtattagtttataacgtgcaactaagaggtgacattcattgctctccaaagctccacctggtctcatggtggggaacagatgttcaggctacttcatgaaaatggatctggttattcaaccaggaacacaaattatgatgtgaatatggttgcaatgtagatttttcattggcaacaattttgtgaaaagtttataagaaaatgcagatgttgaattaagaaatagttttatttcttaaaatattaaaatatttcttaagaaataaaactatttcttaattcataatccttaactcataatgtaatccttatatacatatattacatgtaattattaaatccttatatacatatacatgttatttattaaaatatcattttattaattattaatatgtattaaaatgatattacatgttattaaatccttatatattaatgtcattatttattaaaatgctaacaattcattggatcccaatgtaaaacactaaaactcttacaaataaatttaaataattttatcaatatttatgagaggccccatctgtgggcaatgaggctaacgtagagaaaaaaaccatctaggtggtgaaaggccagtgtccaggtttggacacacacatctcagagatttgggtctttgtcttcccctcctttcctacctttgcgtcaatccttacccatctgcagacttagacttgagatttttttttgtataaaggaataaaacctctaaatcaacaatggtgtctaaaatgaaaacacccttggagacattcattcattcatatgtgcaccaagtttcaaaacatattgatccttttctgagataattttctgatgagaggagagaagaataaaagggactcggccgggctcggtggctcacgcctgtaatcccagcactttgggaggccgagatgggcggatcacgaagtcaggagatcgagaccatcctggctaacacggtgaaaccccgtctctactaaaaatacaaaaaaaattagccgggcgtggtggcaggcgcctgtagtcccagctactcgggaggctgaggcaggagaatggcgtgaacccgggaggcggagcttgcagtgagccgagatcgcgccactgcactccagcctgggcgacagagcgagactccatctcaaaaaaaaaaaaaggggcactcagtagggagaggagaaatatcaaagtgggagtctgagagtgtgcagagcaacattgttcctttgtaggcaggtacactggttgtattagggttctctagagggacagaactaataggatgtatgtatataagaaggggaatttattaagaagtgacacacaatcacaacaacaggccgtctacaagttgaggagcaagaaagccagtggtggatcagtccgagtctcaaaacctcaaaattagagaagccaacagtgcagccttcagtctgtggccaaaggcccgaaagtccctggcaaaccattggtatacatctaggagtccaaaagctgaagaacttgcagtccgatgttcgagggcaggaagcatcctgagagcatgggagaaagatgaagtccggaagactcagcaagtctagtccttccacgttcctctgcctgctttatcctagccacgctggcagctgattagatggtgcctacccagactgagggtgggtttgcttctcccaatccactgactcaaatgttaatctcctttggcaacaccctcacagacacacccagcagcaatactttgcatccttcgaaccaatcaagttgacactcaatattaaccatcacactgagttcagacggcagctctgcctcttacaaagtgttgaacacatccttttagcagatcgggcttcaatttcctcatctgaaaatgtacttaattcgtaatagtacttacctcatagtgttatttagagtgctaatcagctaatatgtgtaaagcaactggaacaatgtttagcaaacagtaagtactataaaagtattagcttctgttattatttgcaatttagcccaggctgtggagttttgtacagagttttatgtacccatttcccagatcaccccttcctttgagaatggtttgctatggtctatgtttgtgttccctgcaaattcctatgttgaaatcttaactcccagggtgatggcattaggagaggggagctttccgaggtgattaggtcatgagggcagcatctccatgaatgggattagtgaccttataaaacaggcctcagggagcttgtttgccccttctaccacatgaggactcagccagaaggcactatttatgaaccaggaaaccgacccacattaaacaccaggcactctgtcagcatcttgatgttggacttccagcctccagaactgagaaataaatttctgttgtttccaagcttcccagtttacagtatgttgttatagcagccccaacagatgaaaaaaaaaaaaaaaaaaaaaaacatggttacaatgcagaactccatggcgggctcaggtttgctctcctcccatctcccaatcctgatattgggagtctgttgactcttaggaggtgggtttgtttatggtttgtcctccttgtccagcctacagttctttctgctagtacttttaagccctggttaagtcattgaaaagcaccaattacagacttacataactgtgtcaggagcatttctctgagggatttgctcacccctcggagtcagttgcccagggaaacaagctggcgatgtcacaaggcatccacttctagttcttcctcagttcccttctgtggaacctgagtcagagcctagtccggcatgctgcctagcccagccacgtctcatcctattcatggcagagcggggactctcaccctctcccagcaatgtctaaagtcaggtattttggggtcatggccatagtaaggatggtctcctgtgctgcttcttccctcccagggcacagaaatgcctatgcaaatggagtgtctaggacagccctgggttactcttggttctctagggtatagttacaaaagtgaaaaaaaaaagaaaagaaaccattggagctgctccctggaggatcaaaggttgttgcagactttctagaatctcagagacctcaggagcaaaattacaacacacttttcctttctactgttcatgccctaagcacacccatgatctggtttatcaacctgctcctccttttctcaagagataaggttgcaacttccttgttatatgcaaatgaaaagaaaagagactacagccatggaagtatttcgctagattttcctagtatttcatgcttacttcatttaaccatgcccctgccccagtgccctagtgaaacagtacaatgtacagctcttgcattgctacctgcccttctcaaagcccacatgttgtattttatgcaaatctacagattatctatcattatctaaatgcaggcatctgaaaaccagcagtaatcctgcctctgaagtttatcaggaaaggagcttaaaagagaaccaaattcagcctgtgttggaactctcagtcccagaggggtgtggtttgtagctctccggcctgctgttggacttaggctgtgacccacagaaggacgccagaaagtactcaagacattcacggtgccccggtcagcactcgccatgacgaagacttctacatgcatataccacttccttgttctgagctggtatactttcctcaattattacatctcacaggaaggaaaagacgaggtgaaacccaaaatcttggcaaatggtgcaaggtggaaatatatgacgctgcttaatctggtaagtccatatgtccgtaccaggaaccgatccatttctctagaatatcagtgctgccacacatatcatctttggattttattaaatacacaattttgttatttgtcttccttcttcaccgttttgtgagttttgggttttttgtttacttaacaatttgctctgataaacccaatttggaaattatctatagttaacatttctatgctggctcattgttaaatgctctcttgaaaaaaaaaatctcatcttggagctcttttcagatgagctcaaagaggggaccatgctaatggtttcaccatgggattaactacaaatgcaggaggcattttgaactttgcttggggaagtctgtgaagagaaggcagagtggcgtatggtgtgtaggaagtgtaatttccaatgaaggaataatgccattttacagcacacacagactaacagatttatctaagaaaagcaaacacattttgccatgttcagctcccacctcaattttttataggttcaggctccatcttaaaggacaaatcacccaaccgaatggcaaatacacattttcaactatttaaaaaccaatcttatgacttactcctttcttgtcttcctaacctggctgactgcattctgatgaagtgtgaatgaatgggagaaaagcagattatgaaaaatactttgaggaatagcttaaaaaaatacttttaaagttaaaagctaataatggggaatcatttggggatgtgaattaatatttgaggtttttgactaaaatcttgggtgccacataaacatctgttttcagaat

SEQ ID NO: 10918 - DNA, 6000 bp, Homo sapiens; identical to SEQ ID NO: 3437

SEQ ID NO: 10919 - DNA, 6000 bp, Homo sapiens
tgtaaaatgcttttcaagtgtgggttttgccctgattgttgcaaatacaatttccaccttctggaaaggtaggtttgctgtggaggaaataatgtactagatcattgtcacagaaaaaccaactatgatttatggttgtgttttcagaattcaacattaaagattaatgtttatttaaacgaacacattcctgcattcaggatgtgaggccatttaataaaaagggcacaaagcctgtcagagttttcaacggtgcttatagctgccagctggattccaaacaggtaccacattgtctctgagctaatgtttatatttttccattcaggcaccgaaatagttaatatttgaaataagtcttcaaaagaaaacataagagattattgagttcttgggactggatcctttatttcataagttcagatcatcttaaatgaaaatgccatgattatctgcagttaagtagatgacagctattctacatcagacttgatttttgtcagctaattacataattggtaagctataattgaaaccttatggcttaaaattccttaactcctttttgattcatgtttgtagtcatgttgtcaacagaggcaaagttaagcttgatgatggttaaaatcggtttgatagcaccatgggacatttttctaacaaaaataaatgcatgaagagacatagccttttagttttgctaattgtgaaatggaaatgctttacaggaagtaaatgcaaattacttttaagtgtgctttaaagaaaaatattttccccacaagagaaatttaaataaagaattttatttgtttatggtttgttttagtatgtttttgtgtccatgatgagattaaattttttatctgcttcctgcttctggctctactgctgcttcttcctctttgtgtagaagaaaacagatttccatttgcttctcactccaccaagaattaccaagaatatatctgcttcctttgtctgaaaaaaagccagcgagaataattagaagtaatagaatcttatttatatcaggagtgccaaaatttaaacacctaaaaaaagatatttatatataatattccctttgtagtgacaacgaaaaagtttaaatgttaatcataattttaatcattaaaaataaaaaatgagggccgggtgcagtggctcacacctgtaatcccagcactttgggaggctgaggcgggtggatcacgaggtcaggagatcgagaccatcctggctaacacggtgaaaccctgtctctactaaaaatacaaaaaattagccggacgtgatggcgagtgcttgtagtcccagctactcaggaggctgaggcaggagaatggcacgaacccaggaagcagaacttgcagtgagccaagatcgtgccactgcactccagcctgggcaacagagtgagactccatctcaaaaataaaataaaaaatgagaatagatgttaatagtagagtagcatacatcatagaggtaatacaatagtacatttctgtgggaaaagggttattctggcataaattgctttcatttagaagagctaagttagaacttcagatcacattgcaaaacatagatgggtgaaagtctaaattcttaaaaaaaaaatacagtgtagtatactagattaaataaaggattatcggctgggtgcagtggctcatgcctgtaatcccagcactttgggaggccgaggcaggtggatcacctgaggtcagaagttcaagactcgtctagccaacatggtgaaaccccatctctactaaaaatacaaaaattagccaggcgtggtgacacgtgcctgtaatccaagctactcaggaggctgaggcaggagaatcacttgaccctgggaggcggaggttgcagtaagccgagatcgtgccactgcactccagcctgggcgacagagcaagactgtctcaaaaaaaaccacttttagtctgctttcatgagcaatagttatcaatgaattaacctactaatttgctatatcttgagttttttacttggaatttttcaaagtttttccagtgtagtagctttgcttgccttaccttcctgcttagtgaaattccaacatagaatcttctgggtttttttttttttttttttcagtctcaacctcctgggcacaagtgatcctctagcctcagactcttgggtagctgggattacaggtgtgcaccacacacccagctactttttatttgtttttgttttttgtacagagaggatcttgctatgttgcccaggctggcctcgaactccggggctcactcaatcctcctgcctcgcccacaaagtgctgggattataggcatgagccactgtacgtggcctaaagtcttgtatttcaatgaggcagcactgtcattacgctaagcaccatttttaccactgatgtggaatgtactttaaccttcctaaacctcagttttacccaccctcaaaataagttatcttttattgtacaaatgtcccaaccaaaagcataagcaagagcagacaaagttaattatactaaggatacatcattttatccttactacctcttgcagtgtctggcatatagtaggagctcaatggatgtccactgaatgctgaaaagaagtgaaaggtagtagcctcacatctgtgtcctaaagaaggagactaacattttcatacaataccaaaatagatatattcattaaaaatgaaaatagatattcattacagtgtctctgagttaaaaagatggtatagttaaacattctgggctaagcctgtgtgtgtgtgtatgtgctaaaaatatgtttctttaaaggctaatcagccaaggatcgttggggacaaaatcagattcattggcttgatgcattgaaagagtacctgtggaatgccatgtgagcacagaaaggaggaagtgtcttttgtaaagatttggcttcctattaaaggattccagggagagtcttggaatcagagctgggatccagttggttgctgtttctgaggcagattgagagaaagggggattaatgagggattgggtgctgtcaggaggtgaagggagtttagcaattgggtatccccagttatggatgggaatagtaaagcaaaggtagaaagtagtagtcattcaaaaatggaacacaaggagttgtgttgttttgtacctgctgcgtgacttcagaggaaacaacattgcctgttaattttgcttctgactttgtcctctcagcctgatcattgatcattggcagtactaacttttccaagtccaagctgattttcactctttgagtcctggacaggtttttactctttagtttttatttatttatttatttatttatttatttatttatttatttatttatttattttgagacggagtcttgctctgtcgcccaggctggagtgcagtggcacgatctcggctcactgcaacctccgcctcctggattcaagcgattctcctgcctcagcctctcaagtagctggaactacaggcgcgggccaccactcccggttaattttttgtatttttagtagagacgggggtttcaccgtgttagccagaatggtctcgatctcctgacctcgtgatccgcccgcctcggcctgccaaagtgctaggattacaggcgtgagccaccgcacccagctggtttttactctttaaatgtgcattatcttatttgattcccagaatcatcctatatgaatgctattatcttcattttataattgaggaaacaggtttatctagattaggtaacttgtctgaggctcttcggtaaatacgagtagccaagaagcttattcatcaacagtgtgtgactcagccctaagcactgcacttatacctcctagtaatgagatgtgcgaggaatgccctggctaccttttctgctcatgatattatccctagatgctttcgcatctttattaaaacagtaaaaatgcaagagtcttccacccaagttttctgtggtttagattatcacgttcctcaagatgcaaatgtcaaactatactgggcatccagttaacctgcaaggcctggaggtgatgggagcccctcctagcacaggttcccagtctcagtcagaaagcacctgctcaaaatagaaagataattacagagtaggggccaaagagactcccactggaagaatggaacttgtgtagctggggtgacacaagctggggacaagctgggggacacattcgcgaagggtgtttgacccaggcagtgcacccacggctcccttgagccaccctggcccgggtgtttatttggaaggagtgttcatcccccagactgtttagggccacggtgacagggaagggcttggtgaaggaaagcaggtagggtatgaaggccgctcaggttcacgaaagacttttgcttggtcccctgcggggtgggagtgtgtcgccccggtgcgggtacttagagcgcaaccggggagctgagcaggggagctgagcaggggagctgggcaggggcggctgccgcgccccacatccctgagggcgtgtgtgcgcgtgcgcgcgcgtcgccgtggtaaccgcggcggcggaaaggcgctgaatcactggcgcgcgctttccccgagcctgcagaagctgccgcgggcggtgggcggggatcccccgggggtgcaaccttgctccacctgtgctgccctcggcgggcctggctggccccgcgcagagcggcggcggcgctcgctgtcactgccggaggtgagagcgcagcagtagcttcagcctgtcttgggcttggtccagattcgctcctctggggctacgtcccggggaagaggaagcgaggattttgctggggtggggctgtacctcttaacagcaggtgcgcgcgcgagggtgtgaacgtgtgtgtgtgtgtgtgtgtgtgtgtgtgtgtgtgtgtgtgtgtgtgtaagacctgcgatgacgacgaggaggaacaagtgggacggcgagtgatgctcagggccagcagcaacgcatggggcgagcttcagtgtcgccagcagtgaccacaggtacggtatctacttcccagagcgcctggccgagaaataggaaagagggcagccagtaggcaggccaatacccaacaaaagtagaatcgagacgccctgagttcagaaggtgagtttcttaagattcttctgggcattcaggaaagggcattttttgattgctgcactgattgttgactagtagggtggagtcggggaaatttgagtgtcttttcccaacctcacgaattgcatttttttagaagtaaggaatcgttttctttaaacttcattcagaactatttatgtgatctttcctattatttgctaaatgcattttgtctctgttccttaccataacctgaagcttaaaatctttctcttcttccctttgaattccctccaaggaatgtcacaaattaatcgggaggataaacctgaaattttgagagttatcatcttaaggtcatttgttaattaaatacaaggaggaaaaatatgatatacatactcatgtgcacttttattgctggtttgttcatcaaaacatttttgtttgtcggtgaaatgttagtattttttccactgcttgaattgaaaagttgaatgatgtttttgatagtaacagaaaaaataaattgtagacaatgttcccccccacacacaagaattttggaagtaaatgttggtatttatttctttattcctgaaatacatgctcactttccaaatgcttcaatttattataagaagaccacaattgtagagactactaaagttatgccaaatctaaacttttattttgtgctttttttagtattatttttaattcagatgaggaaaactggaggtgtcagttcagttatagacgtaggagtcacagagaaaggtgaattcctctgtaatttgaaaaagggaaatgtaaacatattacctaagtactctgatttatttgtattaacca

SEQ ID NO: 10920 - DNA, 6000 bp, Homo sapiens
catctcaggatctgtttctggggaaggcagcagttgattttggcaatcctattagtattattttcatgttaatacaggcatgctataataaagcaaaaaagtatattcattgggaacaaagatattcaacaaaagagaaatatgtaagactataaaatcaaaggaattttgagaatagccctaatcctaaatttgaattagaaatacaaggaaaaaattataatttcttttcaaaaaaatacccttttcaagttcttccactgaaaacatctaaaagcagtgagagccaggaacaatgagcacttagtgttcagagtgtggtctctaaacattatttcctgctgaaaggagccagcacttcctaagaaagcccagatctgataatagaaaagaaaaaaaagaaaatatataagaggaagctggaaagttttttgtgtgttggaagacaagaaagctattcaagaccacaagagtcatatcataatgacatggaaatcagcttgaagggactcccactgaccaaagaaggaacaattggagcatcgaaaaggaataagaactgcaatagactgtaaaacatcaaataaaatccatgaggtcataatagtacttggtcatttttgctaagacactaacttattttagaactttatcaagtaactatggtaactttcctattaaatctgtatttccagcttaccaaatgtttgataaagtaaatttccttttttataaaaaaattctagctcataaatgaaggagacatgatagaattagaaaatcactattttataacttctttttttttttttttttcgagacggagtctcgctctgtcacccaggctggagtgcaatggcgcaatctctgctcactgcaagctccgcttcccgggttcatgccattctcctgcctcagcctcccgagtacctgggactacaggcgcctgccaccatgcccggctaattttttgtattattagtagagacggggtttcaccgtgttagccaggatgatctcgatctcctgaccttgtgatgcacccgcctcggcctcccaaagtgctgggattacaggcatgagccaccgcgcccggcccattttataacttctaatcaaatgatagatctaggcaacatttactaactgtagctaaaagccataggtgaaatgttggtgaaaactttattaataagtcaggctaagaatatctgaaactactgattaatcttactaccactaaaagtgagacaacctgctattatgtgcctcccaacacggagcgatagtaccctgtatcatcccatatccctgtgaattgtttttgtgctgaatctaaccaagcctctatataaacctcacggtttgcaggatgtaaggaaatacaaaaatatatcaaataatcctaaaagcgagctattagccaaaccaattaggagagacactctgcaagggatcctgttttattgttgttgtttttaagtaatggcaaatgtaaactgggagaggggattattataaaataagagacatgacagccgtaacaattaagcgccattatgtggatcctattcaaatcctcacttaaatcaagcaaatataaaggacacaattttgaagcaattgggaaaattgtcataaaggttggatattaggtgatgttaagggattattgtttatttactagatgtgctgataccatgttagttatatcttttaaggtcctaatgaattagatagccatgctgaatgttttatagaagaaatgacataatgtctgagatctgctttaaaatgctacaaaaaacaaccattgaatgttgttgataacattcaaaaggccaaatgaaaactcaaatggccaaatattgataattattgaagtgggtgaatatgtacacagttatcttaaactgatctacttttttgtatgcttaaacatttccataataaaatgataaatttaaaaatttaatacataaaacacagaatccaaaagaaacaatttcaaagaatctcacagagcagcagaaagctttggggccagcaaacagaaagatggttctccttcaggtaatcagtatccagaactgggatactgatggcagatgggagtgttattatttaacacatggactttgaacaactgctgacctaggggtttcaatcactaaaagggctcctctttcagaaaatgccagaaattgcccagcatgaaacaggacagtacaaacattctgcaacacacagaagaggaccagcagaatctggacttttgaaaaagaaaaaatctaactgaataacaacatcaaagtctcctgggcaaaggggttaaagatttacaacatttctttagaggaaaaaaataactggttgaatttacagagcatctgctatgtgccaaacatttaatgagcactttaaaagcatgataaaaattaaaaaaaaacttgttaagcatgaaataaattacctataatgcaaaatcactgattttagtgcttggatatttttaagtaattagtagattaccttcaaagagttctaagttaaaagtattaggggccaggcacgacggctcacgcctgtcattccaacacttgggaggccaaggcacaaggattgcttgtggcaggaagtttgatatcaacctgggcaacacagcaagaccctgtctctaccaattagctgggtacagtgttgcatacctgtaatcccagctacttggggctgaagtggaaggatcccttgagctcaggagttcaagtctgcactgagctataattgcaccatagcactccagcctgggtgacagtgtgagatcctgtctctctatgttttttttttaatgtttctggatattgctataaccaagtggatgaaccagaacctacagtaattgcaggaagagccatgagagaagccacaccttccagaggacatgcctcaataaaatgtacctctttctgagtatgctgaatgtcaaacagatgtactgtttagagaggagtgtggaggagacagggtgagggaaggagggaaagcaaggaaggagggagaaggaagaagggaaagagaaggaagaaagaaagaaaaaaggaagaaaaggaggaagaaaggaaggaagggaattaagagtaaaaatttaatatggcatttatggggcatttagaaagccacaacattcctgtgagaacagcattgtatactcagagccatccttaatagagaaatcttgagagcacttatggcaggcaagctctacctcctgggcagggagagagactaagggtgtctgcttattatgccatgaaattactggcagattcccagtttctggtccactggatgattttgacccacacaccttccctgaagctttaaggaaaaggtaacagtaaagttaaaaattaagcttttaacttcgacacagtgatgtcaaaagatttggtgaatgatttatggggctaaacttggtaatcctagaaagtcaatattgtgtaaagttgagagaaaagtcttcacagcggaagaagaaatcacttttttgtcccgaatcaggttagtctacggggctcattaaatgaaatgagcaatcagttgattccccagagggccgtaagggggcattccctggcaaagatattattgaaagtacttagcaataggggaaaatgtggggaggggtggaatatgccctatcttctgaggcttttcacaagagaaaaaagaacatatttttagcaatcagtgtgaggttcacagggacacaaggaaagagaagtatgtgttgtacagtgtgtgatgcttgtatagctgtggtgtgctgtgtctgtaatgtgtgtggcacactgtgtacgcctggtgcatctgtgcccatcatttatgtgtgtgtgtggttatgtgtgtggtgtttgtagtttgtacttccgttttgaggatgcagtattgtaacgtatttatatgtttggtttgctatgtgtctggagtgtatgtgtggagaacataaggggagtttgtaccatgtgtttatgttgtatgtatgtatgtggtgcatacgtatgggtggtttgtgtgtgcatttggtgtgtatgtatatatgtattgaaataaacagcagccccagaagaggttccaatgtgtgataatgatggttgacaaattgcttattcaaaaatattttgcaaatccaatctcaggactttggtatctttggggcactaggtatcatataatctgatatggtaaaatcctgaggtctaacctgaccagcacatattggtgctgaattctgatggtaaggggttgcctgataggagactgctccattctgattctccactgagcttcctgccataaagctttgcatcagtggctgctctatccacggaaactgaagatacggacaggggcatgtggacgtgtaacgaatgattagcctctgcttgagttgatcttatcaataagcagatagtatcttccagctctattaagatacagggggaaaaaaggaatttgttttacctttgcttactccttttctgacattcttcctttcttttcatactgccgagtttctgacctatagcaatctccttctgcctgaaaggcttcttttagtgttccttacagggcaggtctactggcaatgaattctttccatttctcactttggaggaatattatcacggatttagaattctggattggcagggttatttgtttgttctctgtagttttcaggtcttccatatatttttaatcaaccaaaacaatcacaaaagtaaaataaatatcaagggaagcacataatggaggtgaatgggcactgctgtgatggagcaagttatccttggaagcggttttaaatcagagaggagtactgggtagtgtttggtcagttgcctctctacattatgctgacatcaacgtgttttgcactcacagtgggtggaggcaaaacccttcagcaagaagagaagcaacttcagccgtgtatgcaaatggataaccggttgcctcccaaaaaaggtagcactttattctgttccattaaacaggtgttctttttcttaaatattacatcacagattccatgtggaagaatatttttgtgatatacatatggggtcttaaaaatgttcagaaaagaaggtagaagaaaccagtcctactatggttttccaccagaaaagccctaaataaaaagattctacatactctggtggcttacactttattttcatttttgcgcacttgtcagtttatcatttagtggaaaatatcagaaaaaactgggctattttggttccatctccaagagaaagagagatagatctgtaagtggaagtaaggcaggatgaatgttcttgagtccctgcattcttggacatcaacagctgaatgtgtactgaatattttttgagagaagctgtttattttaggcagggtagtgtaatgacaataaaggattactgctattggtttagcgttgtgtcaatgtcataggggacaaaatcccagaaaaggagatgagcgatagattgtatactttttcaacttatgaaaaagttactgtatattaaattatgtatttcttcttgtatcaactttgatacttaattattttgattgtttaagttgtccatttaatctgcattcaaagtttatatatatatgtttttttctatatattattcatttctgcccttatgcatttaattccttttagactttttgggtttgttcctttgctcagtttccaagtgtttaaattctttcttttttgataaatatatttacagatgcacattttactctgtccatgagtttgatatgcggtattcttattactcaatcccaaacactttagaattccccctgtggtcttctttttaacttaaaacttgtttagacataattcatggacttcctggagcaatgtggaggagagaaatgagtaaaactcaaaagcatacccctaaatgactaagacaatga

SEQ ID NO: 10921 - DNA, 6000 bp, Homo sapiens
tgattaagacaaactgtctaacatttggattcattgtctccttcctggctaaatatgtaaaaatgtggcaagctagcctagcagctgcccctgtgctgctgcttagaaactacttacctgcttgacagattactgtctacctggaaaatcctagaggaaaacctggaaaactgaaatgataaaatttagcaaagcagccaaatacagtattataacacaaatatcaatagcattcattcatagaaaagcagttaaaaatataatgtaacagtcttgcattatatttatacacagatatgttaataagcaagaaaaataacttaaaataagctccatgaaatgtgtaaagccccatgaagaacaccataaagctttaaagaagtacaaaaagagttttcatacctcaaagcatctagcttcttaaatggcaaatcacaagtctatacaaatgtctgtcatctatattaatctaaaaattcaatgcaattctgatagaactgtcttcagaagttgaaaaacaaaacatttgtacagttcaattggaatcaaagatgattccaatactttcaaagggcagttcccctactgtggccgaaaatatgttaaaacgaagacacaagatgatggcaattgaaaccagaaaaaaaaataaatgcaacaattatacaacatgtgtctaacctcaataattagataaattaattcaggctattcacattaaaagcaatggggctgataaggtttggctgtgtccccacccaaatctcaccttgaattgtaataatccccatgtgtcaaaggtggggccaggtggagattattgaatcatgggggcagtttcccccatactgttttcatggcagtgaagaagtcccatgagatttgatgtttttgtaagtgggaattcccctgcacaagctctcttttgcctgctgccatgtaagacatgcctttgcttctcgtttgcctcctgccatgactgtgaggcccccccagccatgctgactccatgaattagtaacaccaccaacaaattattagctaaaacacattaactagaactaactagaactctaattttaaaaaccaaggtagttctgaaactctctttgtgaaacactgtgagtccgttaaacattcttcctttataaattacccagtctcaggtatgtctttattaacagcatgagaacagactaatacaggggccttcactaaatcatgtggtgaactgagaccatttttggccacatagtatgttttttgaaacacaaacatacaagcatgtgctatccctcattaggaaaaatcataaacaaaatagacctactttttaatatttaaggtagaaaggagaaaagttttactaagtcaattatataggatcctgaacaattcacaaagaggtaatacaaagggctatccatcagaaatatgaatacattaagaggtagctattaacagaaaatgttgatggctgtgaacagagcctttgtcttatgttctttgaatcctcaacagcagcttatttggatagaattggtgtagttaataatggccttgatgtcctcagatatagcatgcctaatcaattccctgggtaggagcaggtgcacagatcattagctctctctggaggcgatagtgcagtatctgttacaatgggcctagagagagtcttgtcctactgtgtgcttgacgatatccttgataaaatagttctcaaaacatgttgccttgtatgaaatgcccatgttggagcacacttgtttcaagaccttgttaaagcagatggagtagttctctgtagggcatctctcatgctaatcttctgagttttggtaaaatttctttgagttgtttttggagatggcaaaccaatgttcttaaagtcaattatggcaatagcaaactacttaaaggaagacccaggcatagtagattcagcctcacactacttagagataaaaagactggcagccagtaccaagtaggaattatttatagttgccatattcaaagaaagcatagggacaacccaatctctcagtggacgaaaactaaataatgcatgtaaatgagctgatcaaattccactctgatttaatagtgttcatatttggcatgaaccactcagaaagcaacaccagacagcctagtacccgagtgtggcctgtaccaagagtactttgaaaagattcttcctacagcacctaaattttgtaggtttcagcttcaactacttgagagaaactaacctcctcaacctaagtctatgaaaaatgacactggtcaagtttgggtcataaatccagccacctacaatcaactgctgtcagaagctgcctttttgagtgaaccctagcttgagcaggaattatctgacctggaaaagaaaagtgatcctggaaaacatggcacttagatttagggaccagtgtctccaggactgattcaaaatcttagtaaattggaaaaattattttaaaaattatggagaaggagttggactagcaaattaggaaacagattaaaccaagataccataagaggttgagaacattatgaagatgatatttaaacttcaaacagagcacaaaatgatatttaaagactttaatgaaaaagcaaaggaacagaggctgtcacttcataagtggtacattagagcacatgcacacagtactctataatcttaaaaacaaaccactaaagaaagcaaaccacataagaaaacatgttaaagttgagagaaatttaaaatttctcccccacctcctgctgtgttaatgtactacttgattgggtgattcacaatccatgaattattaattactaacacaaccaatatattattagcaaaaacattaactagaactctaattttaaaaaccaaggtagttctgaaactgtctttggtatatgatgttcaagtctgataaaaggaactcactggcagctagtgtacttggtattggccaatagtgttcttggccagcaccccaggcagtaggaagcatttggccttttgaactgcctggaggtatggtcaatcatctgttacaatgggccagatgggaggccttaccagtgatccactcgaggatgccattgcaaaaggaatttatgattcacatggccttgggtcagatgccagtgtatctgtttcaacatcctacaagattactagttgttcacttagagtctctgagcagcagaacttctatttctctcgtctttcttgatcttaaccctggcatcctgttggaaaatattctgatgcaatggagcttccaagtttgctataaggaggcaggccacctatggaacagaaaatctcacaggccaaataaagatgatagatatgcatggttggttaaataaatttaaaatccactgcaagaagcaagggaaaaagatagcataattttacatacttagaatagggagcaagcaagatggtaggaccatagtgctgacctggaagtacagaatgtgccaacatcctgtctttccctgccacattaactttcccagctaatggtatgattacaaggactagcactgagattccagcaagggatcccacagacaggaagtgccgtaggagaggataatgacacacacttgctctatgagaaagacatgctaaacagccatgggttttatttatttctttttttaaattgacaaataaatcttgtatatatatatatttatgttgtacaacatgatgttttgatatatgtatacactgtagaacagctaaatcaagataattatccattacctcacatacgtttctttttgtagtgagaacgtttaaaatctactctcatagcaattttcaagtatacaatacattgtattaattacagtcaccatgttttacaatagatctcctgaaccgaacttattcctcctgtctaactaaaattttgtgtgctttgaccaacatttccccaacccgtaacgtttggtaacctctgttctcctctctgcttctataagtttgatatacttagattccatatacaagtgagatgatgtagtgtttgcatttctgtgcctgtttttttttgttgttgttgttgttttgttttgttttttgcttaccctaatgttccttgggttcacccatgttttcacaaacagcatgacttccttattgttaaaggctgaatagtagtgtgtttcttgaacagagaacacatggtgacagaatgggtgtccccagtaggtggctgaatcaaggccttgaaaatactgggtgcttgtataaccttcagtgtaccctggatatctagtgttagctgtatatttagtatatcataagtatcttgtgcccaggtgtcttgtttatttcaggcctcatgaatatagttatctctttgtcctcccatttcttaacctatgtatgatatacttattaatttccatgaatacataacacatgactttcatacatccacttcccattcattttcttgctctctatagaggaaataaatattctcaaattatacaaaaaatgcatattacatatggctttcttggagccctttctagagattgtagaacacttcaaaactttaggcatatcaaaatctgtttctagcttccttgaaaagagaaaaagtgtctacaggtgacaaggaaaatcctgcagatacttgtattcaaaggaagtctgaaaaagtctgattggataaaaaataacggaaaaaggcatgtaaaagtatcttcagttctgctttgcttggatgaggcaccttccagagaagttagccgttagggtgtgtgtgtgtgtgtgtgtgtgtgtgtaagggatatagtccttatgacctctgcttttggtttggcattagagggggctacttcgcaggagacatctggttgtgggaagcagggtggcgaggctggcgctgaagtcccagacttggtcttccctggccgggctccagcgccgtctgctccgcaaaggcatctatgccgagcgtgtcggggccagagcgcaggtgtacctggcggccgtgctggagcacctgaccgccgagatcctggagctggctggcaacccggcccgcgacaagaagacccgcatcatcctgcgccacctgtagctggccattcgcaacggcgaggagcttaacaagctgctgggcgaagtcaccatcgcgcagggcggtgtcctgcccaacattcagggcgtgcttctgccccagaagaccaagagccaccacaaggccaagggcaagtaacgtccccagataataaagcccagcagagcagatgacctacttttcgaggggaaagaaaaagtaaaaccaaaagccagccacgagttcaagtaaaagcataggcagataatgcccaagagtatttcaacaaagtctctccattcctttcattcattaccctgatactctccactttgttttctttaccaatattatgtcacattggtttcctgaaagctgagtttagcactggatttcaatgcaagctgtattaggttggtgcaaaagtaatcgcggtttttgccattattttaacgcgcgcgcgcgtgtgtgtgtgtgtgtaagggatatagtctttatgacctctgcttttggtttggcattagagggcactactttgcatgggacatctggttgtgggaagccattacttttaatggcaaaaaccgcgattacttttgcattaacctaataattttgtgaaagagatttttatgtggtatccagaaaagcacttataaaacagttttgttcatgtgggctgttttatttgccatcaagttataatgaatttgtcaactgatgattaatttcttcaagcctaagggacatgctttagtgctttttatttggcatgtttaagattgtatttagcctttagatattttactatagggaggtatgtatgtgccaattggttgaaggtttcactctgtgggctgtcagctttcccaagaggtctcattctagggtggtcagc

SEQ ID NO: 10922 - DNA, 6000 bp, Homo sapiens
tgcatgtatgtacatatacacatacagacaaaaatgtatcctatgtatattcacacatgtatacacactcacacatacatagagttttacatccatagtttataaatgttgcttttttttggtcacctttttgctaagtcttacactttttttttttttttttgagacggagttttgttgtcattgcccaggcttagtgcagtagcgcgatctcacctcactgcaacctcgacctcccgggttcaagcggttctcctgccttagcctcctgagtagctggtactacaggtgtgcgccaccatgcctggctaatttttgtagtttttttatagagacgaggtttcaccatgttggccaagctggtctggaactcctgacctcaagtgatctgcctgcctcagattcccaaagttctgggattacagatgtgagccactgcacccggccaagtcttacacatcttttttttaccactaaactgtttacccaaacctgataacccaagtcaacagctattatggctcacacaatcttatgtaaacaaagatacagatatatagaattttcttgattaatattcagaaaaaaatggagtccctttatacgtccttagtatctgctttactcatttaaaaatgtattacattatatgaaagtattcaggtcaaatgttatagatgtgattcattctttttaactgtgttatttttctgcaatgactatgtatcacaaagtactcagtcttccactgatgaaaatttgggctatttccagtttgtcttccatttttctttcttcctcttggattttcactcaatgtgtttactaatttaggaagaatcaatagtttttatggtattacttctcccattcaagaatatagcatatggtatagtatagtagagtacttagtttaatttagccagatcctgttttctgccctttaataaaattctatcattttctgcctttgagtcacattttccttgttcatataattcttaaaaaatgtatagttttcattctaagggaacataaaaacttctttccatttctattcctgtctagttaattctactattgggaaaagtaactgttaaaaaaaattcttatctttccagtcagttcaccacatttcctttatacctttgtactttaatccccagtcatgttgaacacttcttattcctcacaccaagcctcaacgggtttgctctttctggaaggtgcttcccctgtattactgacttattcataccacacatggagactggcgcagccctgttctgcctgggaagccttcccctgatacccccagttggcaggagtcttcatttgttcttttctagtcacctgtgcaagtttgtattgttcatgtttatcatccttcattctagttgtctgtctctgtgtgtggtctcattcagtggactctgaactcttatgaagtcatgtcatgggtcagatcttaataaattaatattgtcggaagctaatgtcatgtctagaatacagaaaatttatcaaaaaaaaatatagtatgttggctgggcgcagtggatcaagcccgtaatcccagcactttgggaggccgaggcaggaggatcacatgaggtcagaaattcaagaccagcctggccaaaatggtgaaacctcatctctactaaaaatacaaaaagtagccaggcgtggtggtgcccacctgtaatcccagctactcaggaggctgaagcgggaggatcacttgaacctgggaggcagagattgcaatgagctgagatcatgccactgcactccagcctgggcgacagtgagactccatctcaaaataataataataataataataataataataataataattgtatggaattgaactgctctgattggaaatagctgttttttaaaaaattattattttttaagttcctgggtacaagtacaggatgtgcaggtttgttacataggtaaacgtgtgccatggtgatttgctgcacctatcaacccatcacctaggtattaagtacagcatgcattagctcttttacctaatgttctcccacacccccaccccatcctcccccaacaggccccagtgagtgttgttcccctccctgtgtccacatgttctcattgttcagctcccactcataagtgagaacatgaggtgtttggttttctgttcctgccttagctgttaatgtcaggccagagaggcttaaatttttaaggatctctggacttttcttctacattactcttgatgtttataaatgttacaacttctttaatttcatttaatgtataccttattgagttgatttaactgagttaactttgttatatgaaaatcatgattgggagtgagggggttaaaccagctacagagatcttgattgttggtggtgaagcaatgcaagaattcattcattcagtaaactaatgtttattaagcgtgtactgtcttagtctgttcagactgctgtaacaaaatatcataaactgggtgacttataaacaacaaaaaatttatttcttacagttctggaggtgggaagtctaagattaaggccctggcaaatttagtgtctggtgaggacaggtagccatctttttgctgagtcctaacatggcagaagggttgaataaacttccttgggtttcttttataaggacactaatcctagtgatgaggtttctgccctcatggtataactactgcccaaagacccctccttctaatattatcactttgtgggttaggatttcaacatgagttttgagaggatacagacatttggatcatagcacacaccataggacagacactgtgccaagaattgtggatatagtgattctcaaaatgaacaagatcccctcagagagcttgcaaaatccagctataaaattatgctttttaaacaaattatgcagtttgaaaaatctactctgaatcttacttgtggcattgaatactttcggccactctttccttattatattaaatatttactcttgtttgggggatccagtctcacctactttttctaccagaactggtatcagctcatgctctgccttatgcaaattaagaaaatatcataccttttgggtaaattaagccaagaaagttctcctttcttctctttctctctttctttctttctctctttctctttctttctttctctctctctctttctttctttctttctttctttctttctttctttctttctttttctttctgacagggtcttgctctattgcctaggctggagtgcagtggtgcaatctcagctcactgcagccttgaactccagggctcaagcaatcctcctgagtagctgggactataggcatgtgccacaacatcaagctaatttttgcatttttttgtggagacgggatctccctatgttgctaaggctggtcttggattcctgggcttatgcgattctcctgcctcagcctcccaaagtcctgggattacaggcatgagccactgcccctggccattataactattttcattggcttatcaggcacatgataactataataaatcaataaccagaatttttaaataaagaaaggaaggaattgtttcaactcttcctgctacccctctatccctcaaaagggtaggctgaatgttgtcctccaaagatatccatgtcctaatccccagaacctgtaaatatattaccttatatgacaaaagggactttacatgtttaataagttaagaattttgagatgggcagattttcctgaattttgcagatgggccctagtgtaatcacaagggtccttataagagacaggcagaagagtcagaataagagaaaaatacttcaagatgttacactgctggctttaaggtggaggaaaggccaagagccaaaaaatgcagtggtcactacaagctgaaaagaaaaagaaatggattttcccctaaagcctctggagggggcacaaccttgccaataccttgattttggctcagtgaaacccattttggacttctgacctttagaattgtaaataaataaataattttgtgttgtttcaagccatcacagttgtggtaatttactacaacagcaataaaatagaattaaatacagagatctgaggagttgagtaggataagcctactccagcaggttatttcgggagtatggtgagactcactaggatggcggaactcaattaaggaagtctgaagctgataagccagagagggaaggctctcatttcattttataagggttgcgtcacactaggaagatccaatagcaaccacagtctcaaaattaatgattacaaataggacacaattccaagagtcgggagccaagcagaaaatggattagggaagacatggatgatatgaaacaggaaggaggggtacaaggcagcttcctgggaagttgccagggcagtcacagttcacattcattaggctgtgggcaccaaatgcatatggaaaatctagctgacttaactgaactcctgaagaggaatgaacacctcatttattgaggagctactaccaattagaatatgtatttcatttgttcaataaccccatgagtacagtaacacaatccttgctttactaaagcggaagccaattcaaagaggttcagtgacttgtccaagctcagggaaaacactaggaagtgaatatgggtctgactccatcactgatttcaggagccctgccctttcctccacaccatgcccccttgctttcagaaaaaaaggcttgttgactgaatggttgtatgcacagttcaaagcagaaacacacgatgacatcttttgagatactctaacagtgagaacttgaaaatgaagttaaaaattaagcggcaaaaccaagccgaggctttctgagaaagtggggccaaacctgttgccgtctgactgccacgtggctcactatttatccctgtaaaaatctgcaaaagtatttgaaagggaagaagggacagaaaactccctccttttccaagttagccttatagtctagggcttaaaatactggtttaatggtgaaggtaagtgcttttcttctttttgggtagaaggattattactaacttaccaaaggtccattaaggggagggaacagttttaggagaagtcagagaaaagacattaacagcaacataaggatctccatctggtaatattgcctaattccaaaatgaagagactctctgaaaaagataactgattcaatgaagaccctagggcaaggcttgagaagccactggtaccaatggacactgtggacaatggtcatttctccaaggacgctgtgagtattaactgtgatgctgtgattagtcagactgggattggctgtggaatgaaatactgatcagaactgacaagatttgtgtttgggactgtggctaacgagtcttttcagacttctatatgaatttgaaatggtctctcaggaaaaggagaacatggccgggcctggtggctcacgcctgtaatcccagcactttggcaggctgaggcgggcagatcacttgaggtcaggagtttgagaccagcctggccaacatggtgaaaccctgtctccactaaaaatacaaaaattagcagggcgtagcggcgcgtgcacctatgcgcatgcatagtgcgcgtgccagctattcagaaggctgaggcaggagaattgcttgaacccaggacgtagaggttgcagtagttgagatcataccactgcactccagcctaggtgacagagtaagactctgtctcaaaaaaataataataataaaagaaaaggagaacatgaccaaagttatgaataagactgaaggcaagaaaattgtacgcttgtagagatcacctagcttgttgccctcattgtacagctaagaaaaggcacccagggacattgtggtcagcaccaatttctcagaaagataggcagatgatgagagggccctcagtttttctaacact

SEQ ID NO: 10923 - DNA, 6000 bp, Homo sapiens
tggagtgcagtggtgcaatctcggctcactgcaacctctgcctcctgggatcaagggatcctcccaccttagcctccccagtagctgggaccacaggtgcacgccgcaacacccagctaattttttgtatttttggtaaagactgggtttcaccatgttgcccaggctggtctcaaactcctaaactcaagccgtggcctcccgaagtgctgggattaccctgcataagccaccgcgcccggaccttatattaatgttaaattcttattgatattttgtctttttctccatttcccattctgtctcatctaatacgttggcttcttaagtactgtattcttgtatttattatgataattttttatttttccagactaaggttagtatcagttggtaaaagacagataagagagaaggagatagaagaagcagaaatactttaggcctcatcaggtcccactcagtttgctgcttggaagaagaatgatccaaggagggagggatcaacagtgtaaaatgtcacaggtaagtgacgactaactgggcctgtggtgtagggggaaaagatttaccaagaccattgtaggtaaagaaaggcagatttattagagaaagtagaaaaatatgttgccagggagacaacaggcagtatcaacagaagagaagctgactacaaagaaacaaagacttgctagggattttatacaatggaacttggactgattgataacgctaaggtagcaggaagcttaacccgcattcttctgtcagccaaggtgcttgataaatcgaggcgtttgatggtaagcaggaagtttgtgagttatgtacaggagggccatgtgccctgggccataaaaaaagcagacctatcacttgtttgctttatctttgctttcccctggtcccaccagcctgactccttttccctgattaggactccacataaaatgccttcgagatgttaagatgaagactgaaaagtgtcccttggatttggccaatactagtaaaagtcactcgttcccttagggcagggaggtttagaggaggcaggaggaaattcattttaaaacggtatattttattttatttattttttgagacagagtctcgctcctgtcgcccaggctggagtgcaatagcgcaatcttggctcactgcaacctctgcctcccaggttcaagcgattctcctgcctcagcctcccgagtagctgaggttataggcatgcgacaccatgcgtggataatttttgtatttttagtagggacggggcttcccatgttggccaggctagtctcaaactcctgacctcaggtcatccgcccgcctcagcctcccagagtgggtttataggcgtgagccactgtgcctgtccctaaaacagtatattttaggccgggcgcggtggctcacgcctgtaatcccagcactttgggagcccgaggagggcggatcacgatgtcagggaattgagaccatcctggctaacacggtgaaaccctgtctctactaaaaaaaatacaaaaaattagccgggcatggtggcgggtgcctgtagtcccagctactcaggaggctgaggcaggagaatggcgtgaacctgggaggcggagcttgcggtgagccgagatcgcgccactgcactccagcctgggcgacagagcgagactctgtctcaaaaaaaaaaaaagtatattttattaatactctttttttgagacggagtctcgctctgtcgcccaggctggagtgcagtggcgcgatctcggctcaccgcaacctccgcctcccaggttcaagcgattctcctgcctcagcctcctgagtagctgggactacaggtgtgcgccaccatgcccggctaatttttgtatttttagtagagacggggtttcactgtgttggccaggctggtcatgatctcctgacctcgggatccgcccacctcagcctccggaagtgctgggattacaggcgtgagctaccgggcctattaataagaattttattaggcctttatactaaagaatttggacaatgtcccagaggcaaacacaaacaaataaacaacaacaacaaaaaacccacaaaactttgaagatgtctgagtaagaagcgacagaatgaaaagcattttcttctttaagaatttttaaggatgattctattccttgaggtggtatttgaatcagtgaaaaagtacaaatagagaaattaatgggaaggctgcacggctaccgattctttgaaaaatacttgtaaactgacacactggtgcaataatataggttaggattagtaatagaaattaacatgaacaggtaaattaagcaaatcaaaattccatgaaatctggatgatgaagggaagacagtaaacactcaaggaagaggggctgggcatggtggcttctgcctgtaatcccctcactttgggtggctgagatgggagggtcacgatcacgtgagcccaggagttcttgactagcctaggcaacatagtaagaccccatctcttaaaatttcttttttcttacaaaatttattgagaaaaagacaggtgtaacttttttaaattaaaaaaaaggaaggggactgttagagattgctaatgtaaatattccctttcccccactcccaccttgttctacccaactcatctattttgttctacctttttaaaattttttccttttgttttcttttttgaaacggagtcttgctctgttgcccaggctggagtgcagtggcctgatctcggctccctgcaacctctgtctcccaggctcaagtgattctccagcctcagtctccagagtagttgggattacaggtgtgcaccactgtgcccatcgagtttttgtatttttggtagagacggggtttcaccatgttggtcaggctggtcttgaactcctgggcttaagcgatccacccgcctcagcctcccaaagtgatgggattacaggcatgagccaccacaccctgcctgttctacctttctttacccccaggtcacctgcctccagaggtaataaagggttggtaagataaacacaatcaattctgaaaaacaaagccaaactcaaggcttgcatcccccaagtaaaggagaagatgaagggcagctttatctacctatccatatctctcatatttctgcactgtattgcaatgcttattagtcctttttggagtaaatgagaatagacatatcctttaattcttacaaatttcattgttgacccaatctcaaaccaagaccagactgtggtgtggcctggcccaagtactctacatttttctggaaatgggctaaagctatttgggactggaatttgaatgactgggtactcagagtatggttgagaaggtagatgtgggtttggggctggcaagtccacttaatccctcagacttcttgtcccatggggaagaggaccagagtggaactctctaaagtgatgatgtgggctgctttgcctacggagtagccattctttattcctttattttcttaataatcttactttcactttgaaaaaataaaaataaagtgatggtctggaagcagaagcccgccttgctcagatagcaagacaatattgagaaaatctcaaagaaaactaggaaacaccaagtaagggataagaaagcaacttaaaaatgctggaggtctactggatgataagacaatgagtattgtgggactccaagaccctgggtcaccgcaggattcttagtttctctatacttcagaaaggagcaagcaatttttagttgctactcaatacaacaaccctacgtagtgggcattttaataccattttaatggataaacaatcttatggttcaaaaagtaaaagatgtaacgaaatctacttcttactgcggtacaattatcatccccatttcacacgaggagaaactgaggtaaatgaatggtaaaccaacttgcttgggcacaagtgagaggtagcagaactgggcttgttattgacacacagaaatgttaccatctgataattaaacctttctttttctaaacaaaactgcaagtgcctacaaatggggctgtttaataaaaggcctcacttatcaggtgggctcagtcggtgaccctcctcatcctccagcctcttggggaggccaggtgtttgcgctccccagcacctatacaaagccagctttcattttttcgtttcttttttttttttttttttttttttgagacagagtctccctctgtcccgcaggctggagtgcagtggcgatctcgggtcactgcaacctccgcctcctgggttcaagggattctgctgcctcagcctcctgagtagctgagactacaggcgcctgccaccacgcccggccaatttttctattggtagtagagatggggttttaccatgttggccaggatagtcttgatctcctgacctcgtgatccacctgccttggcctcccaaatgctgggattacaggcgcgagccactgcgcgcggccaaagccagctttcttttgcaggggctgagacctggcaccaagaggaaacccaacaaaagacgaggggcccgggcccggcagccgctgaagtttgtaggcccggagcgtgtggcaccatctgctcttgcgaccagtgccctaggatagagcttcagcgcgaccagtccaaaggagagtggcggagcctcctcggcctttccaagaggaaacagctcaggcccccaggccacgaaaccttgtcactcgctggaagcgcgagccaagccccgcccccgcgagccgcctcttccgctcgcgctggggtggggtttacgctgccgccggcatccgctcggacgcggccacgttgtcttgcgcgctttgcccgcctggccctgggactctgaccctcggctaccctttcctgccccactagcgtggccgcgagcctcggtgagccggccgtattcccgctctcgcttagggggcacaggcgcaggcatcggcccggccactccaagccttcggtgcgcgggcgcgtctgggatacgggcccgggaggcgccgccctccgtccgcccggtgcctctcaggaacagcgaaccggagagagcgccggagagttgggctcagtgcagagctcggcgccggggcccatgcccgtgcgcccccgcaggccggcgccatggcctccgggagtgtggccgagtgcctgcagcaggagaccacctgccccgtgtgcctgcagtacttcgcagagcccatgatgctcgactgcggccataacatctgttgcgcgtgcctcgcccgctgctggggcacggcagagactaacgtgtcgtgcccgcagtgccgggagaccttcccgcagaggcacatgcggcccaaccggcacctggccaacgtgacccaactggtaaagcagctgcgcaccgagcggccgtcggggcccggcggcgagatgggcgtgtgcgagaagcaccgcgagcccctgaagctgtactgcgaggaggaccagatgcccatctgcgtggtgtgcgaccgctcccgcgagcaccgcggccacagcgtgctgccgctcgaggaggcggtggagggcttcaaggtgagggcgcggatccgggagggcgggagcgcgagtcggacaaagggaggagagagccaaaggggcttccttttttccgcctagaaaatggctgagccggacgtgtggttcacagccgtcatttcctctctgtccgctccagagcctcagcactcagatttggaggaaaacctgtagctggcgaggaagccaggagtgtccccacccccactctcttttctctgtttacccccatgttacctgtctcacggacacattgtacacggagacatccttttgacagtttaaaagaagtgcataaaaccgcgtacacatcgacaagctgcagacactcttactcccatcggctctcagacaaaacgcagttggacgttaactgacttatgcccattccttagtctataa

SEQ ID NO: 10924 - DNA, 6000 bp, Homo sapiens
ggcccggggagagccggggagccgggcccgcgcgccgaggtaagagccagggccccgggttagcagggctcggagagggggcgcgcggcgtggtgggggagggggcagtgggcgcagggcccagctgggggaagcggggctgggggagaggaggaaccgcggggatggaatcggggagcgctgaggcggccgatgccgggagcgtgggtaagccaggcttctgcgagccgcgggggccgggggagaggaggtggtgagaggtggagtcccgggagggttgggggccgagggaggcaggaggagggtggggacaggctttctctcctcctctccccccaccccgcgcggggctccgcccccgcctcctccgcggggcgctctcttggtccccaggctgagcccggtcggagcctgcgaggcaaccggcaagaggtcgagtagtctccgggtgcgggccgcgccggcggggctcggtccagtcctcatggccgcctctcacttagatgttgctgctgctgctactggcgccactcttcctccgccccccgggcgcgggcggggcgcagacccccaacgccacctcagaaggtgcatccttcttcgacgacctccggccctccttcgctccacttccctttccctgcatctcctcatttctggtcctcatcactatcccatcagtcccacatatcatcccggtctggcaaccccttctgctcggcccgactttactactgctgacctccttctgtcaccccacgttactatccagcacctcttttctctgcccacattgctacactataccaccttcctgtgcattttctccgcctcaatcccctttcccagccccacattactacctcaattactcccttttcttggtcccactttgctgtccagatgatcttattagcctccctttatcctcctatcctaattcaactcgaatatcctcatttagcctttttttttaaagaaaagctccacccacatatcatacccttcatgatttcttaattacttttctttcttacctccacccagcacccttccctccccacttgtgggttctctcatcagctttaaccctggccctttactctctgtcctttagccaggggatctgtacctgtccccactcccaccctctagtgccccatccctcttcctctgtccccagcctgcccacagaccacgccctactctccccttcctcccactggggagcctgccttttcctctttcccaccattcctctctgtatgcctccccgactcaccccttaggttgccagatcatacacccgccctgggaagggggcatcaggtaccggggcctgactcgggaccaggtgaaggctatcaacttcctgccagtggactatgagattgagtatgtgtgccggggggagcgcgaggtggtggggcccaaggtccgcaagtgcctggccaacggctcctggacagatatggacacacccagccgctgtggtgagtagcctcggaagcccctcccctcttcaagactattccttttcctgccgcaaacttagcattactgcttgcaagtcagcactttaaatccagtataccaaaattcacaaatacatttattgaatgactactacataagagcaattttgctctgtgcggttggaggtagtagagctagcagcctgcacagttcatttcatcctcccttcattaggccactgatcattggcctataacattgataattcatcttgtcagttattctctttgaggatcattagtggcagatgatgacaaaaaaattctaaaatgatttcatcacatttttgaatacctctgtcaccaacccagagaccatatgcccaagaaacaaaagccagtttaatattaatagaagccaactataataagaaaagcaaatctgattgtgcatccaaagttatatacatctacatatttcaaagccagagaaccgcccactgtagctgactttgaagagatcccattttgtgtgcttatagccccatcttgggttcctaaaatggtaattttttttttcttttgggaatgtgtggatgcttgcacaggtaagggaggattggaagataggtaggcaaatccttttcacatgtgattttctttagagcaggatgcttgtggacccaaacctgcacctgagtcccctgctctttaaagggaaagagccttcttcaactcgcctctcttcttattttcctatctctccacagtccgaatctgctccaagtcttatttgaccctggaaaatgggaaggttttcctgacgggtggggacctcccagctctggacggagcccgggtggatttccggtgtgaccccgacttccatctggtgggcagctcccggagcatctgtagtcagggccagtggagcacccccaagccccactgccagggtgaggggaacagctgcctgcatgcagctgatgaggacgcttgtgtgaggatgggagtggggtgggaatggataatgggaaagaatggagagctataaaaatgtgggggaggacactggaaaggggagatgaaagtccctttttcctccatcacctgcctcaaacttcctcttgcagtccccggtatcctctgtaggttgggggcttccttcctttaccttttaaaaaaatcttcctgctcccgattcttagacctcacgttttctcttttcctttatgaatctcacctctctcaccttcttcaggtttaaatactccaattttccctttctctaaacttagaaatttccatgcatcaccctcttctagaattcatccctcaccattccttatataattgatttattgtaaagactcagaaataaatcaaacattctactaagaaaaattgagaaggggagctctgggggtggaaacatattagggtaaaagacttaaaattggaggcagcattatcagaagatgaagaacaactcagggatggggtgggaagaagacaggtccttttctgtacttcctagacaacctccattattccctaagggaatcagtgttgtgtctgtctacttttttttttttttttttgccacgtaattttacaaactctcccttttctaggcacccgaactctctgccatcttctctcctgggatgcagtcatcccatttgtatgcctcatacttcctctaccctggtagattctttcaagatccttgggctttactttcctcacataactcagttattctgcttctagtttaccattttattctggaaattgagagtcccatccaggggtggacttatgacactactgaaacttagacttcaaggttcctcacctacagggccctcttcctgtgctctaataatatagagggctcgatggatatgtgttcatatggtaacaggcttttgtaaaaattgcagaaataagattttaacagcaattgcttaaagccaattgtatgtgtaattttttttcttaaagactcccaattttgtaatattcaggcaccacagaaccaagatctgccccaaacttagctattggcattcccgtctcaaattctgttgtcctatgaaaaatcgaagaagaaaataagtcctgacccccttacccccagacccaccttgttcttatccccaggcaccctcccctcagaaacgcaggcttctgctctccccggtcttcagcatggacaggtgtgggagggggctggggatcaggccagggaagctgggcgccagtggtaactcttctctgatccccgtctttcctgctgccagtgaatcgaacgccacactcaggtgagatgagaaacccttaccgcgcgcactgcaatgccctccccttcactctgcaccctccacccccctgaaattctgcccttaggctacggggcgtcgtcctttcgcaccttccccaacccaccccagtttgcggccacccccttccctccctacctgtttcctgcctccagtcccggttttccacgaggctgcggtctctccttgtccctgcttggctacacttccctgggctccacctcctcccagactgagcctcgccggtgtcaggcagagcccagcagagggcggcagggtgctgggagaccctgagctcccaccacgttttcccctgtggggttccttgcgaccttcgctggaaccttttccagcctgctgcctcctaggatttcacctaatggactttctcagcctgtcccacccatcccaaccctggccaggcctctcgcgctcttccccacatcttttccttccgtgtaccccttccctcgtcttttctcaattccatgtcctgtctccctttcttaggcttctgtctacccagccccaggctcccttccacgaccccaccactccctcaaaccagcctcccttccgtacccaactcgttccctccaaaaccgtttcctctcccccacatcctcagtgcttcactgtatcgactcatactcccacttcagacctcaggcgccagccccgtttctctcccgtcccactcgcatccttcccttcctaccctggttcctccgtgcttcagcctcccgcggctccctccgcccaccccgccctcctggcacgccccgtccccatttctcctcccctcgggtccccttaagtgagatccctcccttcctctttcgttcctttcctcctcgaggttgcatcccccctcccctccccgcccctccgactgtcgctcccacctcggcgctcgcttccctccccgcccccttcctgcctccccagctcccgcccgcccccccaccccccgctgccgcgcgccgcccgtgacgtcagagccccctcccagccccacatctccctcctgctcctcctcctcccctccgtcggtcagtcagtccgcgaggagagtccgcggtggcggcgacggtggcgagagccgcgggggccgtaggaagccaaccttccctgcttctccggggccctcgccccctcctccccacaaaatcagggatggaggcgcctccccggcaccctcttagcagccctccccaggaaaagtgtcccccctgagctcctaacgctccccaacagctacccctgccccccacgccatggggcccggggccccttttgcccgggtggggtggccactgccgcttctggttgtgatggcggcaggggtggctccggtgtgggcctcccactccccccatctcccgcggcctcactcgcgggtccccccgcacccctcctcagaacggcgcgcagtgtacatcggggcactgtttcccatgagcgggggctggccagggggccaggcctgccagcccgcggtggagatggcgctggaggacgtgaatagccgcagggacatcctgccggactatgagctcaagctcatccaccacgacagcaaggtagccctggacatgggggtgggtgggaggtgggggcttgcggggcagggggccagccagctgcacgcgcccccatctgtctgagtcgtctctgggattgcgaggcagacccctcccttgtgtgactggcaggagatgggctgggggtgcaggagcttggggagagtcgcaggggctggaggtccaagatgagggtctaggggctcaagatggttaagcatgctgcaaggcagacccttctgccccgctgcgggagtctcgcagaagtgtcggggtttggagaaactggtggtggatttaaggtattaggagacactgatcctctgagggagtaaactaaccctggaatgggttgggggtggagggaatgtcagaggtggggagctggattgggggtttacatttaccatggtaacaaggtaaaatcttggcgtaggttggagctggaaggaatagggacagaatgaggaaaattttgagagacttgagagctctagtttatttatcttaacaaaacagcaaggtagtggtgagccctacctgactccttctcatccttctattcccaaccctgttgagcattcccagactgtggga

SEQ ID NO: 10925 - DNA, 6000 bp, Homo sapiens
ccccaaacacatcctgtacttttccagctcaaggtctttgctaattccattcttacagtcatcctccacatctgaatttgtcatatcccacccactgttcaaggtcaccttcagtgccactcttccatgaagcctcccctgattgattggacagatgtgaacactagctcttttgggtcccccccttaacacttagtcttcagttttcttaggtttttttgtttttgtttttgttttttgttttgttcttgtttttttgagacagggtctcactctgtcacccaggctggagtgcagtggcacgctctcagcttgctgcaacctctgcctcctgagttcaagcgattctcctgcctcagcctcccgagtagctgggattacagacatgcgccaccatgcttggctaatttttgtatttttagtagaaacagggtttcaccatgttgaccaggctggtctcgaactcctgacctcaaatgatccacccgcctcggcctgccaaagtgttgggattacaggtgtgaaccaccgtgcctggcctttcttaggatcttcaagaaagcttgcctttccttcaggcagaaactcaatataacaaaaaaagagagagagagagagcaacagagacagacagatagagagctctcctggccatggttccctcctcatgccggagggtaaggccctcatggctggagtatcagctttatctggctttcctcaggcagctgcatggcacagcacttatactgaaactagcctcaggactctcaacagtagtaccctcaacagagggcgcctgaaacaggtgaatgctcaaaagatgttaaattctgcacggtggctgccagcactttgggaggccgaggcaggcagattggttgagctcaggagttcaagaccagcctgggcaacatggcaaaaccctggctctacaaaaaattttatatatatatatatatatatatatatatatatatatatatatatatatatattagccaggcatggtggtgctcacctgtggtcccagctactcaggaggctgaggtaggagtatggcttgagccaagaggcagaggttgcagtcagccgagatcatgccactgcacttcaacctgggcgacaaagccagatcctgtctcaaaacaaaaaaaaaaagttaaattctgtgtccatgagcagctgtctgtaaggaagttatggaaatgtgaatctgctttaagttgagtaattaccattactgtaacatttgtataatgtctcacaatttagaatgtttgtcccataaatttggttgtttgacttacagcaaggggcaaatctgggtggctgctaacctattgcctttgtatttgtggccctctgcaccagcctttatgtgaatatttctgcacgctcctaagagagtagttttgctgaactgtccctatacagtctttgcacctttactgtgtacatgtgtgttggtaggtgtacgtggtatgttttcctttttttccaggattgcattctttttatggctgaataatatttaattgtgtattgttgttgttgttgttgttattttatagtgacaaggtctcactatgttgcccaggctcctgagctcaagtgatcctcccaccttagccccccaaaatgctaggattacaggcaagagccaccatgccccaccattgtgtattacttttttaatctttctatccttccctccctccccaacttttattttaaattctggggtatatgtgcaggtttgttacctaggtatactgcatgatgctgaggtttggggtatgaatgatcctgtcacccaggtactgagcatagtacccaatagttagtgtttcaacctttgccttactccctccgtccttcttctactggtctcaagttgctattgttgccatctttatgtccatgagttcccaatgtttggttcccacttataagtgagaatgtgtggtatttggttttctgttcctgagttaatccgcttaggataatggccaccagccgcatccatgttgctgcaaagcacataattttgttcttttgtatggctacgcggtgtgtgtcttcatgtgtgctcaggcaggcaggtttgtgtctgtgtgtgctagtgtgttcatttctcccttaatcttgactatttctgtaacaatttccttcttggggagtttatattctaaggatacctacaagtgcatgaatgcgtgcatataactgggtcagtattgcagcaggatggcctgatctccaataaaaagccctcttggcagggcacggtggctcacgcctgtaatcccagcactttgggaggccgaggcgggcaaaccaaataccatacattctcacttataagtgggaaccaaacattgggaactcgtggacgtaaagatggcaacaatagcaacttgagactactagaagaaggacggagggagcgaggcagatcacgaggtcaggaaatcgagaccaccctggccaacagggtgaaaccccgtctctactaaaaatacaaaaattagctgggcgtggtggcgcgtgcctgtattcccagctactcaggaagctgaggcaggaaaatcgcttgaaccagggagtcaggggttgcagtgagccgagatcgcgcctctgcattccagcctggcgaccgaacgagactgctccatctccaaaaaaaaaaaaaaaaaaaggcctgtgagggatcctgtggctaaagtgagcccctctccaggtgccacatgcctcgacatgtgcctgcagcccgggatctcacccacccccactcacgactcacacactcacaacgtgcagttgggcgcctaggattgtgcatgtcaagtctccacccactccctttgtttaatcgtcggaatttccagcccgctgctgccaaccgctccccagctgcgggaggaggagttagaaggacccgcccaattttcaggagcacataaattacctctgccggcagccgaccctcacttggccttacactccgctcggctcaccatgtgtcactctcgcagctgccacccgaccatgaccatcctgcaggccccgaccccggccccctccaccatcccgggaccccggcggggctccggtcctgagatcttcaccttcgaccctctcccggagcccgcagcggcccctgccgggcgccccagcgcctctcgcgggcaccgaaagcgcagccgcagggttctctaccctcgagtggtgagtatcgccgaagtgggcattcgcggggtgcgctgccctggagtcactggggaacgacccgactccagaggcctcgacctgacctgtctcctgttttgtctccccttaggtccggcgccagctgccagtcgaggaaccgaacccagccaaaaggcttctctttctgctgctcaccatcgtcttctgccagatcctgatggctgaagagggtgtgccggcgcccctgcctccagaggacgcccctaacgccgcatccctggcgcccacccctgtgtccgccgtcctcgagccctttaatctgacttcggagccctcggactacgctctggacctcagcactttcctccagcaacacccggccgccttctaactgtgactccccgcactccccaaaaagaatccgaaaaaccacaaagaaacaccaggcgtacctggtgcgcgagagcgtatccccaactgggacttccgaggcaacttgaactcagaacactacagcggagacgccacccggtgcttgaggcgggaccgaggcgcacagagaccgaggcgcatagagaccgaggcacagcccagctggggctaggcccggtgggaaggagagcgtcgttaatttatttcttattgctcctaattaatatttatatgtatttatgtacgtcctcctaggtgatggagatgtgtacgtaatatttattttaacttatgcaagggtgtgagatgttccccctgctgtaaatgcaggtctcttggtatttattgagctttgtgggactggtggaagcaggacacctggaactgcggcaaagtaggagaagaaatggggaggactcgggtgggggaggacgtcccggctgggatgaagtctggtggtgggtcgtaagtttaggaggtgactgcatcctccagcatctcaactccgtctgtctactgtgtgagacttcggcggaccattaggaatgagatccgtgagatccttccatcttcttgaagtcgcctttagggtggctgcgaggtagagggttgggggttggtgggctgtcacggagcgactgtcgagatcgcctagtatgttctgtgaacacaaataaaattgatttactgtctgcagtcttgagtgtatctttgcaagcgccgactccccactcctcccggccttcagatggcaaggaccggcgggaggcgccgtggccgagtccccagcccgcgcacctccctgggcccaggagccccttttcctggagtcacagaacccagcatccggttgccggatgtagtctttcattgcccagtctgcggttttcccaggtagttgccccgcggcgaatccgagatgtggcaatcacccttacgccagggtgccaggcggaggtcaagtccctcacccgggggcggagcgtggcgcggcgtgggcgggattcccggctcaagaagggcggtgactggggcggcagggatgtggccctccccgggctaaccaggcagcccggctgggcccgagagccagcgggcgggcgggctgcggactctagcggggcctgccgggaaaggggcgggccgagcgcactgggccgaggcggggcgaagtgggggtgcttagtccgttgcggggggcggggtcgcgtctgccgcagcaacggggtgcggcagggtggggaacgcgggagcggggccagctcccaggaaagctggtctgcgagcggcccctgcccggctcccaggtccctgcgcgaccccgcccttcccgagaccccagccgggctgccgcccgcgtcccggaaggtgagtgggggaggggagatggagcctggggctgccgagaagcagggagagaggggaaaggtctgcaggcctctgggcgcgggggacctttatcaaagggagcggcgaggggaagggagggaccatacgcaggcggagaagaggtagctggggatcttaaggattttgtagggaaaagccttagcggacccatgggtgtagaagggacgggccgtggcggatgcagactgggagggcctgacgggaaagggaaaggatgggcccctgtggacgccacagcgcgccttccccatccgcaaaggctttccctccctctcctccagctccagcctgaaccatgtttttcacttgtggcccaaatgaggccatggtggtctccggtaagtactgttgttcccttcccagccagtgaccccagaacccctgtgagtctggcctctgccccttctccctctccctaccaacttcccagcaccagacttctgccccttgatggccacgaactgcccagtttgattcccaccattccaaggcccagactgcttcccctccagctcccagattctctcctgtgggttgctgtcccctcacccccgccagttcctcagtcttccacattcaagctctgccaccgttcctcactgccccacaccttgcagggttctgccgaagccccccagtcatggtggctggagggcgtgtctttgtcctgccctgcatccaacagatccagaggtaggcaagaagggaaccagggaagggggacctccgttttctctttttcctcctcttcttactgtctgtcccttctttttcccctaggatctctctcaacacactgaccctcaatgtcaagagtgaaaaggtttacactcgccatggggtccccatctcagtcactggcattgcccaggtgaagctttcagagccttttccccacagtccacttccccatcaccctctctcccagacattaagacatcttct

SEQ ID NO: 10926 - DNA, 6000 bp, Homo sapiens; identical to SEQ ID NO: 1206

SEQ ID NO: 10927 - DNA, 6000 bp, Homo sapiens
cttctccatttcttcttttgctttttgttgcttctgtgtaatttcattttcttcagcttcttgtttctttttggctttttgctcgtgttcttccctcctcagtttctttttgtttcccttgctgtctttcctgaagttctttttcttatttgtttttctccattagaagagcagtttctgcatgaatatgagccttttcttcatctgttaacatgagagttggagaggaaactactggcttggcggaacaatcaggaataactttttcattctgaggagactgttgctcatgatttgtactttcagatttgattatatgctcttcaggcaatttgactgccagttttttagtatgatcaatctgtggaacattctttatgctaggcactggctgaatgatgggtgaaacatcagatttagaagcagcaactggttcaactggaattgatatattcagtggtcccgtcctctcattttgatcattatcacttatttgatcactgatcaattctatattttcatccacttctatatgtggaggtggcatctgggcagcaggtttagaaggaattgattcttccagtgagggataagtaaaatccaatgagatagacaactcttcattctggtgttgtgggggtggagtgaccttagcatttgttgtatactgggaatagcaaaggaaccagtttttacagcctccctctaaaaccaaagcccaaggcccattgcacaggacagtcttactttcccacttgaaaagtgcatctttcagatgccagagagttgttctaatctgtaaatcttttgcagaactaaaccagtcaagaagtaccatatactccacattccccctcttcttccatgtgtctatagaatcatctgggaggtgtgcttcaatccagctagcagtgactcctggactgatggcttcttcaggaacactgagagaatgtaaaatacaggaatcctgataatcctgcattctttgagcatccattataatcaagctgatgtttttatccatcatcattgtgtatagttcctttgctgtgattgctcctttctctttggtctcacatttttcattcttttcaccattgctcttttgggttttgtctttggaatccaatacaatctccaaagaacctttagccaacgtgctgccatcctctcttcctgtttcctgccttttttgttgtagccactgtgcttccccctgcctgtccttttcctcaagttttttccagatttcaacttcttcatatcttagtttaaggctttcagagagtcgttcagtttctccagtggcttttttgatgtttgcaggtccaagtattgaacggaagcaatcctgctgttgcttgaaatcaggtcttttttggataggattataaacagtcacgtttcatatacgtgtgtgagctttttttcatatgtttcttggccacgtaaatgtcttcctctgagaagtgtctgtttatatcctttgcccactttttgatggggatgggtttttttcttgtaaatttgtttaagttccttgtaaacaaacatgtgagctcttatcattcttgtttaaacacctaacagccatcctaaccagtgcaacaaggaccaggcatggtggctcatgcctgtaatccctgcattttgggaggctgaggtgggaggatcacttgagatcaggagtttgagaccagcctgataagtgagacctcatctctaccaaataataataattttaaaagaaaacagatcaatggataagaaaggaagaaatgaaagtctttctttgtcaccagcttcattgtatatgtagaaaacactagggaattctgaaaaagtctctggaattaatcattgaatttgcaaaatagttcgtaaaatatatgtaataagtcacttagatgaacatgaaaagatagcaaacaatactagtcatctaagaagtgcaagttaaaaccacaatgagaaaccatcacacatcacctagagcaggtaaagttaaaaagacatatgataagtcttaacactggcaagaatatggaaaaaataggaatgtctgctattgctggtaggaatgcaagaaatgtggcagccaatttgtaaagtggtatggcaatttcttatacagttacccatctattaccacatggcccagcaattccacaaatacgtatttatccaaaagaaataaaaacgtaagtccacacttgtaagcagttatttatagtggcttcattaataacaagccctaactggaggaatccacatgtctatcaactggagacacagaaaccaatgaataaactgggattccagcaatactcggcagctgctcagcaacaaaaatgaatgaatggcatcatctcaaacatcgttatgctaagggagagaccaaacaaaagactacataacatatgattgcatgtccatgaaattctagaaatgtcactattgcagtgacagaaagcacagcagtggttgagtgaagggaagggggtgagggtgggaggcaaggattaaatagaaagggggataaagaaagtttttagggaaaagaaactgttctctacagcgccacaactcaggagtgactgggagggggaggtaaggggagaagaaggtctgagggataaggggcagagagaagggctggggaagcaggaggtgaggacaaggagcaggggaaaggactctaaagcagtggaggggcctagtaggaggatctttgcatttggtgtttctctactgggcagtgtggtagttacactataaataattaccaatatccaccaaaaagtgcagctaaaactggtgaatttttttacacgtaaacgccctaataagcaaaaaaaaaaaaaaaaaaaaaaaaaaaaaaaaaaaaaaaggcggggggggaggaaagaaggcaaaaataaaagcattgttagatcatcaaacccataaaattcatttcctaggggtcctgtactacatgtaattttaaaggacgttcttcaggctgaagggaaatgatactagatggtgacccagatatacagaaaggaacaattaacaacagaaatgatgcacatacacatatcacatacacacccattttcttaatttcctgaagatatgtgactgcttgtctaaaacaaaaagtattacactgtatcgttgagtttataacgtatattgatgtaacatatacaataataatagcataatgatagtttaagtgaaactacaccatttgaagtgtcctttattttgctggatgcagcttaatattacctgaatttcactgtgaaaagtcaaggaattgggtttcaattcttacaacaataaaaaattaatgtaaagaaatatagctaaaagccactaggagaattaaaaccataagctgaaaaatgtttacttgacacataagaaagtagcaaaggaggaacagaaacaaaaagatatgagacaaattgaaaacgtatagcaaaatggtagaccaaaacccaaccattataagtgaagaaatgacacgacctgagtcacattagcaggactgctgagcactgtggggagaacagacatgggcaggaggtgagggacagtgttagtgccacaattcaggagtgacagggtggcggggactaaaggggaaagagggtgtgagggatgagaggggcagagagaagggctggagaagcaggaggtgaggaaaaggagcagaggaaagaattctaaagcagtagaagagcctggcagggggttctttgcattcggtatttaatacattttgtgtgactgccttaaaactaatgggctccttatgatttttttttaaaaaggggttacaaaaatatcaagtgtccaaataaaatatgcacactgcttagatgtgcatagttcacgaaaacgggcagtgctggagcgctggtgaagagcattgggactgcatggagccctcgcaactttgaggtgatgactacaggctcccggttgcaatagacagtaacaaaccctgcttctttgtattcaggagatgttctggactcacacagggaaactctggctagagaatgaggataactttaaatgcaacaacccagagtcacagaaccatagtctgcgaaagtaaaacaggagctttgagaatttaattgtaatgcagttttgacacaggtctttcacagattggaattctaatcattcagggattaccaatattgtgctacctactgtatcaataaacaaaaaggaaactggtctctatgagaatctctacctggtgctttcagacaaaacttcaccaggtttaaagagaaaactcctgactctacacgtccattcccagggcgagctcactgtctggcatcaagttccccatggtgagtttccctgtacaagagtccaaggggagaggtaagtttcctttattttgctggatgtagtttaatattacctgaggtgaggtaaggtaaggcaaagggtgggaggcagggagtccagttcagggacggggattccaggaggagaagtgaaggggaaggggctgggcgcagccttggggtctctccctggtttccacagacagatccttgtccaggactcaggcacacagtgtgacaaagatgcttggtgtaggagaagagggatcaggacgaagtcccaggtcccgggcggggctctcagggtctcaggctccaagggccgtgtctgcattggggaggcgccgcgttggggattctccactcccctgagtttcacttctcccaacctgcgtcgggtccttcttcctgaatactcatgacgcgtccccaattcccactcccattgggtgtcgggttctagagaagccaatcagcgtctccgcagtcccggttctaaagtccccagtcacccacccggactcacattctccccagaggccgagatgcgggtcatggcgccccgagccctcctcctgctgctctcgggaggcctggccctgaccgagacctgggcctgtgagtgcggggttgggagggaagcggcctctgcggagaggagcgaggggccctcccggcgagggcgcaggacccggggagccgcgcagggaggtgggtcgggcgggtctcagcccctcctcgcccccaggctcccactccatgaggtatttcgacaccgccgtgtcccggcccggccgcggagagccccgcttcatctcagtgggctacgtggacgacacgcagttcgtgcggttcgacagcgacgccgcgagtccgagaggggagccgcgggcgccgtgggtggagcaggaggggccggagtattgggaccgggagacacagaagtacaagcgccaggcacaggctgaccgagtgagcctgcggaacctgcgcggctactacaaccagagcgaggacggtgagtgaccccggcccggggcgcaggtcacgacccctccccatcccccacggacggcccgggtcgcccagagtctccccgtctgagatccaccccaaggtggatctgcggaacccgcccagaccctcgaccggagagagccccagtcgcctttacccggtttcattttcggtttaggccaaaatccccgcgggttggtcggggcggggcggggctcgggggactgggctgaccgcgggggcggggccagggtctcacaccctccagaggatgtctggctgcgacctggggcccgacgggcgcctcctccgcgggtatgaccagtccgcctacgacggcaaggattacatcgccctgaacgaggacctgcgctcctggaccgccgcggacaccgcggctcagatcacccagcgcaagttggaggcggcccgtgcggcggagcagctgagagcctacctggagggcacgtgcgtggagtggctccgcagatacctggagaacgggaaggagacgctgcagcgcgcaggtaccaggggcagtggggagccttccccatctcctatagatctcccgggatggcctcccacgaggaggggaggaaaatgggatcag

SEQ ID NO: 10928 - DNA, 6000 bp, Homo sapiens
tcttccagcactttaaagatgttattctactttcttttgtttctatggtttctaataaaaagtcattgatcaggacaagaggaacagagaaacaaaaaccgggaaaataacatggtagacgtgaaacttatcatatcaataatgacaaaaacctatatgaatcaacactccaatgaagggcagagattgtgtgacttggtttaaaaaaacacggaacccaaccatacgctctttccagacatgcactttctttgtttttttttttaatttaacttttatttttagttaaggggtacatgtgcaggtttgttatataggtaaacttgtgtcatggggttttgtttcacaaattatttctatgcccattagtacccacccaagtattaagtcttagttcccattagctatttttcctgatcctctccctcctcccaccctccaccctcaagtggaccccagtgtgtgttgttcccctctgcatgtccatgtgttctcatcatttagctcccacttataagtgagaacatgtggtatatagttttctgttcctgcattagtttgctaagaataatggcctccagctccatccatgttcctgcaaaggacgtaatctcattcttttttatggctgtatagtattctatggtgtatatgtgccacattttctttatccagtctaccattgatgggcatttaggttgattccaagtctttgctatggtgaatagtgcttcaatgaacatatgtgtacatgtaagtcactcactttctctttttatttaatttattttattttgctttaagttccagatacatgtgcagaacgtgcaggtttgttacatacgtatagtctgccatagtggtttgctgcacctattcacccatcctctaagttccctcctcttacccccgactccccaaaaggccctggtgtgtgttgttcccctccctgtgtccatgtgttctcattgttcacctcccacttaagagtgaggacacgtggtgttaggttttctgttcccatgttagtttgctgacgatgacttccagcttcatccatgtccctgcaaaggacatgaactcattcctttttatggccgtgtagtattccatggtgtatatctaccacattttctttacccagactatcattgatgggcatgtgggttggttccatgtctttgctattgaaaatagtgctgcaataaacatacctgtgcatgtgtctttatagtagaatgattgatattcctttgggtatatacccagtaaagggattgctgggtcaaatagtatttctggttctacatctctgaggaatggtcacaccatcctccataatggttgaactattttacattcccaccaacagtgaaaaagcattcctatttctccacagcctcaccagcatctattgtttcctcactttttaataatcgccattctggctcgcaggagatagtacatcattgtggttttgatttgcttttctctaatgatcattgatattgagcttttttttcatatgttttttcttctgagaagtgtctgttcataccctttgccaatttttgatagggctgttttttttcttgtaaatttgtttaagttccttgtaaacatacatgtgagctctcatcattcttgtttaaacacctaagaggcatccaaatcagtgcaacatggcaagaaaatgaaataagaaaccaatagaaggaccaggcatggtggctcatgcctgtaatccctgcattttgggaggttgaggtggaaggatcacttgagttcaggagtttgagaccagcctgatagtgagacctcatctctaccaaataaaaataattttaaaagaaaaaagatcaatagataggaaaggaagaaacaaaagtctttgtcaccaacttcattgcatatgtagaaaacactagggaattctgaaaaagtctctggaattaatcactgaatttgcaaaatagttcataaaatatatgtagtaagtcacttagatgaacatgaaaagacagcaaacaatactagtcatcaaagaagtgcaagttaaaaccacaatgagaaaccatcacacatcacctagaatagataaagttaaaaagacattggataagtctaaatactgtcaagaatatggaaaaaataggaatgtctgatattgctggtaggaatgcaaaaaatgtggcagccaatttgtaaagtggtatggcagtttcttatacagttacccatctattaccacatggcccagcaattccacaaatatgtatttatccaaaagaaataaaaatgtaaggccacacttgtaagcagttatttatagtggcttcattaataacaaaccctaactggaggaatccacatgtctatcaactggaggcagagaaaccaatgaataagctgggattccagcaatactcagcagctgctcagcaacaaaaatgaatgaatggcatcatctcacacatcgttatgctaaaggagagaccaaacgaaggactacataacatacgactgcacgtccattacattctagaaatttcagtattgcagtgacagaaaacagagtggtggttgagtgaagggaaggggtgagggtgggaggcaaggattaaatagaaaggggcagaaagaaagtttttagggaaaagaaacggttctctacagcgccacaactcagaggtaactgggtggtgggaactaaggggagaggagggtgtgagggaagaggacagagagaagggctggggaagcaggaggtgaggacaaggagcaggagaaaggactctaaagcagtggaggagcctagcaggggattctttgcattctgggtttctctactgggcagtgtggtagttacatgactataaataattaccaatattcgccaaaaaagcgcagctaaaactggtgaattttattacacataaatgccctaataagcaaaaaaaaaaaaaaaggggggggggaggggaggcaaaaataaagacatttttagataatcaaagccataaaattaatttcctaggggtcctgtactacatttaattttaaaggaagtgcttcagggtgaaggaaaatgatactagatggtgacccagatatacagaaaggaacaattaacaacagaaatgatgcacatacacatgtcacattcacactcattttcttaatttcctgaagacatatggctacttgtttaaaacaaaaagtattgcactgtatcactgagtctataatataggttgatgtaatatatacaacaataatagcacaatggtaggttacaagaaactacactgttagaagtgtcctttattttgctggatgcagcttaatataacctgaacttcactgtgaaaagtcaaggaatcgggtttccattctttgctattgtgtaaagaaatatagccaaaagccactaggagaattaaaaccataaactaaaaaatgtttatttgacacataagaaagtagtaaaggaggaacagaaacaaaaagatatgagacaaattgaaaacgtatagcaaaatggtagaccaaaacccaaccattgcaagtgaagaaatgacatgacctgagtcacattagcaggactgctgagcactgtggggagaacagatatgggcaggaggtgagggacagtgttagtgccacaattcaggagtgacagggtggcggggactaaggggagcgggggtgtgagggatgagaggggcagacagaagggctggagaggcaggaggtgaggaaaaggagcaggagaaagaattctaaagcagtggaagagcctggcagagggttctttgcattcggtatttaatacattttgttggacttcctaaaaactaattggctccttatgattaaaaaaaaaaagagttacaaaaataccaagtgttcagataaaatacgcacactgcttggatgtgcagagttcaggaaaacaggcagtgcttcagcgtcggtgaagagcattgggactgcatggagcactcgcaactttgaggtgatgactacaggctcccggttgcaatagacagtaacaaaccctgcttctttatattcaggagatgttctggactcacacagggaaactcagggtggggaatgaagataattttaaatgcaacaacccagagttacagatccacagtctgggaaagtaaaacttaggagctttgagagtttaattgtaatgctgttttgacacaggtcttttacaaattggaattctaatcattcagggattaccaatattgtgctacctactgtattaacaaacaaaaaggaaactggtctctatgagaatccctatgcggtgccttcagagaaaacttcaccaggtttaaagagaaaacccctgtctctacacctccattcccagggcgagctcactctctggcatcaagttccccgtgctcagtttccctacacaagagtccaagaggagaggtaaggagtgggaggcagggagtccagttcagggacagggattccaggacgagaagtgaaggggaaggggctgggcgcagcctgggggtctctccctggtttccacagacagatccttgtccaggactcaggcagacagtgtgacaaagaggcttggtgtaggagaagagggatcaggacgaagtcccaggtcccggacggggctctcagggtctcaggctccgagggccgcgtctgcaatggggaggcgcagcgttggggattccccactcccctgagtttcacttcttctcccaacttgtgtcgggtccttcttccaggatactcgtgacgcgtccccacttcccactcccattgggtattggatatctagagaagccaatcagcgtcgccgcggtcccagttctaaagtccccacgcacccacccggactcagagtctcctcagacgccgagatgctggtcatggcgccccgaaccgtcctcctgctgctctcggcggccctggccctgaccgagacctgggccggtgagtgcgggtcgggagggaaatggcctctgccgggaggagcgaggggaccgcaggcgggggcgcaggacctgaggagccgcgccgggaggagggtcgggcgggtctcagcccctcctcacccccaggctcccactccatgaggtatttctacacctccgtgtcccggcccggccgcggggagccccgcttcatctcagtgggctacgtggacgacacccagttcgtgaggttcgacagcgacgccgcgagtccgagagaggagccgcgggcgccgtggatagagcaggaggggccggagtattgggaccggaacacacagatctacaaggcccaggcacagactgaccgagagagcctgcggaacctgcgcggctactacaaccagagcgaggccggtgagtgaccccggcccggggcgcaggtcacgactccccatcccccacgtacggcccgggtcgccccgagtctccgggtccgagatccgcctccctgaggccgcgggacccgcccagaccctcgaccggcgagagccccaggcgcgtttacccggtttcattttcagttgaggccaaaatccccgcgggttggtcggggcggggcggggctcgggggactgggctgaccgcggggccggggccagggtctcacaccctccagagcatgtacggctgcgacgtggggccggacgggcgcctcctccgcgggcatgaccagtacgcctacgacggcaaggattacatcgccctgaacgaggacctgcgctcctggaccgccgcggacacggcggctcagatcacccagcgcaagtgggaggcggcccgtgaggcggagcagcggagagcctacctggagggcgagtgcgtggagtggctccgcagatacctggagaacgggaaggacaagctggagcgcgctggtaccaggggcagtggggagccttccccatctcctataggtcgccggggatggcctcccacgagaagaggaggaaaatgggatcagcgc

SEQ ID NO: 10929 - DNA, 6000 bp, Homo sapiens
actccagcctgggcgactgaacgagactgtctcacaacaacaacagcaacaacaacaacatgtattcatataaaatgagccaggctgggcgcggtggctcacgcctgtaatcccagcactttgggaggccaaggcgggcggatcacaaggtcaggagtttgagaccagcctggccaacatggtgaaactcagtctctactaaaaatacaaaaattagctgggtgtggtggcgcacgtctgtactcccagctactcgggaggcggaggcaggagaatcgcttgaacccgggaggcagaggttgcagtgagctgagattgagccattgcactccagcctgggcaacaagaacaagactccatctcaaaataaataaataaataaaataaataaaaggagccagaccaggagtttgagacctggacaacatagcaagatgctgtctttcaaaaataaataaaagtaaaaagtcaggtgtgatggcacataccagtattccaagctacttgggaggctgaggcaggaggattgcttgagtccaggagatcgaggctgcagtgagcaatgatcacaccactgtattcctgcttgagtgatagagtgagacccttgtctctaaaaaatgtaatagtaaaaggagccagaagggggcatgcggtaaggggtggacacatggcatattacatgtcatccttcacttctatgtgctgtattatctcctgtagctgtgtgatacacatacaagagtgtctggcatactcttgtaccaatccctgtagaggtattaccttgttttattgtgttccacagatgtgcatttttttatatattgaagtttgtggcaaccctgtgttgagcaagtctgtaggtgccacttttccaatagcctgtgctcactttgtgtctcagtggcacattttggtaattcttgcaatatttcaaactttttcttgattattttatctgttatgatctgtcagtagtgattttttttttttgagacagggtctcaccctgtcattcaggctggagtgcagtggcaagatcatagctcactgcagcctcgaaatcctgggctcaagtgattctcctgcttcagcctcccaagtagctaagactactggaacacaccagcacacctggctaattttatctatttatttatttaggcagagttttgttcttgttgcccaagctggagtacaatggcacgatcccagttcaccactacctccgtctcccagtgattctcctgcctccgcctcccgagtagctgggattaccggcatgcgccaccacgcccgactaattttgtatttttagtagagacggggtttctccatgttggtcaggttggtcttgaactaacgacctcaagtgatctgccctccttggcctcccaaagtgctgggatgacaggagtcagccactgtgcctggactttttttttcttttttgtagagctgaggttggccaagcgcagtggctcatgcttgtaatcccagtactttgagaggtcgagtgggcaaatcacttgagcccaggagtttgagaccagcctggacaacatggtaagaccctgtctctacaaaaaatacaaaaattatctaggcatggtggtgtgtggcagctactcaggaggctgaggtgggaagatggtgtgagcccatgaggttgaagctgcagtgagccgtgattgtgccactgcactctagcctaggcaacagagtgagaccttgtctcaaaaagagagagagagagagaaggtcttgctctgttgcccaggctggagtgccatggagccatggctttcacaagcaaaatcgtagcatactgcagtcttgaacttctgtcctcaagtgatccttccacctcagccttctgagtagcagagacataggcacataccactgcacttggcaagaattagctaaatttactctgccacgctgtgtaaatggaacaataaagcctagatggctggatgtggtggctcatgcctataatcccagcactttgggaagctgaggtgggcggatcacctgaggtcaggagttcaagaccagcctggccaagatggtcaaaccctgtctctactaaaaatacaaaaattagccgggtgtggtggcagtcacctgtaatcccagatactagggaggctgaggcaggaaaatcacttgaacccagagggcggaggttgcagtgagctaaaattgcaccactgcactccagcctgggtgacagagcaagactccatctcaaaaaaatatataaataaataaataaataaataaaagcctagatgatagtacatctgtttacaacgtggtttactgattttaaaatttttcttttttttgtttgtttgtttttttttgagacacggtctcaatatgttgcccaggctgtagtacagcagcatgatctcaactcattgaaacctctgccttccagagtcaaatgatcctcctacctcagcctcctgagtagttgggaccacagacatgagccactatgctcagctaatttttgtattttttgtagagatagggtttcgtcaggttgtccaggctgatctccaactcttttttttttttttttttttttgagacaaagtcttgctctgtcacccaggctggagtgcagtggcgcaatctcggctaactgcaacctctgcctccaaggttcaagtgattctcctgcctcagcctcctgagtagctgggactacaggcagatgccaccacacccagctaattttttgtatttttagtagagatggggtttcaccgtgttagccaggatggtctcgatctcctgaactcgtgatccgcccgcctcagcctcccaaagtgctgggattacaggcatgagccaccatgcctggcctggcctccaactctttaactcaagtgatctgccctcctgggcttcccaaagtactgggattacaggtgtgacccaccatacctagccaaaattatttttttttaaactccatttactactattcccaatttaaattgtattttatttagagacaaggtctccctccattgctcaggctgaaatgcagtggcaaaatcatagctcactgcatccttgaaactcctgggctcaaggaatcctccttcctcaacttcctgagtagctggtactataggtgtgtgccactatgtccagctaagtttaaatttttttgtagagacagggtcttgccatgttgcccaggctggtctcaaacccctggcctcaagccgtcctctcaccttggcctcccaaagtgctgggattacaagtgtaagccactatgccccgctggtttactgaatattttaagcctactgttgaggtctactgctccgaaaaacaagatttctttaaaatgattactgctcattgacaatgtacatagttatccaagagctctgatggagatgtccaaagagacgaatgttgttttctttttctttttttttttttttgagacggagtttcgctcttgttgcccaggctggagtgcaatggtgcgatatcagctcactgcaacttccgcctcctgggttcaagtgattctcctgcctcagcctcccgagtagctgggattacaggtgcgccccaccacacccggctaattttgtatttttagtagagacggggtttctctatgttgatcagactggtctcggactcctgacctcaggtgatcctcccacctcagcctcccaaagtgctgggattacaggcatgagccaccacgcccagctgaatgttgttttcctgcctgctaacataacatccatcctgtagtccatggtttaaggagtaatttagactttcaagtctcattatttaagaaatacatttcgccaggcatggtgactcatgcactttgggaggcctaagtggatggattgtttgagcccaggagttggataccggcctgggcaacacagggagaccccatctctacaaaaaatacaaaaattagcctggtgtggtggtgtgcgcctgcagtcccagctactcaggagactgaagtgggaggatcaactgagccctggaggttgaggctgcagtgagccgtgatggcgccactgaactccagcctgggtgagacagagccagaccctgtctcaaaaaaccaaaacaggaatcccagcactttgggagggcgaggctggtggatcacttgagatcaggagttggagaccagcctggccaacatggtaaaaccctgtctctacaaaaaatacaaaatttagctgggcttggtgatgtgcgcctgtaatcccagctacttgggaggctgaggcaagagaattgcttgaacccaggaggcagaggttgcagtgagccgagattgtgccactgcattccagcctgggcaacagagtgagactccagctcaaaaaaaaaacaaaaaacaaaaaaacccaaccaaacacacacacacacacacacacacacacacacacacacacacacacacacacaaggtgattgctatgcaaattaaatatagcttcaccaatcagcttgcttctcctaatccctcatagaaatcttggagtagccctggggtgcagtgaggccagattccaggaagggaatgggtgggatgggtctgggtactggtgagcagcagggagggtaagtaggttagcttctgggccaaggagggctcctggaggcttgttctgggtaaaagctggtctccttgaacctcggaaggtgggggaacccacatcctggtctcacccgcccaaccgcccactcacccttgggttagcagccatctaagccccaccctccccctcacacgcttagctagcctgccacaagctggccccttggcctcctagagaccctgacatctcctccagcagcatctgtcctctctcctcagggaggcaagcatttgatgctcgaggtccctggcagttgtggtccttggcaagtgatgtgtgagtcccgtgtgtcataggaagctccccatccccatctggtgaccaaaggcctggctacaagtagtgagtccttcctcctccacccagacctcactgctcagatccccttcgccaactgggacatcttccgacatggcctggatgctgttgctcatcttgatcatggtccatccaggtgacagggcgtgcgctcaggaccccaaggagtgtgggtgggaggagggagatccaggaggctggactagatgctatagggaacgggcttggtgggggctgaaacacacggctctgagggaggagtgggactgctccaaaggtgacactcagtggactcccccaattcacagtctctctgtgtcacccactgtgaggctttttagtttgagagatccaagtaaatctatgataaatttcttggtgaaacttttttttttttttttttgagactgagtctcgctctgtcgcctggctggagtgccgtggtgcgattttggctcactgcaacctctgcctcccatgttcaggtgattctcctgcctcagcctcctgagtagctgggactacacgcacgcacgaccacacctggctaattttttttttttttgagacggagtcttgctctgtcacctaggctggagtgcagtggcatgatcttggctcactgcaacctctgcctcctagattcaagcaattctcctgcctcagcctcctaggtagctgggattacaagcgcgcaccaccacacccaactaatttttgtatttttagtagagacagggttttaccatgttggccgggctggtcttgaactcctgacctcaggtgatctgcctgcctcggcctcctaaagtgcggggattacaggcctgagccactgcgcccagccatttttgtatttttagtagagatggggttttgctatgttggccaggttggtctcaaactcctgatctcaagtgatctgcctgcctcggtctcccaaattactggaattataggcatgagccactgcgcccgcctggtggtgaaactt

SEQ ID NO: 10930 - DNA, 6000 bp, Homo sapiens
ttccgtctccttcctcagtttacctgccaggctaaagctgacccctttgttgtgagtcatgaggcagcggatgattcttggtcttcggctcctgggctcagaaagcccctccccaggacacaccaagagcagggcagcctcactgccccagaaggactgaacacggcccctcacgggacccttcccttcctgccaggtcacagagtccatgcgtctgctggggaccacagagcacaggaggacattgcagggggatccatctgcagcccttgcagataactgggatcctgtaggggagagagggattcctcagttcttcacctggacttcctgggccacagtagcccctggtctgcatgcccccactcacctttgagcaccaagacgtcgtacaccctccagttctggtagttgtggtgctgacctagcacagcgcaccagtaccgcccggcatcttcctctttggatccctccaaccacaaagaatagttccccagcagtctgagcctggattcccttcctggttttccagggtctggggctggcctgcccacttggacttgggctaccagggtggtgaaggagcctgctgcagggctgcagaaccatgacaggtgttcgtccccatgtagagtaggtggtgagggacatggcagctctactgcctcccccaaggccacatagatggcctgcatgttgtctgtgggaagagggttgtatgaggccagagacctccatcagatcaataaccccccatttgatcttcaaccctggcttccttcccttctggggtcccccagcacaggcctggctggtgaccacatttctcaagtgacagctacaaaaataagacaggtggagagaagagggtaagggctttcctcctctctcccccagccagtgagggggtctgagggcaagagggaaaaggctgaaagttggcaaatgcccacatctcttctactcatttctacttttctggaagcatttactcattcttcttattttataaaggaaactgcataacctggaccctcgttgcctctgggtcttccctagtgtcagaggcaggaggaggttggttggggtaattctatcttcttgagtcagatgccttcgccaggctcctaggagaaagagcagtagtccctccccaaccttgcaaatagctaaggaatcccgtacctcttgccccttacctgcagcctggggagttccacataggaacaggaggaggaataagactgccatggggagagcctgccaagttctcttgctccaagacctggtgtccccagggaggaagcagagtccagataaaggcccacactcgctggtctggagtgacaaggggctctggaggggatgggaatgctggggcgataaagcccagcagcatgtctactagggataaagtgaccaccacttttctatcctggagagaaaaggacccagcccaggccactctgaagatgacctttttgctcttctgattccacatcagctaaggggctcaaataaagactttccatgcaaaaaaccatgcagagaagtggtcctgcctgtctagctcttgtcagtctggaagtacattctgaggtctctttcactcctaagaaaggtcagccatgagttgggtggatcacttgaggtcaggagttcgagaccagcgtggccaacatggcgaaaccctgtctctacaaaaaatacaaaaattagccaggcgtggtgacatgtgcctgtaatcccagctacttaggaagctgagaggcaccagaatcgcttgaacccgggaggtggaggttgcagtgagccgagatcgtgctactgcactccagcctgggagacagagcgagacttcatctcaaaaaaaaaaaaaaaaaaaaaaaaaaagaaaaagaaaagaaaagaaaagaaatgtcagctatgagtgaagaaactgagtttgagtttttatgttggtcctccacagaacccagcacaagactgtgtatcgagtcagtgtcccgtaaatgatttggaatgactttccctgtggttgtctggcataccccggacctctcctgaaaccctaataagtgtattaaattattactcagggacaaggctaacgggctgattcatccttctgaacggcaaaaactcctaaggcagatcttcatgcagttattacagttttaatgtgtaatttatttatttttaaaattattttgatgaaatattccatacataccaaaaactatatgaagtacaactatataatggataaatgcttaacagagtagaagactggacagcaatgagaatgaacaaacctagtgatttgcaacaaagttgaatctcacaatataatgagagtaaaagaagcctggccaggcatggtggctcatgtctacaatcctaacacttttggaggccaaggtgggagggttgattgaagccagaagtttgaggttgggcaacagagcaagaccccaactctgaaaataaaggccagacgccgtggctcacgcctgtaatcccagcactttgggaggctgaggcaggcggatcacgaggtcaagagatcgagactatcctggccaacatggtgaaaccctgtctctactaaaaatacaaaaattagctgagtgtggtggtggatgcctgtagtcccagctactcaggaggctgaggcaggagaatcgcttgaactcaggaggcagaggctgcggtgagcagagatcatgccactatactccagcctggtgacagagcgagactccgtctcaaaaaaataaataaataataaataaataaataaataaataaatagaatattccaggccggactcggttgctcatgcctgtaatcccaccactttgggaggatgagacaggcggatcacctgaggtcaggagttcaagaccagcctgaccaacatggagaaaccccatctctactaaaaataaaaaaattagcagggcatggtggtacatgcctgtaatctcagctacttgggaggctgaggcaggagaatcgcttgaaccccagaggcagaggttgtggtgagccgagatcgggccattgcactccagcctgggcaataagagcgaaactcggtctcgaaaaaaaaaaaagaaaaagaaatagaatattccaggccaggcacagtggctcatgcctgtaatcccagcactctgtgaggccaaagcaggaggttcacttgagcccaggagttcgagaccagcctgggcaacatggtgagaccttgtaaaattagccgagtatggtggtgtgggcctatagtcccagctactcaggaggttgaggcagaaagatggttgagcccagcaggtggaggatcagggcagtgagccgtgattgtgccactgtgctccagcctgggtgaaagagctagaccctgtctcaaaaaaaaaaaaaaaaaaaaacagaaaaaaagaatattccgtttcagtcagagatcctctatgctgtgtaaccacaattctgaattttctctttcttctccacttgctttatcattaaattttatgtgtttttgaatctaatatactagtatcacgtatacattcttctgtggctttctattttcactcagcatcatggttttaagatccagttcatgcataacagtaatgattcatttattttctttttacaaatattccgcatatcttactgtgctgaattttcgtatccaggaccatggtgtagctttccatttattgaaaagcttttcgtttacctctttctttttttattttttcaattattattgttattattttgaggcagggtctggctctgtcacccaggctggagtgcatggagcgatctcaaactcccgggctcaagcgaccctcccaccttggcctcccaagtagctgggactacaggtgggcaccaccacaccctgctaggtcttttttttttcccccttggtattttgtgtagagatggggtctcactatgttgcctgggctggcttggaactccagggcgcaagcaatcctctctcagccaccccaagtgttggaattacaggcatgagccatggcctggaactcctggacgcaagcaatcatccctcggccacccaaagtgttggaattacaggcgtgagccaccgcgctgggccagtttacctttatttatttatttagagacagagtcttgctctgtcaccaaggctgaagtgcagtgggaagatctcggctcactgcaacctctgcctcccgcgttcaagcgattctcgcgtctcggcctcccgagtagctgggattacaggcgcgcaccacccatgccaggctaatttttgtatttttagtagagatggggtttcaccatgttggccaggctggtctcgaactcctggcctcaagtgatccccccgcctcggcctcccaaagtgctaggactacaggcgtgagccactgcgccgggccgggccagtttgccttttcaataactttttatagttttcttcataaaaccttgcatttcttgtactagatacattcctagacaccttatgttttcggttactcttatcaagtactcctaatctcacccctcgtttccgctgtcgctctagagtctgccaataatgagacagaaaaaaattattgaaccatgcccggtaattttctgattctccgcgttctagtggtcttccactagtttcggaccactgctgtacccgtagctccaactgcgcgaaactcttctcaggaagcactgaaaatgtcgcaactcgcccggaggcggagccggtacgggctgacgtcaagggcacacaacacctcagaggcagggagggcggggccggcagggggacctgctgctggaagagcagcggcccgagccggggccatggcgaagctgctgagctgcgtcctaggcccccggctctacaaaatctaccgggagagggactctgaaagggccccggccagcgtccctgagacgccaacggcagtcactgccccccattccagctcctgggtgagtcgagttcctccccaccgaagaacgtggtacagtccaaaccctttacggccttttgctccccagaagtgcccataatgggaaataaggggagcctgcttgtcaagccagttatccgcaaaatctgcgctctgtgtgcttcctgagttaaagtcacgcctacggactggccgcctcctttctttttcgctctttaccgctttctcattccgactgccactctttgttctttcctctccgcgtccccccgaccctgtgtgtcgtggttcgtgccggtcccagttgagtcttgagtcccgggaagagaccctgcgcggactggggagccgttgaattttgctgtcagactcccagtttcctcttcttcagtgcctcttcatgcctcccccggctctgtttttatcttccctttaccctcgccttgaatttcagaatgacttttacagatcctgtatccgtcggtcctcccctcaacccccgcccaacctagcctggagacccgagtcattgtattctggagagctggcgggtggtggtaggctgttctaaatattctcttcctttttatcagttgtctcattgtgttactgtctcctacaaactgcccgctcctacccacattctcttcttagtcaactactcttatttctgatgcttttctttccttcttagattgtctaggtgtcttttctttcttctcaaactaacccttctccccacatgcacgcgcctgcaatccatttgaaactaggctgtggaaaaggagcaaaaatcgtccaatgctgctttcacttttgcttccaaatccagctccctgtgtttgttcccatggtcaggggtgggaaattaggttcagagtgagggtgaggaagaggagtttctgtgggggccagggatgtttcaagagagatagtcaacgagactagaaccagaggacacacagcagggcttctgaaagggaagggaaaggacctgccagtgggcagggt

SEQ ID NO: 10931 - DNA, 6000 bp, Homo sapiens
ccagcttcccagccccttcttcccgtcttctgcagggacgtggctcggggctatgagaacgtgcccattccctgtgtcaacggtgtggatggggagccctgccctgaggattacaagtacatctcagagaactgcgagacgtccaccatgaacatcgatcgcaacatcacccacctgcaggtgagtagggggcccggggcctccccaaaaggacaccgagagctgccaagtacagttggacaagcttcaaaccagcaaaggcacctggccaaggaagggttggctgaaagggagccctggtgtggggtcgcatccccaccaggggagggatccttttcctaggtcacagcaaggtatcatatgagctcccagtagccctggggacaccaccatactgattacccgtcaccctaggaccatcaccacccactgttgtaacacatggaccccaaagaaaggacagtggttagggggtcagggggcatcaagagtagaggggcccagaccgatcatggggttgagctgacctctgcctcctcgccccagcactgcacgtgtgtggacgactgctctagctccaactgcctgtgcggccagctcagcatccggtgctggtatgacaaggtgcgtgccccttgccttggccacagacacccggcccctccttcagaggagccagcctccaataaaccagctccctgggaccatgtccctcacctcctaccctgtgggggaagtgactgagaggactgggcaaggcctgggaatcctgggatgtggctgggacagcgatgggcgtgtgcccaggtctatgcaaaccagggatgatgctcctgcatttcgtgctctcggatctcagagcctgtgtgacctccccaaccccaacttccctgtctctgtagagtcttggggttcctgggtgggcagctgaggtgggccccacagagaaaccactatcctcccctccgcaccctaggatgggcgattgctccaggaatttaacaagattgagcctccgctgattttcgagtgtaaccaggcgtgctcatgctggagaaactgcaagaaccgggtcgtacagagtggcatcaagtgaggccctgctccacagcccaccctctccccacctcaccctttcctccctgcccctggggcttttccagggcctccacccaacagcgccatctctcctacccccagggtgcggctacagctctaccgaacagccaagatgggctggggggtccgcgccctgcagaccatcccacaggggaccttcatctgcgagtaagtcaccgggagcaccttaacacctggtgggaaggggatacatggccactgctgactgccaggcctccctctcagccatctgccctgatgagtcacatgtctccatctggccactctccagccagcctcctctgacccctattcctgcagctgagcagccagccgcctctgacccccatccccccagctgagaatggcacctgcctccactctgcccagaccacagagcttgtcttccctcccctccacctccaccctctaccttcccctccaccccctcctcgcccttcctagctggagaaagtgccagtttgggagacaaacagacttgggtttgagcccctctctgcttctggatgttcttggccaagttacttaacctctttgagccttatttttcttgtctgtagagtggaggtgataacagctacctatctgtccacctcctcaggggcctgtccctctccatcagttctttctctgcccagcatctgtaatctccccctttctcttggctgccatcccacaaccctcaatcttactttagtctcctttggctcttttttttttttttttttaatttattttttgagacggagtttcactcttgttgcccaagctggagtgcaatggcacaatcttggctcactgcagtctccacctcccaggttcaagcgattctcctgcctcagcctcccaagtagctgggattacaggtgcgcaccaccacacccggctaattttttgtatttttagtagaaacggagtttcaccatgttagccaggctggtctccaactcctgacctcagatgatccgcccacctcggcctcccaaagtgctgggattacaggcgtgagccaccgtgcctgaccattctttggcctttaaaaaagatagtcctctaaccatacttgcctgttcaacagaccatccagtttctttccatcatgtcatctctcaacttctctggcaagcagccccttcctgctgggcctcagtttccccaccatccactcactgcctgtccctgccaaaatcggcctttgcccttcccactctgctgaagctgtctcttgacagtcacttcccacccacgtcctctccgtgtgtctgaatctcccatgtctgctcaccctccttagatagctggctcctctcctccctctggtgtccagatatgtgtgggtgctcttgccccgaatcatgccttgagttccttgccactcctgtacctctggctcttcctgcagtcctggcccctctcctgttccatatcgcccattcctgccgggtggctcctggaacacaaacctctctgtgtccaaacccgaacttccccacccaggccaactgcccctacacattaatccccttaaccacagagcttgttgtctgtctctgtgctgactgaaggcttcctctgtcaaggctggaatgctgccctttcacttgcccaccactgctgctccaggccttcccttccccacacctgccagccctgcccattccagattccacaggcttgtgaagagagatggggcctggagccacctcctaatagcccacactcaccttcagaaccatggattcctgtcccacaggtatgtcggggagctgatctctgatgctgaggctgatgtgagagaggatgattcttacctcttcgacttagacaacaaggtgagcaggagaccctccttaccctgctgctccccagggctggctttcaggagcctctgggaagtcagcaaatggaaacctggggaggagggactggggagtcagtgggtggggagggcaagcagggtcgggggagatgtgaagagtgccatccccctgccccaggatggagaggtgtactgcatagatgcccgttactatggcaacatcagccgcttcatcaaccacctgtgtgaccccaacatcattcccgtccgggtcttcatgctgcaccaagacctgcgatttccacgcatcgccttcttcagttcccgagacatccggactggggaggagctagggtgagactctaggggtctctaggggctctgccagggggtgggagatgcagcaaacctgggacctgaaggctggcatgtacctggtgtccaggcatggagtagtgcagagcttctcagatttcagtgtacataagtatttcctggaggacttggggaaacagtcctgtgcctcccagagagattttgaatcagtaggcttgggatggggcccaggattctgcatttctaaaaagtccccaggcaatgctgatgctgaaagtccatagaacatacaaggggctcagatcccatctggagaagataggttgggtgtcgggtccctctcagggagcaggatccacagggtcttcggggtgggctcttggtggctgggtccaggtcccacaagctcctgttttcctctgacaggtttgactatggcgaccgcttctgggacatcaaaagcaaatatttcacctgccaatgtggctctgagaagtgcaagcactcagccgaagccattgccctggagcagagccgtctggcccgcctggacccacaccctgagctgctgcccgagctcggctccctgccccctgtcaacacatgagaacggaccacaccctctctccccagcatggatggccacagctcagccgcctcctctgccaccagctgctcgcagcccatgcctgggggtgctgccatcttctctccccaccaccctttcacacattcctgaccagagatcccagccaggccctggaggtctgacagcccctccctcccagagctggttcctccctgggagggcaacttcagggctggccaccccccgtgttccccatcctcagttgaagtttgatgaattgaagtcgggcctctatgccaactggttccttttgttctcaataaatgttgggtttggtaataaactgcgatttttgtgttggggtggggagaaagcatacttggctagagggaatgtgggtccaagggccagaataggatgggaagcaggctggacaggtgtggctggtgtgatggccgcccagtgcggggcagggaggtggggggccactatgaagatccagtttcacaggcacggtggctgacacctataatcccagcactttgggaggccaaggcaggcgaatcacctgagatcaggagttcaagaccagcctggccaacttggtgaaaccccatctttcaaaatagaaaaaatttgctgggcgtggtggcaggcacctgtaatcctggctactccagagactgaggcaggagaaccgcttgaagccaggaggcggaggttgcagtgagccaagattgagtcactgcacaccagcctgggcaacaagagcgaaactccatctcaaaaaggaaaaaacaggtccaatttccacactttaatctttggcgggagcgtgttgggagtgtacggcagttaaggtagttggcgagattataaagcgttttcttatcagagcatgccaggtcgttcactgtggtccgtagtgcccccaggaaatagccctgagcccccgtcccaggctccagctccccagcccgctgggcacaaagttgagaagaaggaactagagtgtgtcggggaccacaggcgggggtggggctgtgacgtgtgggagggcggggcgggcagcaggtgagacgccaggtctccagggctccaatcactccggagactgagccatggggggaaagcagcgggacgaggatgacgaggcctacggtgagactggggcgaggcccgggaccctgtggagggaggggaggacgggtactttgggaatggtgtctggggctggctccagggagaggaactaaggagagtactgtgtccctgaggggagggcccgggaaccgggagccatggagggagggagtcagggtcctgggaggaggatggggcccgggggctggggctgttgctggggagcccatggggagtgaagctgggtgcctctgaagagttggggctgaggtccttgggaggaggggggtatttcaggcctggactctgggtccctaagggcagggccctaggaaacaaagccgagatggaaggtggcaggttggggccctgagcagaatagggctggatgctgggagtgtcctgtgctgcagagcctgcaaccagtgaggccagggtccctgtaaggaggaggaggttcagcctggagtctgggtctctgagggcgaaagctgcttgtggtctgccggctcccttgaggagtgaggggaccctgagtgggctggcctctgcctgccagggtctctgggagaagtggcagagggagtgggttctgctgggggtccctgtgaggagttggggctgagggtctttgtggaaagggggctggggtcctgcctaggggtctctgtgaggagctaggagcaggagctggtcttggggtactctgaggaatagggacagggcccctggggttcctgtgaagggtgaagcctgaggggagaaacagcagggagcctgtttccagaatctgcaaggaaaaggggctggggttctgaggagagagggagctggggactggcctccagatccccacgagcagtgaaggctggggactcacctgcggaggcccccctggtcttctggtctgaaggggaaggaacccctatgagggaccttctcgaggagaggcttgagtcccttagggccatag

SEQ ID NO: 10932 - DNA, 6000 bp, Homo sapiens
ccaagtagctgggactataggcgtgtgccaccacgccaggctaatttttgaatttttaatagagacggagtttcaccatattgaccttgtgatccgctcgcctcggcctccgtgcagtggcgcgatctcagctcactgcaacctccgcctcccaggttcaagcgattctcctgcctcagtctcctgagtagctgggactacaggcatgcgccacaccagctaatttttgtatttttagtagagacggggtttcaccatgttggccaggctggtctcaaactcctgacctaaagtgatccgcctgccttggcgccgtggctcacgcctgtaatcccaacactttgggaagccgaggtgggcagatcacttctggtcgggagtttgagaccagcctggctgacatggtgaaaccccatcttcactaaaaatacaaaaattagccaggcatggtggcaggtgcctgtcatccccgctacttgggaggctgaggcaggataatcgcttgaacctgggaggcagaggttgtaatgagccgagatctcgccagtgcactccagcctgcgtgacagagtgatactccgtctcaaaaaaaacaaaaaacaaaaaaacaaaaacaaacaaacaaaaccagggagagaattgttttgacacaagtctttggctaatgatgaaaccgtctcccttcctggctgtcctggcatggtttttatagtctgaggcacaatggtgagagcaaacttaagagggagccaaagtgaggtactcaagagagggatccttctttcctggagaactgtggtagcccaggctgtgtaggtagctggacaagcaagactgaatcacaataggtctctacatcttctattaggaggagaacctgcaacatccagtggagcaggtcacaccagttatacatgtaaaatgtaggataaactaaaggggcacagagccaggggagaagacaatgggatgagactgttctagaatctcatcccattggttcattgctgggtgtggtggctcacacctataatcccagcactttgggaggctgagatgggatgatggcttgaggccaggagtttgagaccagcctggtaaacacagcagaccccatctctctaaaaaaaaaaaaaaaaaaagaaaaacatacggtttatgaaccagcagcatctgcattaaccagcttattgaaatgcagaatcacaggccccacaacagacttcctaaatcataatctgcaacttaacaagttccctaggtgatatgtatgcacacttatgtttgaaaagcactaagatttcttgatgaaggaggacttgaaaggcaatgatggatgtgaaaggaaaggtaaagagaagcctcaggtagtcacccaagggacagggccggttggagagagagtcccgaggttttatcctggagaacaccctgtactgaatgagctctgaacataaagatagttagcataggagggcctgaagtctccagataaaaggctgctgccactatcatttaccacgacctctgccattctccactctattgtcatccgcccccagtctccattccaggacttctctacactttgactttttgtttgtttgtttgtttgtttgagacggagtcttgcgctgtcgcccaggctggagcgcagtggcacgatcttggctcaccgcaagctccgccttccgggttcatgccattctcctgcctcagcctcccgggtagctgggactataggtgcccgccaccacgcccagctaattttttgtatttttagtagagacggggtttcaccatgttgtccaggctggtctcgaacccctgacctcaagtgatccccccgccgccccgccccctccccccgccccgcccccccccgccgcctcggcctcccaaattgctgggattacaggcgtgcgcgatgcccggctttttatttatttatttatttatttttgaggcgggaatcttgctctgtcgccaggctggattgcagtggcaccatctcggctcactgcaacctccgactccctggttcaagcgattctcccacctcagcctcccaagtagctgggattacaggcacacgccaccatgcccagctaactttttgtatttttagtagagacgagatttcaccatgttgccaggatggtctcgatcacctgacctcgtgatccgcccacctcagcctcccagagtctcagttgccaaagctggagtgcaatggcgcgatctcggctcactgcaacctccgcttcccaggtaagccattctcctgcctcagcctcctgggtagctgggatataggcgcccgccatcacgccgagctatttttgcatttttagtagagacggggtttcaccatgttggccaggctggtcttgaactcctgacctcaacctcccaaagtgctgggattacaggcgtgagccaccgcgcccggcccaccttttttttttttttttttttttttttttgtttgagacggagtctctagtctcgctctgtcgcccaggctggagtgcaatggtgtgatctcggctcactgcaacgtctgtctcccgggttcaagcgattctcctgtttcagccttccgagtagttgggattacaggcgcgcgccaccatgacctactaatttttgtatttttagtagagacagggtctcaccatgttggcccactttgactcttgagcagcctggccagcccgaccgcgccaaattctgttcgattctgcctagttcggttgctctggcctagttcagttgctaaggcctggagcttcatggttgcggaggaaatgatgtcacgttcaataggcgggctaaccagattcctcccttctcccgattggctgccaggaatttgactagattcggagtctcgcgggctccagggttagttgtcagtatctttcccagttgttccgccccctacccccgcctcccgcaccgcgcccctctccggctgccctctccgcgtggggcaaggctccgagggcagcattcagtagccatttagctttggaaggagaggtgattcgaatggcccggctcctcctgtcaccatgctaggcactttggccgcgcaggtacttattgacccgaccgggtgtccgtagttggcgcggctaccttaaccgcagggaattgtggaatttatagttctaaattatatgtgggtggaacggggaagctggagcagatttttggaggaaagcaaaactggggactttcaggactaggggcctgggtctcagaagaatgggaaaggacgagaaaggagtctaaataagaaccctgctattagcattgtttggttttcttttcaggtgctgacctgaacctggttcatccctttctgaccaaaactgttcactcaccgtggaagggactaagcatccatatggagacgccaccagtcaatacaattggagaaaaggacacctctcagccgcaacaagagtgggaaaagaaccttcgggagaaccttgattcagttattcagattaggcagcagccccgagaccctcctaccgaaacgcttgagctggaagtaagcccagatccagccagccaaattctagagcatactcaaggagctgaaaaactggttgctgaacttgaaggagactctcataagtctcatggatcaaccagtcagatgccagaggcccttcaagcttctgatctctggtactgccccgatgggagctttgtcaagaagatcgtaatccgtggccatggcttggacaaacccaaactaggctcctgctgccgggtactggctttggggtttcctttcggatcagggccgccagagggctggacagagctaactatgggcgtagggccatggagggaggaaacttggggggagctcatagagaaatgcttggagtccatgtgtcaaggtgaggaagcagagcttcagctgcctgggcactctggacctcctgtcaggctcacactggcatccttcactcaaggccgagactcctgggagctggagactagcgagaaggaagccctggccagggaagaacgtgcaaggggcacagaactatttcgagctgggaaccctgaaggagctgcccgatgctatggacgggctcttcggctgctcctgactttacccccacctggccctccagaacgaactgtccttcatgccaatctggctgcctgtcagttgttgctagggcagcctcagttggcagcccagagctgtgaccgggtgttggagcgggagcctggccatttaaaggccttataccgaaggggggttgcccaggctgcccttgggaacctggaaaaagcaactgctgacctcaagaaggtgctggcgatagatcccaaaaaccgggcagcccaggaggaactggggaaggtggtcattcaggggaagaaccaggatgcagggctggctcagggtctgcgcaagatgtttggctgattaaaagttaaaccttaaaagagacaggaacttgtgaattgtggtctgtgctgtgagatttgggggtggggggccagagggaaggtttcagcccatatcccattctcagcttttggcttcctaggggaggtagcagtggtcacagtgcgccccttttgaggggcttatctatctccgaggacacatagaagctgtctaaactaaacttagtagtggctgggggagatggtggaccttaatactgggtactacatctcccaggcgctttatcactggagcctgtttggcgcatgcgcttggcggtatggcactgtctggaagttacttcctgctgctgtgctcccattgggcccgcctacacagtcatccgcatctgttgattcacgtgctcagcacccaggtctcttactggtcggtagagcttccgggacgcccccttttttgaaagagtcaactgattagttggtgatggggagaggcgggccttgggaaccgtctcctggttggggggtgggggggaaagatggcggagctgatgctgctcagcgagattgctgacccgacgcgtttcttcaccgacaacctgcttagcccggaggactggggtctgcagagtgaggcaccggggaggggagagggctgtggcaaactgtccctgaggcacgcgggaaagaagcgggggcctaaagaggaagtctgggcaaatacggaatccgccatctgaaggagagcggagcagggggctcgttgtgcattaagggggatacaaaagtcagggaagaactctgctccctgctggaacgtcgagttgttccggggtcggggaaggaggggctgaagcgccctggttgtatcacttttcaagtgggcgggcggtgggtctggccgagcggagccaatgagggatggggcgggggcttgtgtgcgatctgtaggctggggccaccgaacgaccccccgacgctcagcatttcttgcagacagcaccttgtattctggcctagatgaagtggccgaggagcagacgcagctcttccgttgcccggagcaggatgtcccggtattgtgtccccagcctttctctaacccttggtgggtggaaagtgagcccagaacctggacccattcacaggccataactcatctggagtcacccctactttctcatcctttctcacactcctgccctcttgtatcctcccttatttagtttgacggcagctccctggacgtggggatggatgtcagcccctctgagcccccatgggaactcctgccgatcttcccaggtaaggtagtctttgtcgttccctcagatttccagaaaccctcatcttcccactgtttcccagaaactacgtagcttcctatatcctcacgcttctacataagtgcctatcctctctccttcaatcccctatttttgtttcttctcccttgctgcggtacaggaatccccaccgacatgtccttgggtactttttggactcttcttaagctctgcttcctgataatttctaactccctttcctcca

SEQ ID NO: 10933 - DNA, 6000 bp, Homo sapiens
caatagcaagtacttctatctagtatctactatatgagccaggtactattcaaagtacattgcattcatttatttatttaatccttacaaccacctggtgaagtacatgctataatattttacagataaggaaaactgagtaacagaatggttaagtaacttgcccaaaggcacccaatagggtcaagattcaaacccaagtattctggccccatggtctggtctagaggttggcaaactgtgaccaaaggaccaaatccagcctgctacttgtttttgtaaatgaagttttactggaacacaggcacattcattcacatatggtacatggctgctttcacactacaacagcagaattgaggagttgtgaaacagactatatgtcctacaaagtcaaaaatatttactctctggccctttatagacaaggtttgctgactcccacatcagactaaaccttctaaggcaataaggtgacacacttaaaacattctgggccaggtgcaatggttcacacctgtaatcccagcactttgggaggccgaggcgagtggatcacctgaggtcaggagttcgagaccagcctggccaacatggcgaaactccatctctacttaaaatacaaaacttagccgggcatgatggcgcctgcctgtaatcccagctactagggggactgaggcaggaggatcacttgaacctgggaggcggaggttgcagtgagccaagatggtgcactgcactccagcctgggcaacagaacaagactccgtctcaaaaaaaaaaaaaattctgaacagagcctgttcaaataactcaataaatgtaagttatctttattgtcatcactgctattggttgtagcagaggtggaagcaactgacctgatccatggaagccccagttcagcatccccactcaccatgccagtagttgcagatggagaattcctggccccaggggctatagcagatccgatagaggttagaccgcatggaggtggggaacagccacttcaagtagtccgtgtctggcaagcgaatggcaatgctaagtgaccataaacctctgttcccccaaaactcagggcattctatggagtctagtgcccactcacctccatactgtcccatctgtggagaggagagggagatgaaagaatccacgttgtgatcatccatgacagaaagcagagcccggcacacaaggccccctgtaagcagaacaccacattgggcaggcacttaaggacagcaaagccagcagcaccccccacccccaccacacacacacacacacacacacacacacacacagagacacacacagacacacactgtacacaaaggagactgaggcttacagaaggcaggcacaccctgtgccaaaaggtcacacatcatataagtgactgagcccgaattagatgctgggcctcctgcctctagttctaggatgtttttacctgccccattagcccttatgtccaagaaccatgggtaacaggaagcaaaagggcagcagtgtagggagcctccctcccattcaagacagagatgagacccaggtgctgagggaagtcagaaaggaagggctcaggtaccagggttgtgcctggagcaatgtggttcagaaaaagggacgctaggaagtgtccctcagataaggatcaagcctcagatagggcttaggagttaggggcaggggagtcgcctaccctgcgagtagcagatgagatgcaccccttgaggggcctttgccatgatggggaccacagcctctcggaacccttgcacctgttcccacaggggtcgcaagctctctctcccatcgaagagatcgagcactgtcaccacagtcccggggtgtgtctgtgggaagggggcaatgcagccaccggggataggctaagaagctcccacacgccaccccctggcccgcgtccacaggtctattgtaccctgctagaaccagggatcccgtcccccaactctcccccacgccagcaccagctccctgaggaactgggcaggcccagaggggtggctttcagttccccgctctccctcccctgccacagtagacgcctctaacgccctgcacccaggtgtcccctgccagacctcattgatgtattccagcaggtggcggaagctgtacgagctgtcgaagagcccatgcaccacgatgaccggcttgtaggacgcgcggtggggcgcgggggctgcaagcagcagcagcggcaggaaaggcaacagaagcaggacccacgccgcggggagccgctgcccgcagagccccagcatgctcccgcctgagaaaggggtgataagggcatgtgagggagatggcaacaccctcctccctcggaacagacgcccggcaatcaagccacctcctctcgctcccacaccaggtccgtgtcacaaaatagcctacttttaacttactccagccctctccctacaaacacacccccccaccacgttgacgcaccaacgcgcacccgaagtcccgcctccaactcagcgttcgggggacttgttctctaggtccaggatcttcctaatgcatcgcctcagccatgaacaacgcggagttctttaatacccgtgagcagcagcccaggccccttgaagagtgcagactcccacctggcctgggtccgtaggcctcgctccacccgctgtttacttatcccaagtctggaacccacggtggcggggggaagggtgaggaaagagagcgcaggggaatgacggatgggagggggaagggcgggctgcttggggtcgcgcaaatccgtcacgtccggggctttctctggcaaccgcgcgagcgttccccgcaacacagacccaggacaggaggggcaatggaatattccattgcgccctaggtgctggggaggaaacaggcggagcgatccatttaggccagtggggagaggaaaaagcagcaaacatattctgggaatggaaagaaggcctctccaggcttcgttgcccccagcgacccaaaagtccgatttccccgccttgattctccccacttcccaatacaggcgtctggctccgcagcagaacacgaagtttgcattccccaaggggcggccagggggcggaccagggaaaggtagtcctctgcattttgccgtgtgctgggtgagtggcagggtggcctggagggctgatgccagcccgggcgtgcccctcaacacccaccccaccccaccctccagtccgccccaggtcagcgacttacaactcttcattctgaagtgcgtgtagtgcccttgtctccagagacgcagagagtcctcgaggccccttgagctaagtgcagcctggcccagtttctcctgccctactctactcccctccctataagcgacccaccctcaaggggcggagggcgcgtagggatgcgctgactcatgcccgcgtaatttcgaccagtctttcaacctgaacgacccccagaatctggctgtctgagttatctgtgggtggctccctaccgaaacccccaggcgccccacctctccgcctgtgacccctaaccgacaccctagtgcctcagggcttttacttgctagggcttttacttagcatttaaagacgtttctctagagataaggatttctcagcatgtctgagcccctctctctgtttacaaggtcattgcttggtctaaatttgtctcaatcaaaacatttttgcgctcagaatggtgtagagtgacgatgaggtggcggtaaggggttgagcgctcacgcgaacgcctaagtgaccagaacgactggtgtgaagccgtgatctgactctgtggagcctgggactggtttcagcgagagcctctgtactgctctgtagtctctgctaggacatggacgaaaagggacgcagccgggagagcgactgccccaggtgggggctggggggacgtaagggaagaataataattatctggctgtgtttttgtttaaaaaaaaaaaaaaactggtgtaaatctccatagacttcctatcctcgctcccttcacccacccacgcgctcccaagatgcaataagcaaataaaaagactaataacgctgtactgcaggtcgactcaggagctggagatgcgtcttggtgggaggtggtgggtgggagtaggggggtttagggaatggatctgaacattgaccagcccagagactctaagcagcctcaaaagcaaagggaaagtgggggaacaagcacacattaccaacagagctgccagaaatgagcagttaagtcataccccctaccccctccaaaagagcttcagctccttagtcctggacgaagaaggtatgtatgcacaccgcccaaactctctctcccttttccctccaaggcccagctccccctgatttacagacctgggcctccctctttactgctaggttggtaggttcaccaaaccctgggaacttttcagaccatcgcagttctgaactctgcacaattctctctcacacacaagtatttatctcttctaaagaggaggaaactggggccaaggatttgggagaagaccctggcaccttgcagggagctaagagggggagacgacctgcctctggaggcacctgggttattaactccactgagaacctgttcacttcctcccacaatacaatcactgagtcttggtgggggagactccagagagttctccttccttcctttccttagtcccacccgcctcgcctggtctagcctccgtgtttccatgacaactccaaaggaacccaaactgggggcttgaatgccggggtaagaggaggagagaggtggtccgagagcagagagagaccgagtgggaaacatctgaagcgctccccctccctcgcctcggtccctttaagctccccccctccccgctctccctccgcccgccccccccgccccccccccccgccgctgccttcatctctccatctctgcgctgctgccggctgcgccatccagcacccagactccagcaccggccgaggacccccactccggctgcagggaccctgtcccagcgagaccgcaggcatgtcatccgaaaagtcaggtaaaaacaataacaaaacctcccaccccctccactgtctccagactctccgtcccccttgccccaaccccctcccttacccctcctcagctgtggttctatttcattccccttctctccagctctcaacactcccccagtccccctcctctttctgtctccccctttctcttcctttcctctttccagtggcagcctctgccccttgccaacaacatggtcaggggggtaggttgagagggtgaaggaggtacagccaggttttgcagggatggcatcattgggagtgacagatggacaatcactggctggcatggagacatcctgtgaggaaatatggagacatgaccagatgggggttgtcaagggagcaaaatccagagggctcttcttaatctgccctaaaagaggtcccgagattctcacagaggctggggcactcctccccccactgaaggaacagcagagtggaacacatgtcatcccacatgtgtttatacaactgttgaattgagcacatattaacacagggttgcatgtctacgcatacgcacacacaggactagctcggataggccagcccaaaggcagctatagcaaaggagaggggattaggtctgcaggtgagagctgggtgcatggtgatgaaaaagacagaaaagaagcagaccagagttgtgacctcaaaactagattggaaggaagaaggaggggggcagatggcctagatacagcccctctcttgcccctcaaattagagatggtttctcacccgtctctctctatgtgtctctcccattatctttctccatccctgaccggctgtgtttccccttaccccctcctcaactcatcactgtgtcatctttcctcttatactctcctccactcacctcccccaggactcc

SEQ ID NO: 10934 - DNA, 6000 bp, Homo sapiens
tgccaagctttcttctacaaccagagccccccacaatgatgattaaacacctgacacatcttgctcttgtgtgtctgtgtgtgtgtatgagacacaacctcacccctatacccttgagggccctgaaggaaagggactcacccccatacttcaccatactataccaaacatctactcaagttggggagaagatgcttctgtcgggggtgggggcgaacttgggaagagatcccatcaatatatttcaccttttttattgaatttgtattaaaggaggtagtgagggggcggaagcacttaagagtcagaatccatattagactctggggagtgaaaaattaaattaaatcagtaagatggggagtgggggaagagtcagagggaactttgcccacctttgaagatcaaatcaagaaatcagggaaagcaaagacttaggagaggagaaagacattctctcaatccatcctccttccccagggcagagaattaaacaacgttactgagtgagcctctgagcagaaggctctcccatctatgcacagacttcactcctcctccccaggccttcctggacaatgtccagggctggccttagccaacagaaatagaggggtcaagggggtccaggagtacggaagggtcagcagggaccctcaatactgattcttctctggctggaggtgggcaggaagcagacatagctcaaatactgagcagccaaaaaaagaagaagatggcgagaaacaggaagagggaatcctgccagctggaggctgggtgaccctgtcccagatccacacctgtgggagagaggaaagctgtggaagcatatgctcctaggctgggagggggcctgaggggattcacagggctccctgatgggagctgagtgtgactcttacctgtaccccggcggaaaggctcatgggcattgaagacggtggtgaaaaagccaaagggaaaagcaccaacaccaaatgagaagtggaagcccccggtatcaccaaatggctggaatccctagggaggcagaaaaagtcagacaggaagccggcaaatctgtcaaggaagggacacaactggacaagaagactcacccctctgctctccggagctggtctctggccctgggggcggggtggagtttttaatctgaggaagtggagagagaaagttaacagggatttttctcctcccatcttccacaccgttttccaagggcagaagccttcaatcttccctaagcaacacctccagtctctcacctgggatcctggggcttctggctccctcgcccataaagcgggacaaccttctctctgctgatcccagctttacatactggacactcttgccgttctggccgtgtctccagccactggggagaaaaaaggtggtttccagtatacaagagggtcttacagctcctcagacctccccatttccctcttcatctcctgagtacgcacctgatgaagacatggccaactggatgggggagaaaaaaaaaaaaaggtcaaactagctacagaaaagagagacacagaccctagacttcgcagaatcccatctaacccctcttcccaagcaacctgctgttgcttttcagattttctgcaacctctaccatgccagccaacttagttagccttcctgcttgtctgatcttccaacacctaaagctctgtccatcctcaacacactcaaccctctcctttctcctctccccaacaaacacatacaaattttcgtgccctctcttttctgcctttcaagttaatttctaatttccttcagccacctctttctgggtctcctcttttcaaccccaaccccatcactccaaaccaaacccctttactagcacattcccccattactcactttcaagctcaataatgtccctatctttatgaccctttaacctttcaagtctgcctctccacagtgcccttataccagccccctcccagatctcatctgaatgtgatccatatttcctggttctccccgactcaactgatgcgtgcctcccttaacctttgtgtctcacttgtttccacctgcacagctaagacccctcacttctctggggtaaggtggctcgggtctcacattgtcctgccactccccgccccaccttctcttctcagcacatcacgtgcctcagctcctggttcctaagacctttctttccacagatctcgaccgttatactcccacccacacataccagcaaagtcttatgtctcctgtcgggcttcacctatgggaacgtgccctccgattatctgtatgactgtatgattattcgctcctagcctctccagtatataagcgagacccaccacctcccgcccccctcctcgattctcaccagtacaggtggccacacacactgaccacagcttcccgagcagtctccaaacatatattacattcgaaggtcgcgcccgccccgccccgctcgcgatttggcccttcggggcccccgtcctcctcctccgctgctgccatggccggttttgtttcgccccacgtacccttcagtccccccaaatacacatacacacgccccaacaaaccagaaaccacctcctgcccacgatcgttgggcaggcttcaaggtttcctaatcactattggtctgaatgcctgccagtcacaaagaattcaaaagaaaggattggcccaaagggtaggggcgggaaaaggttagtgcagtcctgccttcgcacaatggctattggctgatacggtctaagtcaatgtgcaatgccaagggattggtaataactcgctacacgctgtcgcctggccaaggagggctttattcgtctgagtagttgtcagtcataaccaaagccataagcaatttgctcgggactacctatagacctcgcccactataagcccctttctttccttcgcttcctcttttagagaatgtccggattgctattggactttggagcgtatggctccaaatcaactcattggctaaaacttgacggaaaatggtggttaggtaaaacgcgcctgcgcagcacgcggcgggacgggggtgggccaatcctgtgagggtttaaccttctctttttccacctcttcacccctatcttgtcgccatggtgactgctctacaattggcgaggcttgcacttcaaagtcctaggctcgcttcatccgggtccttcagctgtggactttctgctgattgggccttttccttttcccctgattggccgacatcgggaaagacggcgaagagctaggaaaagagggaaaacactagggtcgcagggttcaaaatggctccaacctcctttggtgacgtagagagcagaacttgggtctgcccctcccttttagttaagggagcagaactgggattagcccgacgtttggatagtgggaacatcgatctgcggcgctggtgttaacccaactcattcggctggacgactcagccctccccatattaggtgatttacagagcaaaactgaactaaaggcccacccctttcttaatgttgtacacagagtagaacaggattgacttcaactccgttttaaaccttcagagcaggaaagctctgggctcaacccctttgtgagtggtgcaaaagggacaaagcccgccccttttaaggagacccgcggaggctagacccgccctttcctctttataatttgcccatcagaaatagggtcttcttcccaggttggaccccggggagtttgggcttttcctacaatcactgaccctcactgtgactaaaggagcagaattaggtaacagtcctcccactaccaatcctcttcccgagggcatgtaaactaatgcagggtaaaggtgtggctagaggggggaccttgataaaagatcccatgtgactcaagagtaaggaaagatgagaagttagcagttgcgtaaagaaggactggggcagatgaggattcaggaagcttgaggtttaggaaggaagatattgagagggaaaggtggaaatgaaggagagtgaagtgatggaatgatcctagtaaagggataatgggagtggaggaagagaagagggggtggaaaactagatacatggctaccaaattaaggaggcacgcgcattccagaggaatcggcattcttcctcactttttatttttctagaaagcacccctgaagccaaatttccattggaagaaaagatgtacccatattgtatgttgtgagaaggggttgtctcagcttgggcaagtaaggagactgatacgaaggaagtaggaaagaaaaggtacagaggtaaaagagcatggaaaaggaaagggtcagggataaggccaaagagatctcttctctttaaaggccagagaaggcaggtggaggggggagctggactgctgggagatagtgagggacaaagggcaaaggaaaccagaccagaggactggagagtgagatggagtgagatggagtcctggagagaaaaagaagagaggtgaacttaatgcttgtcatatggtaggtagatgcttgataaatgtttagaattgaatgggtacgggaaaaggggtccttaagaatagttggggggaataagcagcagataaccggagttgagaaaaaaagagaccaagtaaaagtggcagttaaaagagagctgatggagaataaaggaaggaatgtgcggaaggaggaatacagcaccaggggatccagagctgaaagggagttagagaaaaaaaagatgcagctggagccagagatgggggcaaagaccgagggagagccctggggcggggctcgcaagaggacactggtagatgtggggaggagatgccagagtttctgggagacgattggcaaaacaggctgcccatcaccgccctccacttcctggccggccccggaaaccagcaggcgttggggaggggtggcgggggaatagcggcggcagcagccccagccctcagagagacagcagaaagggagggagggagggtgctggggggacagccccccaccattcctaccgctatgggcccaacctcccactcccacctcccctccatcggccggggctaggacacccccaaatcccgtcgcccccttggcaccgacaccccgacagagacagagacacagccatccgccaccaccgctgccgcagcctggctggggagggggccagccccccaggccccctacccctctgaggtgtgggcgggaaagggatgggaggaggagggaagagggtgctgaaagcgactaggatgaggggaaggggagagattgggtctgggagggccgactgggggagagggttgctggggaaaggagaggggccgactgggaagagggttgctggggataggagaggggacctgagagggaggaaggatggaagagacctgggagggaggagaaatggaaacccttgtgaatttgggactgggagcgtgcacagggaatcctggagagggaattccctacaccttccccaattccttttcttgccctttgaccccacatgactcttgaagggtcatgaggggagaaggccagcagaatttgcctcttaggaatacccttaggtgcctctgtttccatctaggcacaggacctcttgtttctcagtggccttccacactgctagacccttactgacacacaaatgccttatgggagccatgttttctacattgagtctgtgtgcctttgacatgtttaatggcttgtgtgcaactaggttgtcccaatgctatccataggctgtgtagaaatggtgtgttattttctatcagaattgcccattcttcattcttgtgtccatgtctcacatccagttttgacatgttttaagtaccgcatgtgtgtgagttttcatatattgcacctgttctataatttcatgttacttgcacattttatgttttggcatgtttatttcagcatgtgaaggttatataccttattttgctttggctgacatgtccatg

SEQ ID NO: 10935 - DNA, 6000 bp, Homo sapiens
ggaccccttcacacaccctacactgatctccccagttagctcggcacccccagccccactctgccacctcaaactctgactcttctcaaccccagcctctgtctctctccctctgaaacctaccaagtcactttcctttctccatccactcccagattcctcctcctacctttctagaccatctcccaaagcccgcagcctttaacctgctgcctgcatcttccctgtgtctccctgaagctgaggagcttccccatgctctgggagctgatcttttcccaagaactcctcattccacccccaactcattccacccccaatccgcttcctccctccgcagactgaccctcctccctccttgttctcaggccccctgctctgtttctctagctcctcaacttttctctttccccactcccactcctcccaaggaaacacgccctaaactgccaccgaatgaagcctgctctctttagcgtcctgtgtgaaatcaaggagaaaactggtatgtgggccccccccggattgctcaactctgggaacagaaccctgttcattatagggctagagtgtgacaacttggggccctgaggaaagtaaggagtcagggggactggggaaggaaccaaagcctgggaacttggctctccaggaagcaccaggaggactgagcactgggtattggggtctctgggtccctaagtccactcgcctgcatgctaggcctcagcattcggagctcccaggaggaggagccggtggacccacagctgatgcgcttggacaacatgcttctggcagagggtgtggctgggcccgagaaagggggcggctcagcagcagcagctgcagccgctgcagcctctggtggtggtgtgtcccctgacaactccatcgaacactcggactatcgcagcaaacttgcccagatccgtcacatataccactcggagctggagaagtatgagcaggtaaggagaggaggcttgggtgggtggagggaagggctcttgcaggggaatcccatggtcaaagggctcctcctcaccagcccactggcccccactacaggcatgtaatgagttcacgacccatgtcatgaacctgctgagggagcagagccgcaccaggcccgtggcccccaaagagatggaacgcatggtgagcatcatccatcgaaagttcagcgccatccagatgcagctgaagcagagcacctgcgaggctgtgatgatcctgcgctcccgtttcctggatgccaggtgggcccagggaccccaggctggcccccagcactgggctccttcccattcctctccaagaccctgagctgccatgctgcacaacatggtactccatgacaatggtgactctggggtcatgccatgtgacagccctgccaggacatcaacatcctcctcactgctcttctccctcctctgtagacgaaagcgccgtaacttcagcaaacaggccactgaggtcctaaatgagtatttctactcccacctgagtaacccatatcctagtgaggaggccaaggaggagcttgccaagaagtgtggcatcaccgtgtctcaggtattatggaggttgcgggaggagttgtcaggcaaagtgcacgcatctcagctaggtgcagtggtgtgttcctgtaatcccagctactagggaggctgaagtgggaggatcacttgaattggagaccagcctgggcaacagcatagtgagaccaggaagcaaaaaaaaaaaaaatgctgtcactcacatcttattcagtgaaggacttcagaggcaaatgtttctacctgaccctcctttctgccccacaggtctccaactggtttggcaacaagaggattcgctataagaaaaacatcggaaagttccaagaggaggcaaacatctatgctgtcaagaccgccgtgtcagtcacccaggggggccacagccgcaccagctccccgacacccccttcctctgcaggtggatcccactgtcaccccggctgactgttttgcacacttcctgcttttgttcccacttcctatctaggcaggatcatagcagagagggggccttttggggtgagagggaccgagctgagataggctggagatgtcaggggacagaggccattccagtgatcttagttctgcctttcttcccacgggtggccaaggaacagcctgctctttctgtgtgttggaatgttattttgtggataattggagtatagtagcatgtccccacaagagttgagagttgtggttcatcctctaccatcacgggctctattacactcttccctctctgcccccacaaggctctggcggctctttcaatctctcaggatctggagacatgtttctggggatgcctgggctcaacggagattcctattctgcttcccaggtcagatgcccatctcctctcgaatagggctttccccaactccatttcctctactttaggatacaagacctctttcctctgaggcttctcttcactgtcataccttcctctgctgcctgcaggtggaatcactccgacactcgatggggccagggggctatggggataacctcgggggaggccagatgtacagcccacgggaaatgagggtgagtggatcctgaagctcctctctgtccagttctcacaggacagaggggcattttccctagtaatgttgtgcccacacagggttcccagggctttctctgttttctgtactctgtctctcctttcaggcaaatggcagctggcaagaggctgtgaccccctcttcagtgacatccccaacggagggaccagggagtgttcactctgatacctccaactgatcttgcccctcagggtcacaggggtgggggctctcacaaggcgacttgaagaggacgcaggcttccagaggacaaaccccaatacaggagaagcacaagacagagaagggccaatggggtcatcccctccctaacgagactctctgtgctgggggtgctaattacatggcaggaagaatggggcctctaaggggagtgtggggtctgtctctcccttttttccatctttttcctctctcgctttctttcttacacagaaacatacacataccgagaaacctatttctcagacccctttttctcctctgtctttctctctccctctcccacacctcacacacacatactcccacttgcaactattctgtttctctcctgggctcccccactttcccttccccaccccacttgtatgctctggaatctgtggagacgccagccctgcccaatcagagatgccaaaaatggggacatgacttctggacagaggacatgggccacgcccccatgcatccccacccccgcccctccggacggcttacttacctcatacgcagctcatcttaaaccaatagaatcgctcggtggacgagagtgtctgactcagatatctacctcggagggagtttctgctactttagggaattattgactgggctttggggttgaacttttttttttttaaagaaagaaaaagaaaccctgggatccatctgttttttttgttgttgttgttgtttttgttgttgttggtggtggtggtggtggtggttcttaatttttaatttagtttggggaagtagcttgtttttttttttataaatatgttgatttcttgtctttttttttttttatttcttactttcccatattaggggtgatagccaaaggggttctggtaagagaaagggggacaaacagaactggtaaagaggcccccctggctccaggcctgtccatcaggaagtaaattttacagggcaccaagctttgccccctaaaatcccttaggtgttctttgttcatgcaggcaggtttctgccgcatttgatgtggaggcagtgaagggcttgccctgctggcctctcatcccccttcttcccacaacccttgggcagggctggactcagtaattttgaggaaattgaagatgccatcttcccctgtgagtgacatgtctttaattttttaaaaaactactatttgaaaattggagggggaagaatgggaagggagttattgccaaatatgttaaatatgggttggggtgcttgtatatgtatcttcctcaatttccccataaatgaggtatctttttgtcacaccaaaatcaaggggtagggagagggaggaggttgcaaaaagccagatgtgggggaaaagtaacatcaacactgtcccatcctcagccctgaactagctaccatctgatcccctcagacattctcaggattttacaagactgtcagagtggggaacccctcccattaaagatccgggcaggactggggacaggttggaagtgtgatgggtgggggggtgggaggcatgggccgggggcagttctctcctcacttgtaaacttgtgtagtttcacagaaaaaaaacaaaatgcagttttaaataaagaaatttcttttttccctgggtttagttgagaatttttttcaaaaaacatgagaaaccccagaaaaaaaatgattttctttcacgaagttccaaacaggtttctctcctgttccccagccttgccttcatgatgcaggcccaattgcacccttgcagacaacagtctggcctgaaccctattgatgcaactttgcgcaatcaagatggggctccagtgggtcaccaggcagccctgatggactgatggaataaataggatcgggggctctgagggaatgagaccctagagggtacactccccatcccccagggaagtgactgtacccagaggctggtagtacccaggggtggggtgataattatttctctagtacctgaaggactcttgtcccaaaggcatgaattcctagcattccctgtgacaagacgactgaaagatgggggctggagagagggtgcaggccccacctagggcggaggccacagcagggagaggggcagacagagccaggaccctggaaggaagcaggatggctgccggaacagcagttggagcctgggtgctggtcctcagtctgtggggtgagccactccctcaaccccactgaccctccctgcagaaagcactttaaccccacaccccagtcgtcctagaacttttcccagaacccgaggaagtgcctttcaaggtccctcacccaccctgtccaaattttgttagccctcattcccttcctacccctctaccatggtgctatctcccaggggcagtagtaggtgctcaaaacatcacagcccggattggcgagccactggtgctgaagtgtaagggggcccccaagaaaccaccccagcggctggaatggaaactggtaagcggggctcctgttgcagcctcccaacttccagggagaccagcaatgatttggatccccgtcactctgcctcacagtcctttcccaaaggccttgcactgtttaggccctgcttctctgcttctagaacacaggccggacagaagcttggaaggtcctgtctccccagggaggaggcccctgggacagtgtggctcgtgtccttcccaacggctccctcttccttccggctgtcgggatccaggatgaggggattttccggtgccaggcaatgaacaggaatggaaaggagaccaagtccaactaccgagtccgtgtctaccgtaagaattccagggtcttctccaaggcctccctcttacctaagaaaaagccttcaaccccagccttggcccatgagggcctctgacttccactggcctcatttccacacacagagtttgagaaccttcacaattacagcctctgactggatttttcctccttcagagattcctgggaagccagaaattgtagattctgcctctgaactcacggctggtgttcccaataaggtagtggaagaaagcaggagaagtagaaaacggccctgtgaacaggaggcgagtgtgtgtgggtgtgggtgtgtggcatctctcattttcaaagga

SEQ ID NO: 10936 - DNA, 6000 bp, Homo sapiens
ggacagcagcaggaagacaagttaggagatgcaagagatgacataggcttggactaggatattggcaatagggatgagaagagatgagaagtgctcagattctggatatacatatttttttttttttttttttgagacggagtctcgctctgtcgcccaggccggactgcggactgcagtggcgcaatctcggctcactgcaagctccgcttcccgggttcacgccattctcctgactcagtctcccgagtagctgggaccacaggcgcccgccaccgcgcccggctaattttttgtatttttagtagagacggggtttcaccttgttagccaggatggtctcgatctcctgacctcatgatccacccgcctcggcctcccaaagtgctgggattacaggcgtgagccaccgcgcccggcctggatatacatattttgaaggtagagtccacaggatttaagacagtttggatgtggagtatgagaaaaagagaggagtcagcaatatcttcaaggatttgggcctaaacaatggaaagaatagaactgcaaaactcaattctatcaggaaggaagagaaggttaagggagaagatcaggtcagttctggacatgttaagtttgtggtacttgtacttggaagtacaagtctggagttccgggaagtgtatgatcttgagagtcatcagcacaaaggtggtcttcatagatggtatctgaatctggtagggagccaggagactggatgagatcacctagggagacagaaaactagaagaggcccagggaataaccatggacactacaatggtaagaggttggagagatgaagagtaaccaacagggaggcagagagggaggggcctggggcaacgaggggctccatatctcccgaaccatatatttacaaataatctccaagagtggattactcttgcttatttcttttttttttttttttttctcactctggtctcaccttgtcaccctggctggattgcagtggcatgattatggctcgttgcagcctcaacctcctgggctcaagtgatcctcccacgtcagcctcccaagtagctggggcaacaggtgtgcatcaccacggcctgctaatttttgtattttttcatagggatggggtttccctatgttgcccaggctgatcttgaactcctgggatcaagtgattctcccaccttggcctcccaaagtgctgggagtacaggcatgagccaccgctgcacctggcactcttgcttatctctatggctacagtggcctattgccttctttgtgtttggacacattatcagggccaacctcggagttcaccttttaaggtcacaagtccctatgactgaagtgtgaatgactgacaggtttatccttctcagggggtatacaatgaaagaaaatccctttaataaaatgaatctctatttgatgaaatactgtaggaaaaagggtcatttcccagagggaactatctgtatccctggcatgctgcagttcactgtagtgatgatggtaccaccctggtcagtatcaacccttgggaaaccattgggaaggagaaacaagctcttgggggagcatcaatactgctttgggctgtaaggtcttagaggccaggaaaagtatctgggacccaagcatagctcataatgcctgagcaggtgcacactgccttaccttaagcaggataaagcaagaagtgggcaggcagcttcctgacactgtctttaaactcagcttctgcccaccacacttctggttcccttccacctaaccacttctctgtctccgttgcaatttctcctttttctcaagctccagcctagtgccccagcctccctttccacaaatggtgttagattgtcaacattgcagaaatggtgagttcagttctttccaccaaggtcttcgcggttccatgagaaacctgttgtctcttcccattttcctttcactactcaccagcaccaaatccccagtcagcaaaccagagagtacaaaagcagggacttttacactagggttcctcttccccatacccacaattgcctcctcgactaaggaaggtgatgggaaaatgacaatgacaccaataggacaatgggacaaaagcatggacaggaaactcacaaaagcatggacaggaaacacgaatagccattaaacagttaaaaagaatgttgacatttaacaacaaatgtgcagtttaaaggagcaataagagaccatttcatctatcaaagtggcgaggattctaatgtggagggttggcgagagtaaggacacaggcagacactactaactggagtagaaaggcctcactgctttctggagaatggcttggcaacacatagagaccaagagctttaaaacaagtctatgtcttcaccctttcactcaggggtttcacttctagaatttagcctaaggcaataattagccatgcaaatatgtaagttcaaggatatttaccgaaggtctgggcgcggtggctcacacctataatcctagcactttgggaggccgaaagaggtggtcagattacctgaggtcaggagttcgagaccagcctggataacatgatgaaaccccgtctctactaaaaatacaaaaatcagccaggcatgtgcctgtaatcccagctactcaggaggctgaggcaggagtagcttgaacccaggaagcagaggttgccgtgaaccgagatcacacaactgcactccatcctggacaacagagtgagactccatctcaaaaaaaaaaaaaaagaagaagaaaaagaaaaaaaagaatatttaccacagctcagtttattatatgtttaaaaattgaaggccaggtgtggtggtacacacctgtaatcccagagctttgggaggccgaggaaggaggttgccgtgagcccaggaattcaaggttatagtgagctatgtgcgtgccactgcactccagcctgagtgacagagcaagaccctgtctctaaaaaaacagaaagcaaattgagacccacctaaacatgctataataggaaattggtttaaatgaactagtagaatactgggtgaccattataaatgatgctggctcacgggcttcctaatgtgatacactggtactcgtgcccaaaaatgcataaacaccagacatactcaaatttaggaacagtctacaaaacaactgtcctgtatgcttaaaaatgccagtatcggccaggtgcggtggctcacgcctgtaatcccagcactttgggaggccaagatgggtggattgcctaagctcaggagtttgagaccagcctgggcaccatggtgaaaccctgtctctactaaaatacaaaaagtcagccaggcgtggtggtgggcgcctgtaatcccagctactcaggaggctgaggcacgagaattgcttgaacccaggcggtggaggttgcagtgagccaaggtcgtgccactgcaatccagcctggactgtctcaaaaaaaaaaaaaaaaaagtcaatataatgaaaggcaaagtacatttaaggtactgtactcatattaaaggaaactaaaaagactcgacagctaaatgcaatgcaggatgccaaatgagatcctagaccaaaggaaaaaattgtcatgaaggacattatggggcaattggcaggacctgaatttggactgtcaattagatcatagtattacatcggtctaagtttcctgatttggataattgtactatattatgtaaaagaatgttttgttcttagaaaatttgcactgatggatttaagggtaaagggtatcttgtatgcaacttactctcaaatggttcagaaaaaaatacaaatgtgtatttatagagaaataatgataaagtaaatgtggtcaaatgatattagtggatgaatctgagtgaagggtatcctggaattctttttagtatttttgcccctttcccatgagattaaaagtattttaaaataaaaagctaaaaaaaggaagaaagtggtgctggtgaagtatattccccggtaggggaaggctctcaggtgcaccagcagcagccatgagtgcctcaacaccagggagagcacagctgccactgacaccttctgccaccctggactctcagttccctgtgctactaaaggaactcagtgtgtggttgaccccaaagttgtcctgggttgactcaagaaggtaggatgagcattctgaggcaaagaattctcttttgtgattttattgactccaattttgcattctgactggcattccctgcatcccaaggaccttgacagcggagggaggcagagatggaggaagtgaaaactacccaaattcagtgtttgttacagacaattcagactgcaaaatttagggtagactatgttcatttatcactgataatgacagtcttaacattcccctacaacaggaagaccaagatttccccaaaaccggccagcatcttgcccatttgccagaaggagaaaaataagtcctggcaagagccaagataaggcccagaagcccctgggttcctttagccaaggtgagtggtttcaaattatgacaagttgcaggttctctgagaagcatctgtaataacctggcaaattaagcatcctctcctgggaggaggaatacagaactctgtaaccacccaatacctgtttccaggtcctgcccctcctggggcacagggcagccaccttgcaattctcatccctagaaaggagagaccagatcaacaaacagcagggctgggactgcccagggggttccgagattccttctcccctcctatcacctgccctccaggcacaccgtcctacttccccctacttccccaggggttgtcagggacagaaggcccctccttcatcccccctagtgttcctccactcttcctccgccccccattactagggtgtccaggacattgtgtgactcaggaaacagctcagacgtgaggcttgcagcaggccgaggaggaagaagaggggcagtgggagcagaggaggtggctcctgccccagtgagagctctgagggtccctgcctgaagagggacagggaccggggcttggagaaggggctgtggaatgcagcccccttcactgctgctgctgctgctgctgctgctgctgctatgtgtctcagtggtcagacccagaggtgaggcatggcgtgggtgaggtgaggggacccagctcccttaggaggatgatcagtggggtgggggaagagggccaagccccaggccgtgtgagggatgctggatggaggagattctcactgcccaaatagagacggcctccagggaaagacggctctgcccatggagctgcttcgggcctggtgccaggggtggtgactgctgggggatgggtgagagggtgcccacctccaggaagaacctcgtcagcactggcactggaggactcttgcagccatagggaagaggggaagagggaacacactgaccacctgcttggggaggagatgagagggaagcaggagatggggacatgaaaggtcaggcctactaagccctttcttagtccagctgtccccaccccccggatggctcaatgctcggcctttccgggaggaaatctcttcgaagtctcagccattcacctcccgggagccacctccgcccctcttctgacccctgttgtcttgcttccgagagatggagtccgaggctggacttgggaggccagagaataaacaggaaaggggggtagggattagtaactgggacggagggcactggggctggggctgggtaccatgtggagagtggggacagatgtgaagaagaggtggtttagagtacctgtgggagctgctgtgggcaggtctctcaggagcacctagaagaggaaaggtggaggcacagcacccagggcttccattgcgcctgcctctccaccctcagggctgctgtgtgggagtttcccagaaccctgtgccaatggaggcacctgcctg

SEQ ID NO: 10937 - DNA, 6000 bp, Homo sapiens
cttgccatctttccccagctggtcttgaattcctaggttcaaggggtcttcccaccttggcctcccaaagtgctgggattacaggcatgagccaccatgcctggctgatccattatctttctaacttattttcctactgttgttttcctggatcagttcataccagtgacactggccacttcatattccttgaaaacaccagacacattcctatcttacggtctttgctgtagttgtcttctctgcctggaaaactcttcactcagaaatccacttagatgtctaccctacttcccccaagtattgccttctcacagaggtatatccaggataatctatttaaatcgaaatcccactgcagctgccagtagttctctttcactgacttgctttttcacttttcacagcagttaccaccttctaagatactgaaatgggaaaggtcttcttgtccccctcacagggcttgcaacagcgggagtggctcacttcttcagtgccctgctgctcaaacctctagggagagcatacagacggacaggatgtggggctctggcctcacggcagcatctaggggtgtatgtttacagttcctgaagccccagtgggcatgtgttactgtgtgctcttttagttttgccatgtataggcagctagtgttaactagctcaattagaccctctgccttattgcaaggacagagggctttctgtatcccaggttcttaccttggtgtaccagaaaaatcagatcacatgtgggcttgaagaatgagagcaaggtcttattgagtggaagtggctctcagcagatgggggagccagaagggagatggagtgggaaggtggttttcccctggagtcaggctgctcagcagctgggttcccctccaactgccctggccaaactccattttgttccgctggtcaatggcctgccagcatgccagcatctgctggttcctgttggcatgatctttaaccgatgtgtccctcttgacatccagccacttgtgtgttcttccactgatgtgttccttttgacgtccagccgcttctgtccctgcctgctagggtctcaggatttttacaggcacaggatgggggcatggcaggccagggtggtcttgggaaatgcaacatttgggcatgaaggcaggagtgtctgtccttacctaggtctgtgggcacaggcccaggggtggagccttagccagggaccatgcccttcccttaccagcacttccctgcccctcttctatatcacctcccctgtctgaagaggtacatctaactgctgttcgaatatggatgatgacgggtcttagctgcttcctgctgataggggcatcgttttggggaaaacggcagtcagattcttcccagaggtctatataagggttcctagcaaaggggagccatcatccaaggctccggttccctgaccatttggaggttgatggcttccaggtgtgagagaaaaaacaagttttataaggttaagtatgcatggattatatatacttgggtatgtatacccaagttatacacactgtaactacatacatacatactatacatactataataaatacgtgtattatacaaggaaaaaaaattagtgccaaagattacagagataagaagtgaaatatactaacaacaacattgtaccctgagatgtttcaccctggtgaaagaaattaaaccttgtatgggagtggataaacttttagaatgagataactgttctggccatatctttagtagttaacaggtgtaccctgggaattctggggtttgtgggcttgcctggtggccattaaagcttctgtgtctttcctgtatttcctctctctttcctgggcctccctgtctgtattataaaagaccaaggtggccactttcagaaggtcctctaatgtactatccggtcccagggcccgtttctgcaacttcctcctgaggtcaggagctgcctgagtaataaatttatcctttagggttagctgtccctctactgaatcaggagatagacaggtatgctttaccaaggcctctcttagtctctccaggaaggcagcaggattttcatcaaatacctcgtcgatcatggacaacttagtataattgagaggcttggtcttagtcctacaaaagccttccattatgcacatctgaaagcgtctcctcttccagtcttccacctgtcattgggatcccacttagggtcattcacttttactgcttctcttccagttggataatgtttgctcccttccctgatgccatatgtgatacaaagctcattcccaaatctctttactgcttgcagagcggcctgcttctcagtgtccatcagggtctgattcaaaagtagcataacatctctccaggagagtttaaatatatgggtgaaagtctggaaaacctctatatatctataagggtcatctgaaagcttgccaagatcccccttggtttgctttaaatcctgtaggaagaaggtgacctggaccttactgggcgcaaattcactgggcatttgttggaggggcaaaagtgagactggttgaatgttgaaggtgtacctcaacacacacacacacacacacacacacacacacacacacacacacagagttccttggcacagactagcatagtgtttgctttggttctaggcattgtctctgttcaatcattagctaatgactaagctaaccgggcagaaacatcaaacgttacattcaggaaagaatggagactttataaaattagatcagaaaaatctttaaacaaacaaacaaacaagtagtaatacaacaaatgcaacaacagcaaactctgtagagggaggaaatctggtttctaaattgcaacattataatattcaaaatgtctagatttcagcaaaaaataatgaagcatgtaaagagaaaagaaatcatgacccatgcacagaaaataataaaaagaaactgtttctgaagaagcccagacattgtaattagcagaataagacatgtctaaaaaataaagtataagaatgatgtctcagcaatttgagaatatcagaaggagaaattatagaaataaatagcaattctgcaggttaaaaatactgacttgcaaggtttccgttgagaagtctggtaatggacttatgggagatctcttacacatgatgtttctttcagaattctctctttgtgtttgacctttgacaatttgattataatatatcttggagtatgtcttttttgaattgaacttgcttgggatgctttgatcgtcttcaatccggatgttcatatccctctcaagatttggaaaattttcagataatattccattgattaagcttactgccccttcctctttttcttcttttggtacttccataattcatatatttgtatgtttgatggtgttccataagtatgcataaaacacttatggaaaaataatctcaacaattttgagattatttttggcaggtggagcatcctaaaactagaagtcatcaccttcctcttcaagtgactgacttcttaacttagaaatcaccaccacaggatgcatagaagactgaaacaaaatgtggctttgtgaatacagtgtgggctttggagtcagaaactctgccatttgttggctgggtaacttctagtgtctctctccatctcaaagaatttcatcgtacagtttattagggattaaacaagtttgtgcttataaggtacccactatagaactttgtagtcaatagacactcaataaaaggtgttattactcttccttgttctccacagtggcttatgagatcccatttactggctcactcttcctagcaccatagacctctggactggatttcttcttgctatctaactccaacaacttgacttcctttgttcaccttcatttgtttcaaggctcttctttttttaacttttagttttaagggtacatgtatgtaattgtttgttatatgggtaaactgtgtgttgtgggggtttggtgtacagattctttagtcacctgggtaataagcataaaacccaagagatatgctgtctccctcctcctagcctccacccttaagtaggccccagtgtctgttgttcccctcttagtgtccatgtgttcttgttgtttagctcccacttataagtgagaacatatggtatttggttttctgttcctgctttagtttgcttagaatagtggtctccacctccatccatgttgctgcaaaggacatcatctcattattttttatggttgtgtagtattccacggtgtatatttaccacattttctttatccagtctgcctctttttaaatatagtcatttttctcatttttaattatcaaacatttataaaatgcttattctgtggaaggttctctgcctcaagagttacaaacattaggctgggcacggtggctcacgcctgtaatcccagcactctgggaggccaaggcgggtggatcacctgaggtagggagtttgacaccagcctgaccgacatggagaaaccccatctctactaaaaatacaaaattagctgggtgtggtggcgcatgcctgtaatcccagctacttgggaggctgaggcaggagaattgcttaaacccaggaagtggaggttgcagtgagccgaaatggtgccactgctctccagcctgggcaacaagagtgaaactctatcttcaaaaaaaattaaaaaaaagagttacaaagattaatgatgtacaatctctggccttaaaaatctctgaaaaactagaaataattctaaagcccagaaagagtgagttcccttccagtatcctatacaagttcaaggtcctccaaagcattattaaatcttcctagccttttgatcctctgccttttctcctgcctcactaatgttctaagtctctgttatgacacagattctagaaccttcacaggccacactcccatcatttgcttaggtctgatcaatctgctccacacaatttctcagtgatcctctgcatctctgcctacaagggcctccctgacacccaagttcatattgctcagaaacagtgaacttgagtttttcgttttaccttgatctctctctgacaaagaaatccagatgatgcgagacctgatgaagacaatacatggaaaatgacagtcttgggtatggactaactccctctttgaggcttcctcaactctagtagttcaggagtctcctcttagggacttagggactttaacacaactgctttatcttccttgcctgcttccttttcaaattcagtattttttctttcactcttattgattcctctggaagcctgggggaaacaacccacagttaactaagctctaggctgatagtgctggtttctcctttggtttctagagtttaaactgaacaaagaaaataaccatcctccgtagcactaggaaaaattccttagcccattatctcacttcctgtagcatggtcactctatataatctgcctcaactcagaaataatgatttcctctcattttccctattaatagggtggaccatcttctaactgccctatagacagggcatttcagacactaaaggaagaaaaggaatatacagtagtactgagtacaccatctagttatcctttcctccccgatgagttatttaacactagaaaaaaaaaattcacataatagagggcatattgactacttgctgttcattttagaggtacattagtagaaaatctccaaaagttgatttggcaggagaattttctcacaggaccaaacacctagaagactcagtagacaaatgcctaatctgccctggttggaggtgtgttattatatcttgagatggattcacctattgttcgtttgaagtagtcttaatgtgggtgtaatctactttcctagtctttcagagctcaatattcttcagagtttttactttcacaggcagttttatggttgtttttttct

SEQ ID NO: 10938 - DNA, 6000 bp, Homo sapiens
tggatcctgctgcgtagagggcaggactcccactcaatccttggagtctgcaggtagcccctgtcccaccttcacatagcctggggtgggcagctccccctcgcctgtgcccatgccagcatctggggcaaggatgatgtgtctgcaagttcttcccctaccactcaggggtgcctggggctccctcttgcctggatgggatgggggaggcaccgtggggagcagatcacgcccaagcctggccgtcgggaaaatcaggcttcgtggccaccctggggacacaaccctgggcagcctcaggcagaacctcctcctgaggtgcaggaactgggcttcctcagcatggtgggacagtgatcatgccgctggctgggtccccaaagcaaggccactcccacttcccaaaccgggcccaacaagcctggccctagctccatgccctccccacagctacagggtgatagcagtaaagcaggagtcgtggaggctcctggcctgggggcggtccctccggctgctgaagggtttgggcagcgcagttggctgcctcaggggcgcgaggcacacgggacatggggcaccggggtcccaccatggccacggttcccgcagtcgttcctgccaccaccgcttgcaatttcccgctgcagccggccactctggacagctcgccactgccggcatcaccacccttttaacctcaaatactaagctgaaccttagctggatttcctagattaccatcatctcaattagtttcttttttacacagtttgttccttcttttcttttttttgtttcttttttttctttttctttttattttttcagggtgtccctctgtcacccaggctggaatgcagtggcatgatcttgcgtcactgcagcgtggaccttccaggttcaagcaatccacccacctcctgagtagctgggactaaattagtttctaagtaaattattattttctgttgaccaaattaaatgtgatattctggttgcaatttcacaacttccaatagtattgaattattattggggtatagagacatagtttattctcaaatccagggacaatagtgacttttacccatgaaattttgaactttctatattaatagaagtatgttttcccaaagtaagtgaggcactttttttcttctattttgagatgatcaaatttactactttatcatgagaaatctgaaataataattctgagcaatagtttatatttaagaattttgaggtcactgttacctttaataagaaggagacttctcaggagctatgggtgtcatcacataagataaatgcaaatgctgtcatttccaggggagggtaaggatgataatgaggggattcttttgaaggaactagaattgctacacagtatcttcttcaaattgtatactgctgccattcactaacatgagtagcgatattgctatgcgcatccataaattataggaatataaataattttaatacacaggacattattctcagaaatagaatgagaaggattatgatatagtggctgagcctgaggggcatgtaatttggttcaatctatagtatgccatttactagctttgtatctttgcaaaagttgtttcatctccatcgttttattctctctacctgtaagcatgaaaagggtgtttattttaccgagctgatgtgagaatgaaataaaaatatgaagtataaaaagcgcttagtacaattctgagtataaagtaaaatgctcatttttatggtagcatggtgagaatgctgcccctggaaacactaaggcccatgaggaaggattgcctatgtggtagcgtgtgaattaatgcagagcgttctaagtatagttgtactttgaagtccattctgaatcttagatgttacatttatattaataaaaagcataataattatctaaatgtataataatgttcaatattatatagttacatcaactgatgtaattcatagttttccctagtgttctctttcctgaacattctaaaatgtattagttatcaaagtcgtcttatatcttcccttatgataaaacaagagaaacataatagtaaagtgctatagcctcaatcaaatgagaaaatcataatgggaaccaagaatgagggattgaacactcttcacataaaatattaattattaatattttttatttattattattattattttttaaagtatttattgatcattcttgggtgtttctcggagagggggatttggcagggtcatagaacaatagtggagggaaggtcagcagataaacatgtgaacaaaggtctctggcttttcgaggcagagggccctgccgcctttggcagtgtttgtgtccctgggtacttgagattagggagtggtgatgactcttaacaagcatgctgccttcaagcatctgtttaacaaagcacatcttgcaccgcccttaatccatttaacccttagtggacacagcacatgtttcagagagcacggggttgggagtaaggttatagattaacagcatcccaaggcagaagaatttttcctagtacagaacaaaatggagtctcctatgtctacttctttctacacagacacaataacaatctgatcctctttcttttccccacatttccctcttttctattaaacaaaaccgccattgtcatcatggcccgttctcaatgagctgttgggtacacctcccagaaggggtggcagccgggcagaggggctcctcacttccaagacggggtagccgggcagaggcgccccccacctcccagacggggcggctgccgggcggagacgctcctcacttcccagacggggcggctgcagggcggaggggctcctcacttcccaaatggggtggctgctgggcggaggggttcctcacttctcagactgggcggccggggcagaggggctcctcacatcccagacggggtggcagcggggcagagacactcctcagttcccagacggggtcacggccgggcagaggcgctcttcacatctcagacggggcggcggggcagaggtgctccccacatctcagacgatgggcagcagggcagagacgctcctcacttcttagacgggatgacggccgggaagaggctctcctcacttcccagactgggcggccgggcagaggggctcctcacatcccagacgatgggtggccaggcagagatgctcctcacttcctagatggggtggcggccgggcagaggctgcaatctcggcactttgggaggccaaggcaggcggctgggaggtggaggttgtagcgagctgagatcacaccactgcactccagcctgggcaacattgagcactgagtgagcgagactccgtctgcaatcccggcacctcgggaggccgaggctggcagatcactggcggtcaggagctggagtccagcccggccaacacggcaaaaccccgtctccaccaaaaaatgcgaaaaccagtcaggtgtggcggtgcgcgcctgcaatcccaggcactcggcaggctgaggcaggagaatcaggcagggaggttgcagtgagccgagatggctgcagtacagtccagccttggctcggcatcagagggagaccgtgcaaagagggagagggagagggggagggggagggggagggtattaattattttaaaacagaattgtggccaggcacgatggctcatgcctgtagccccagcagttggggaggccaaggcaggcagaacacgaggttaggagatcgagaccatcctggctaacacggtgaaaccccatctccactaaaaatacaaagaattagccgagcgtggtggcacatgtctgtcgtcagagttactcaggaggctgaggcaggagaatcatttgaactgaggaggcggaggttgcagtgagccaagatcgcaccactgcactctagcctgggtaacagagcaagactccgcctcaaaaaaaaagaaaagatagttgctctgtgaacagctgactttcacagtcttcgatcgatctctcagacccacgaatacttggactgcacagttgaccttatcacattgttagggtaaatgccatacaaaggcaccttcagaccctccattgcacataggtggcccctgcaagccccttgcctgtgtgtgttctggaggtgccactgaacttggggacagcatcaggagacacacttgaaaaagatatttttactcagattaaattattaacaaactttcaatttcctttaacttattaaagacatccctacctgtaaataggtacggattaagctctctagtcaatagctgtcattctgtcatattatcagatacccggggctgctgctccttcaggcgtccacagaatcacagcattgtccagtattgaaagacctgaaagattgcagtgccttcatttcaactgtgagacatgaaataattttcccaaatctacaacattaagatacggtgcaataaggaccagattaaaggtctccaatttacaaccatgttccctccatctcctttactcctaaacacactcacacactcacttctgcaaacaattgtcttgtcaagtgggaaatgaatgctcttacaaggctcaaacttgtgaacacatcactgaccagcacagagctggctcacgatagggacccagttaaagtgttttacgtgcaactggatcaaatctttcaagtactaatttaaaacaatcctttaaataaggaaattctgtttcagaagaggaccttcatacagcatctctgaccagcaactgatgatactattgaactcagatgctgattggttctccaacacgagagtacccaaaccaggaggaaggaaatcagtaacttcctccccataatttggaatgtgggtggagggggatcatagttctccctgagtgagacttgcctgctcctctggcccctggtcctgtcctgttctccagcatggtgtgtctgaagctccctggaggttcctacatggcaaagctgacagtgacactgatggtgctgagctccccactggctttggctggggacacccgacgtaagtgcacattgtgggtgctgagctactatggggtggggaaaatagggagttttgttaacattgtgcccaggccaggtgccttaagaaattgtgacattttcttcagagattgcccatctttatcatgggatcccaaattatttcctccacaaaaggagcttgactacttgccctctccatgagactgtgtaaggggcctccatacaggtcatttcttctcaaatctccaccaatgaaaccttttcatcacatgtcctcagggtctttagaggatttagaaataaggatgctaaaataaattccccatacagcacttccctttattatgttgacctatgtcagacaaaacgagtttttttctgaaaattttgtgggagtcaagggaattcaaagggtctctcctagacaatcctgtgttatgcccttgacagaacctgtgatattggctcctcttcctcatatgtgagaatggacccagtggcctccccattacctcctttcttttctttctgaactccaatgtttaccctgtaatgtatgcaaggtctctgacagaagttatgcttagtgctttttcttatggggaaaaatccttggagctgaagctgagatctttagtatgtggagtcaccctacagttaaagggcatctatgaggtattctttggtgcctaaaggacttaaggcatcctctaaaaacctggcccaggttagagtttattacaaatcttttttaacctttctatactatttgctcctatatctcctacatgctctaactagacatgacaggaagagattcaactaacataggacaaattatatgaaattctatttttgtaagtcaaaaatagtcaaatatcagaaatttgataaggttaaaactatatactctgtgtggggttacagagagaatgtggacatt

SEQ ID NO: 10939 - DNA, 6000 bp, Homo sapiens
cagctcattgagaacgggccaggatgacagtggcggctttgtggaatagaaaggcgggaaaggtggggaaaagattgagaaatcggatggttgccgtgtctgtgtagaaagaagtagacatgggagacttttcattttgttctgcgctaagaaaaattcctctgccttgggatccttacccccaaccctgtgctctctgaaacatgtgctgtgtccactcagggttaaatggattaagggcggtgcaagatgtgctttgttaaacagatgcttgaaggcagtatgctcgttaagagtcatcaccactccctaatctcaagtaatcagggacacaaacactgcggaaggccgcagggtcctctgcctaggaaaaccagagacctttgttcacttgtttatctgctgaccttccctccactattgtcccatgaccctgccaaatcctcctctgtgagaaacacccaagaattatcaataaaaaaataaattaaaaaaaaaaaaaaagaaaaataatctggcctattttggactggatagataggtggatacttaccacagtacaattaacataagatctagaaacagaaataaaaagaaaattctttgtacttacaatattagtacaaaggcctatgggaattctagttgttctctctataactatgcaatggcaaggattctgttataaaacagctaagttgagtcaaagaatgacatttggaagttcaagaagtcctgtcaactgacctagatagtgtcatggtgtaatgattggcgctaccaaagttcctcaatggaggacattgctgaaatcttactggaaagggtcctgtcaagtgtgatgaatactaataaggcctttaaatggcacagttttctgttcaggaaacgtatcttccatgctaagaagaaactggtcctgtttatccatttattgttattagcattttttctttagatataaggattagtaacctgctttttactttaaattccagattagtggtggttgctttctgaaaactcctgagaacattttgtgactgcttggacaagtggcagacattctatgataaccagggcttgctgatagccaaaagagcctatttttccaaaatgtgttgcaagctttcaggcttactgcaagtgagccccattctgtgaaaaccggtaggactcaagacatgctgtagtcctaccaatgtcaacctgcctgttgttcaacaaaagtctgtgcttctgattttacctgtttagtcctgggaatgttgggatttatttcccgtaaaaccaaacctatggtttcatacatcaagaccagagaccgtggaagttccgtactgaaaaccactttcttccagaaaccaattttattgccatttcctcaggaaataatctctcgtatttgacacctctcacatccagctgagttgagaggattcttctcttgttttcagtgcaaaagttcagcctattagaccacctgtgtgattgatggtttggtgagagttgctacattgtttagcctgaactatccttatattgaatattgaaggaaagtgtgagatatgtaatttaaagaagcacatctgttgtagtataagtgtgtctcctttaaaattcaggtagggctcctcactcatgaatgggattaaggccctcgtaaaaaacgcttcacacagtttttagcctcttgcccttccacattctaccatgtgagtacacagcattcatcccctctggaggatgcaagacgccatcttggaagtggagaccatgccctttgccagacattgaacctgctggtgccttaatcttggacttttcagcctccatgtgttctttataaattacccagtctaccgtattttatcacagcacaaatgaactaagacaacatctttgttactcataaatgtataagacatacagaatttagttcattgtcactggccatctttttaaatacaaatttgtatgatttataaatagtgtgtcaaatttatataaacaagttttgaaagtttctctttaactgtattttagtacattcttgatgtagaattacttatttttgcctccacttttatcctgtaatactaaggtgaaccttagcttcctttcctagattaccacaccacagttagttaattagtaaattacaatttcctattatcaaattaaatgtgatattctcctggttacaattgcacaattgtcaatagtactgaattatcactgtagtgtgggaacacagtttattctcaaatccagggacaatagtgacttctaaccaacctctccaagaaatcttcaactttccacattaacagaaatatatttttccaaagtaaacgagacactatttttattctattctgaaatgatcaaacttgcactacttcgtgctgagaaattggaaatgatgattgagagtaatagaatggagttaggaatgttgaggctgttgttatctttaataagaaggagatttgtgcaggagctatgggtgtccttatgtaacataaacgcaaattgtgtcatttccagagaggagtaaccatggtgatgaggggaatcttttgaaggaaccagaattgctacacagtatctacccccaaagtctataaaatgttgccattcattaaaagaagtagtcttactgatttgcacagccatgaattaaagtgataaaaataattttaatataagggacataattctctttagaaattgaatgtgagatagtgtaatacaatggcagagcttgaggtatttggaatcacatatataataacttggttcaatagagttgacagaacaactctgctttaaaataattaatattttatgtgaagagtgttcaatccctcattcctggctccaattatgatttcctcatttgtttgaggctatggccctttactaatccacttctcttgttttatcgtaagggaagatataagaagattttgctggccagacgtggtggctcacacctataatcccagcactttgggaggccgagttactgtttactagccttgcatccttgcaaaagttgtttaaactccatcattttattctctccacttgtaaggatgaaaagggtatttccctcactcagctaatgtgagaattgaataaaaatatgatgtatggaaagctcttcatacaattctgagtacaaagcaaaatgctcaaaaattgctcaagaaattttagtcatttttattgcagcatggtgagtatctcattcctagaaacactaaggcacataaggaaggagtgcctgtcagaactgtggtagggtgtgaattaatgcagaactttatttgcatagttatactttgaagtccattctgaatcttagatgctacatttatataaatgtaaagcataataattatctaaatgtagaattatatgtttaaaattagatgattacatcaactgatgtaattcatagattttccctagggttctgtttcctgaacattctgtaacgtactagttagcaaagcctttttgtttgtttttgaaactgagtctcactctgtcgactagactggagtgcagtggtgtgctcctgactcactgcaacctccacctcccaggttcaagcaattctcatgcctcagcctcacgagtagctgggattacaggcatgcaccaccaagcccagctgatttttgtatttttttagtagagatgggatttcaccgtgtcggccaggctggtctggtactcctgacctcaagtgatccgcccaccttggcctcctaaagtgctgagattacaggcgggagccaccgcgcccggccagcaaagtcttctaatatcttcccttacgataaaacaagagaagtggaatactaaagggccatagccttaaacaaaggaggaaatcataatgggagccaagaatgagggattgaacactcgacataaaatattaattatggtaaaacagagttgttctgtcaacagctgactttgagtccttgatcgatcatctcagccccctgcatactttgattacacagttgaccttaacacattgatagggtaagtgctatacaaaagcaacttcggactctccattgcacataggtggcccctgcaagccccttgcctgtgtgtgttctggagatgacactaaacttgggggcagcatcaggagacacacttgaaaaaactctttttactcagattaaattattaactaactttcaatttcctttaacttattacagacatctctacctgtaaataggtacagattaagctctccggtcaacagctgtcattctgtcatatcatcagatacccggagctgctgctccttgaggcatccacagaatcacattttctagtgttgaaagacctgaaagatcatggtgccttcatttcaactgtgagacatgacgtaattttcccaaatctacaacattaagatatggtgcaataaggaccagattaaaggtctcctgatttgcggccatgttccctccatctcctttactcctaaacacactcacactcactcctgcaaatagttgtcttgtcaagtgggaaatgaatgctcttacaaggctcaaacttgtgaacacatcactgaccagcacagagctggctacaatagctccccaattaaggtgttttacatgcaactggttcaaaccttccaagtgctaaattaaaacaatcctttaaagaaggaaattctgtttcagaagaggaccttcatacagcatctctgaccagcaactgatgatgctattgaactcagatgctgattggttctccaacacgagattacccaacccaggagcaaggaaatcagtaacttcctccctataacttggaatgtgggtggaggggttcatagttctccctgagtgagacttgcctgcttctctggcccctggtcctgtcctgttctccagcatggtgtgtctgaagctccctggaggctcctgcatgacagcgctgacagtgacactgatggtgctgagctccccactggctttgtctggggacacccgacgtaagtgcacattgcgggtgctgagctactatggggtggggaaaatagggagttttgttaacattgtgcccaggccatgtcccttaagaaattgtgacgttttcttcagagattgcccatctttatcattggatcccaaattatttcctccataaaaggagcttgggtacttgccctcttcatgagacttgtgtaaggggcctttgcacaaatcatttcttttcaaatctccaccaataaaacctttgcatcacatgtcctcagggtctttagaggatttagaaataaggattctaaaataaattccccatacagcacttccctttattatgttgacttatgtcagacaaaaggaggttcttactgaaaattttgtgggagtcaagggaattcaaagggtctctcctagacgatccagtgttaggttccccacaggacctttggtgttggccatagtcctcatatgtgaggatggacccagtggcctccccattatctcctttcttttcttgctgaactccaatgtttataaggcctgtatccctgtagtgtatgtaggttctctgacagaagttatacttagtgctcttcctttcttgtggggaaaagtccctggaactgaagctgagattgttaatacttggagtcaccttacagatacagagcatttatgaggtattctttggtgcctaaagaacttaaggcatcctctgaaaaactagcccaggttcgtgttcattatgaatcttttttaacctttctgtacttgtttctcttgcatctcctatgtgctctaactagacatgacagaagagatttaactaatgtataaattatatgaaattctattttttaagtcaaaaataatcaactatcagaaatttaataatgttcaaactatatactctgtgtggggttaccgagatgatgtgaacattgttcacgtctca

SEQ ID NO: 10940 - DNA, 6000 bp, Homo sapiens
gaatagataatattctcattttgcagttaaagaaactcatactcagagagattaacttggatttatgagcaatgttgacattataaagtagaggcaggaagaccagttaggatgcttttgcagaaattaacttgagtggaattgtcggtctgtgagaatagaaaatgaatcttttgggaagattctacaatgttattgtttttgcataagtgactttttcctctactccctcttttcacatgtaaaatgtagatttactgaggctaatcagactcacaagaatgtaaccacttgtgtcattgcctaccttccctcctttttttttttttttcctctctctttcccttcctgcttactctttctttttaaacattgaagttctcaaaaccctctttggaataagcattgatcacagatgctcctgtgattcgtgtttttcccaggtgcatcctgaaccttggcaaaataaacctctaattgattgagacctgcctcagtcacttttcggcttacaccaggatttctttctttttaaagcctgaatagaattccattgtgtatacatacattatctttacccattcatctgctgaatgacacaggttgatttcataccttgactattgtgcataatgctgcaatgaacatgggagtgtggatatattttcaacctactgatttaaaatcctttgtctgtatcctggaagtgggattgctacatcatatggcagttctattttaactttttgaagaaccttcataatgttttccctagtggccatactaatttacattcccaccaacagtgtgcaaatgttcccttatctccacgtccttgttaacacttgttattttttgtctttttgataatagtcatcctgaaaagcatggattgatatgtcattgaggtttaaattgaatatcttaagttttcctatttgaggatatgagtagtctccccaaaatattactgctaatgttgcttttttgcatgaaccatgaccttgagctgagctggacacttgaattcttgagtacttggacatgagcttaaataggactgaaatattttttacatacctgaatattagttcttctctctactggtaagaacttgtagaagaagacattataaagatctcatagagagatatttaaggtttgtctgggaatgaaggcacatgatgactacaaatctagaagctggggaagagttgtctctggaaatatcccaggcattactagggaaccagaagtagagacgaacagatatgttgcaaagagtgacatgtgtaggttagctctgggtgatgaaatcgtcagtggtccagctgaggtgatgcatggatgagattgactggaagaagaaacctgtagaaacagatcaggaaacaaagctccgttgtacacacgtccatagcaggcagcctgggttttcgtcccagtcttcttctgttttcaagggccatttccatactgcatgagaagccatgagactggtgggctctggactcctgtgccagagatcactcaccttccccatttcccccaagtgtcccaaatgccttgtatcatctgattttctatcttcctgctaaagcttttcccatactcctagtccttcaccctgcggtatcctccaagtccttacctgacttccactatggagtctccccatggttacttgcttgaaggaggcactgtttgagcacagcctctgaatgctacagactctctcttcagactttctaaattgtcattttaaagagataactgtttaaagagaaaaggcctaccttatatgtgtcatgaaaaattcatgtaaccggttacctaaaagttgatataagagaaatatgtaagtagcttcacaaggttttgaaaaatttggagataattacttgataaatttttattaaaggaaaatgatattctggggccgtatttctaattatgttaccactggcattaaggaggccacagaacctttctgactctacagtgtttcttgattctggaagtaattgcaggacagagtcctggataacccttctggtgacaggatgactcctgtgtttacattcaactgcactgaccaggcacagattctaagagatgctgaccagggaagatgatttctcccttgattccacaaagaaggagtccacaacctttttctgccctgaaagaagagacaatgtgccctggggagagtctccctagtgtaaccttgacccataataacagcagtgtctttatcccatcttcccacatggggtgcgtgtggtctcatcctaagcgctctgtccccacagaggccgggtgggtgatttgggcgaggcattcagaatcaggatgcttgtctgagttgccttcctctggccaggccaatagtggctgccctgagtaatggagcagggataggaacattgcaaagaactgtagagaaggctggatcagggggacacaactggcagaagccccaaaccaaagccttttagattaggtgttttttttttgttttgttttgttttgagacagagttttgctcttgtcccccaggctggagtgcaatggagtgcagtggtgcgaactcagctcactgcaacctctgcctcctgggttcaagcgattcgcctgcctcagcctactgagtaattgagattacaggcatgcaccaccacacttggctaattttttttatttttggtagagacgggtttcaccatgttggccaggctggtctcaaattcctgacctcaagtgatctgcctgccttggcctcccgaagcgctagaaaattacaggggtgagccactgcacctggcctcagatgaggttttagccagtcagaaaatggctctaagctgacactttcgttgctagttgaaaagtctgtgtggccaggtgtggtggctcacacctataatcccagtgctttgggaggccgaggtgggaggattgcttgaggccaggacattgaaaccaacctgggcaacatagcaaaatcctatttctataaaaaatttttaaaaaattagacagaatggcggtgtgtgcctgtactcccagctacttgggaggctcagacaggaggatcacttgagcctaagaggttgaggctgcagtgtgccatgatcatgccagtgtactccagcctaggtgatagagccagaccctgtccctaaaaaagaaaagaaaagaaaaaaggaaaataaaaaaaaaggaaaagaaaagaaaaaagtctgtttgaagaggcccatgagactggggagtccctaggtttgacgtagactttgcctcacagccccagaataaacctgagggaagcttctccctttgaacaggaagaaggggtgggccagaggcctctattctgagggacgctgaggtggggactgagaggacattgagggcatcttcaggtccctctctgcctattctttcttgcccccagttccgttctaggtctgagtttgatgttcctcctttatgcttccatcgcaccagtggagaccctccttagactgggggttaccctgatcctgagtacaccactgctgctagaagcccagtaacaacgttcccagtctcaggtgatctaaatctatgcacagaataatacagaatattagagtggctcaatgctttcatgtgccactattgcaaacctcttgctaccgtctcttccctgtttctttttacctggtaaacatattctgcttttagatgctctctatcttctactttactaatatacagggaagagtgggaggaagggagacaagaagagaggtggagatatttattgtcttggttaggattaccagtaatgtttgtcaggcattgttttaattgctttataaccattagtactatccctagccatgggcaacgtaagcctgataagtaagaaatttatttataaaaacacattggtacctctgccattttggatttgatgtttagggctggcccaatatgacctgtaactctaaacatttgctccatcattaatacgattcagcccccaggaaattcttcttcacagcttttgctctctatcttcaaaactaaatgtgactgtgtctgaatactgtaaaatttgtgtattgtgcctttgctcatatcagatgcacctgtttcatggttcagggaggatttaagcagctgaagaacttacaagagaaaagtcaacaaatactttcactcgaagagcatgaatgcaataccttcttgcataataaagaatcacttgccagtagggctgggtgtcaacttttttttttcttgttcctcctattagcctgatagttacacataacagtggaggaggcttttgtaatattaaactagtcatattaatgttaaatttttatatgtgaagatctagatgtaaaatgcataaaacatgatccacattttgcaaagagaagcctgggggtgaaaaggagttcagtaatttgttgactctcataaagcacattagtggtagaactgcaactcaccatcatttccttctaagaactttgctcttctcaccaaaacttaaggctcttcagagtgtctaatagaagtgaacatttctgtgacaattttctgttccctgaaatatgatcctcacttaatttgccctactaaaaatcccaagtgtaagaacaataggttgtaagatgtctactcttgaatcacatttgtcttttgcttcttaaaacccctaagccattcaatcttcagctattcagaaatcttcacctcaaatgttcatctagtgcaatttgaagaagaaacagtgccaggcattggagtgagaatcttcacagaaaaacgtctgcccagaggcagatgaggtccttcagctccagtgctgattggttcctttcctagggactccccaatcctaccacacatggaaacatccagaggtttttattctttccggcaggtacataagatccattaggtttgagctgtgttgactaccactgctttttccttggtctcacttacgtcttggaagatggctctgcagatccctggaggcttttgggcagcagctgtgaccgtgatgctggtgatgctgagcaccccagtggctgaggccagagactttcccagtaagtgcagggcagctgctctcgagagccaccactgtgggaacaggctctccttgggttggagtatgggggatggtgatctccatgatctcagaacacagtcttttatcaccatttattctttttgggaaatagagctatgttgcatttttatttccaccttataatgggtgaggtgaggataatccaaccccaatcccacaggtttaagcctgaaggaggagagaggaaagaggagacaaagtgtgcattcactacctgtgacaggacaaaatgaccatggcactccacggttatgcatttccccaaagatatgcatttccccaaagacacagtaggatttttctgcactgggaaaatgtaaggcagcaatggtgtctgtagtctctgtattggaggtaaaggagtctatactactgactcgagtggagagtttgtggaggcaaactcttagtactgagggaaggtgactggatgaccacagacagggagtcttactttgggtttcactgatttatgggcaaaaggtgacttgagtgggattcagggacctgagttgatggtggactgaatttagtatgataggaaggaggaagtaaagaagggaaataatacatattgagaaaccactccattcagacacaggacagtactttctataaatcctctctcactcctcctaacatcctatgtgtaggtatcatgattttccttttatgtaattatacttgtgatatggatattctgttaagtaacctgcccaagctggtgattgactcagtttaattggaccctatagaattcaaaagcttgggctctttccatgaataaatgtttccttctaggactccggaggtgtaggtcctttctaacacagaagtga

SEQ ID NO: 10941 - DNA, 6000 bp, Homo sapiens
cccagccccttcccctcatgttacacctcttgctggtttgagacgtcaatcaccactgagaaagaattaaaccagtattttgagctggcaaaattcttagcctagtacaattccttcaattaaactgtagctcaacaatgtgttctctaaaagtatgatttaatattctacctagaaactcagaatatttttcataactcctccagggcagtgtggattatgttgatgtgttaggaggaagtagaaggaagaaaatgaattgagatgtacgttttacttccatgtcaaagtcaccaaaatagcagttgaagggatatttgtgtcaggcaatagggagaataataattttatgccaccctcaaaaaacaaccacacatacacccaaattctctcactcctcagagaaaggggaaggaaagaaaagagagaagcaaaatatgagcttgagtgaaaaatcacagaggagcctgtagctatttagggagggctgctggctgaagtcaggcaggaaaaaaagatcaaaacaccctgccctatttttcaggctcgttcaagtagaagacaaaaacataaatacaggagaaaggaagaaaaccacatctttttcctcttgtctccccagaactgaacagtgtctctgataagcccaggcccttctatcgtagacactgacactatgcacagaaaatgactcaaaaacgcttctaatgggggtgaatctgatgcttcagtttatttaagatgtaccagaggccatctaaggagatccatagcttgctaactgaagcttattgctttctcttcttagttcccatgccaggctctatgccattccttgcttgtcatgtgagatcactgatttcctttggttaggtaggatatgatttccttacagagatctgtcctgacaccaaacagctatgatgaaattccttggttattttccctttttgtgtaccttatcattaccggaatgctaaagctgtaggaataaagtttccctggcttcccaagaaatacagtgtgacagaaaaagtatagcctagggacttactagttatgtgaactttggttcattccatccttacctcatctgtaaaagggagatcatgatagtatctactgcaaagggttttgtgtgatgattctctctctttctctctctctcatacacacacacgcacacatttatataatgcttagaaaatgaactcataataagcaattgacaaacattagctattattatgtaggcaagtcagattttagagtttgtgagccttagacacatttacagagaagaaagagcagccctcctaactttctggtccagcgccatatcctccacttcctccccatccccacatcccttgccatttatcaaccccctctctcctctaaatctaaatacaggcccccgtttgatccatattgtctaggcccttcctctcctctccacatggcccttccttcagctctgagggaagctgcagaagccagccatggtgctgtctacaaagaaggggacacacgcctcttccacccgctcatgctgttactgcatctgatcatctccgtgccgtgtccttgttcacttagcctgtgttgagtgtttgtctccatttccaaatgcaataaaacatctgggaaagactaaggtaggtgtgggcaggaagaagggaggaagttagacccagtggcttgagtgccctctgatgcctccttatcctcggctccacacaagccctcgccagtgtgagctccacagccatccacctggaggaggagtactcaaaaccagggtcaaatgccttgtactcgggggtctaccagtaagcctgtggccagccttccacttcatgaatcgtcacatttacatgagagatgtggagggagaggggtcagcctcctagctcctgtcctgtagcagttaagtcaagtcaggccaggctgtggtaaccaagccagtaccttctttaaagaacagttgtttctcattcatacagagtgtgttgtaggtgtgagtgattccctggggcagctgctcttcatggtgactcagctaattagactgcttttctactgggattgtgccatctcaacacaaggctgtcttggttgacttggtaggggaggaggagaagagtcatgcacgaggagttaaattctttgaccaggaaccttttgttcactttccattggtgagaacgagtcacacagctccaggagagtaggaagtctagtttctcgttttccatgggcctaggaattagaggatgaacactagcgatgtcttccacgtcttgctctctttttctttacctgttataatctcccatggagaagaaattatttttctgattggtctgatccaggcctctaaccaagggcatttactaagggtcatagaacagtaaaaggttgcacaattgcatctcacctctcttttctgaatcctgcttaattaaaactttaaaaactcacttacagaccacttcttgctcttcttagttatcaaatatattttcttccaactcctttttgacagatcttgccttgttctcagctgactcccttgcaaccatctaaatggaacttcctcattcccctttatcccctgctaatcgtcctgtctttattcttttatctgaagaagtgtacccttcttcccccaagccttatgctctctgtcttagtccatttgtgttagtgtaacaagatacacgagatagggtaatttatgaagaacagaaatttatttctcacagttctggaagctagaagttcaaggtcatggccctggaagatttgatgccttggccatcgacctgaaaaaagtcactgaagtgaacttgtggttaccatgataccctgggttcattcttaacatgcacagtataggcaaatcaggggcacatttcatgctgaaagatgatgtgaaatgatgagtaaacattgccctttaaataataataacatagatggtgaattacaatttgcacttttggttttatttgcttaaagatagtgttttactgtctaggttttactgaaagaatacttaactaaacacttgagtcaaatcattccagtgtaacagtcctcacaaggaggaaggcagaagggcaaaagtgccaagctattgcctccagcccttctatttttattgattgactgattgattgattgagacagggcctcgttctgttacccatgctggagtacagtggtgcattcatggttcactgcaactttgaacttctgggctcaagtagtcttcccacctcagcctccaaagtaactaagaccacaggtgcatgccaccatgtttatttctttaattttttaaattttatttggacatgggggtctcactatgttttccaggcaggtctctaactcctagcctcaagcaatcttcctcctcagcctcccaaagtgctgggattacaggcatgagccatcatccctgctctctctagccctttttaaagtctctaatcccattcaggaggcctctgcattcatgacttaatcacctcctaaagggcccaccttttgatactatcacattggtgattaaattgcaacacttgaattttgagtgacattcagaccacagcattttggagaaaatgtcccctttcttctcttttttctcttcagtttctcctttctacagataccttgcacttcacttgcaaccttgttgaagtctctcctgtcttaaaagtttcttttcccaaaacaccagaactcattccttctgtctaactgtaactttgtacttgttaccaacctctacccatttctacccctgactccccagcctctggtaactcctaacgtactctttacttcgatgaggtcaacttttttagattccacatatgagtgaaatcacgtaatatagtccttctgttcttggcttatttcacttaacatagagccctccaggttcacccatgttgttgaaaatgacaggatttcatgcttttttatggcggaatagtattccatcatgtatatatatcacatactaattaccctgatttgatcaatacacaatgtataggtgtgttggaacatcatgctgtaccccataaatatgtacaattattacgtgtcaatttaaaaaacccaagaaaagtattttttcttagtgttgtttttttctaaagtgtatcccattttttcctttgttttcactttcaaaattcttgaaagactgttttaatctgcggcctttgttttcttgtttccaattcattcttttgaaatatggcttctacctttaacactctgctgtcctcttgaaggttattggtgccctactaaccataaaacacaataatgctctcttagattgtatcctggtgagcctttttgcaaaattttattctttgagaattctctttccatgttttcttttcttttctttttttgtggtcattttggcttataggaaatcgtactctccaaatgttctctatgtcttctatttcttctctgataatccctttactaaatcttcttgaggcatatgcttcagaatgcttaatttacatactcttaattccttcttaatttacacactgcctgtcggcaatgtcaacacccaataagaagggagacctattggtcagaacaggccagggaatagaagaatacataataaacagtctgcctagttcttctagggccccataatatgtcaaacatatatttttacttcttctcccagcccatttttagtatacctaaattactgtcagtgattctgcaggcaaacaatggttgagttgtatgacacaactttgtgaaagtatcctacccagtacctgatgatgcaaaactcttctatcttgattggttgtcaatctgaggagtttccaatcctggggaagccagaaaaacagcgatttatactcttaatgggtactttctgactgaattttatgagctcattctgaagaggctgacgattttactatctcatttttttcctttctccagaatgggttctgggtgggtcccctgggtggtggctctgctagtgaatctgacccgactggattcctccatgactcaaggcacagactctccaggtaagaacagagcaattgtttttttccagtgtgtatgcaagaattggcatgggggagtgatgcctttctttgtaagtccaggccacagaccagactggaagtggcttttggtttcaaagaacagtgttcttccctttggcagaaaggtacgccttgcctctttacatgggatggacttcatataccagagccacctattcaaggggtagggaggcaggaagagggaaacattgtgtcttgtttaggatccttattgtgtgtatcaacctcagtcagtgcctgggcgtgttgaaggccttggcttgggttcgagcctgctgggagaaacaacctgcagtaggctgggtcacagaggcaatctgtgattttttggtcaggacacggaaacaaatctcagttggggtatatgtggacaaatgaaactggaaacaaaggttgctccttctgtcatttattaagccactattatattgtcagaattgtactaaacagttttgagaagtaagagaagttgaatagaatacattgtccttgtcctccggctaccaggtacaagttacttgtcactgttatttttctagcacaggtgacagaatatgcagccatgaagcaatgtgagatgaaagcacatattaatgagcagaaacaggatgtaatgtgctaagaacagaatcccctttgcatgttagtttcattaaatacaaaagaggaacaaacctggccaggagagatcattattctcagagaatagaaaccgccctgagtttataatgtccattaaacaatacaactgaaaaaaaaatcagcacagatgttaaatgatgatgaaaaattcagatttcccccctggtttagactactagaggaaatagagaagagtatacatgctgag

SEQ ID NO: 10942 - DNA, 6000 bp, Homo sapiens
gttcctcataatctacttccttcccatgtttcaaagccctccccaggtacccttccacttggctggttaccgtctgtggtgaagcgcctgcactcctcgggagacatgcctggcttatatgctgcatccacataaccatagataaaggtgctgccggagccaccaatggcaaaaggctgtcgagtcagcattcctcccagggttccatatacctgggaaagggatcctcaggttaaagaatcatcaagcccttccttcccactgagacattaagtggtctctgcaccctgcaatgaagccctggtatctcatatccccaaagtactatgctttcagaggtagtgtccttggaactcattgctagaatgacataggacttccatcttcctctgcaggagagtggggaagcccagaggagagagtgctttgggagaaactcacctgacctccttcacgttggtcccagccagctaccatgagatgtgcagacaagtcctctcgatatttatagctgatatttctcaccacatttgcagcagccaaaacaagtggaggttcctccagttctatcctgagggaaatattaggaataaaggttgatagaattttaagtctcattctcctatactgttaccatcatccctgctaaacgacccctgaaaactgtaactgcaatagctcaaactgcagcctccctcccacatgtacaggggaaccagagtcccacaccaccaactggtaagaagctttcaattgctcactcttttgctcagccccacccacataactttcttttggctgcaaggaccctgctcttatggggaaaagcagataaggttacttccgtcccaacgaccttgatttctcgtatggtaactgcctgatattatggtgggtcacaatatcaccttcttcctgattatttatatcaggatagtgatttacagcttttaaactgtgttcacatatagaatgtggttctcaaaataaccgtctcatgaggtactatattatctccactttacagatgcagaaactgacagattcaagtgccagcaagagccgaaacaagacttttccatttcccagtgtccagctcctggaacagcacactgtacagggattcatgcaggttgggggagctctagtgggtggggagtcagaactccagagcttcatacccatggagctccagctggtaggcggccatgtcggccacggcttgggcatcagcagctgaaccagagagtgcacagtagatgcgctcgtgcagcggggacagcttgtcaaacactcggttcaccaccgcctcgctgtcaggagggagtcaacagtcaccaagttaaaactcaggtttttttttttttttttttttttgagacagtctcactctgtcacccaggctggagtgcagtggatcaatcttgggctcactgcaaacttcgcctccctggttcaagtgattctcctgcctcagcctcccgaatagctgggattacaggcacccaccaccaagcccagctaatgtttgtattttcagtagagacaaggtcccaacatgttggccaggctggtctcaaactcctgacctcaaatatctgcccacctcggcatcccaaagtgctgagattatagatgtgagccactgcacccaaccagaactcaggaatttttgagggtgatcattcaatgtctctcaaatttctttgacaagagaatagcatgaagtttaatgcttggattaaagcaggaggcaaataatcatctcagatattattaatcactgcagatgttaatcaaaattaggcttatttttcaggcttagattttataacaaagcaaaaaatgctaaggtaagaaaaatatgcctcatcaattttctttgctattaacaatcttgagagagttatgttctatggaacataatgtcagtaatattgacctaaccccatatactcattttgcatgtgaggaaattggttaggagtgggagaagagacaaaatagttcaatatatggtaaatgagaaaccaggtatctgcttgacagaatcatctttttgatccctaagcacagatggaaagaagaccctcaaaaatctatctcctgtccccctctcagaccctattcctttactcatccctgtacactactgggacaggtcacatacacattcagaccccagatcctcctccacaaattcagagacccaagcacccaccaaatagcttatcatagtggcttttggggaaggtcaactccattcctccaaggctccagtttgccagtcttttcatgaatgggtaaggaaagtgtgtatttgaggccattagcttctttccaaatgcatacatcttcacttttactcaccctgcagacactcgggaatcagaacccatcacaacgcccccgtcaaactccactgccatgatggtggtctgcagagacacagaatatggaatgtcagggcaagaacagccttgatgccctcatgttagagaagaagaaacattcccagagaggcgaagtgactggctcaaagattacacagtaacaggccagagctgactgtcagtacaggctttttttcccttcatctttccactttctctattgcttcatccggctgcaggggaatgccacagcccagctgtgatacaacacagaaagaactgtgtccctaagttccaacttgcctagtggaatcctctccactgtagagaggtggagatgaggctcctacaggtagaagtgaagcagctccgcaagtgaaaattatctccaacggaagggctcatagtatgtgcagatgtggtgtagacccaacacagagtaattgactatgatcttgggaaacaaggtcagtctatttttttttttttggtccacaatcctccactctcaccccccatttcatcagaagtgagctcttccaatttactgaacattggaaaaaatcgaggagggcagtggttagcatggccaggggcaaggcaggagagaagcagcaaggaacacatacagatggttgaaaataaaagtttcagttatggaatttccgatcaagaggtaaatacatatctcagcagccagggaggtaaatttgtaccaagagataatttgactgagaagtttaagctgacttttccaggtcaagaaaagaatcaagaagaagtgagggaagataaagctacatttattctactattgagttggaaggagccttaaagatcctcggttcaaatgaggaaaccaagtcacagaaaatgcaaacgacttatgcaaagtcacacagagttaatagtagacctgggactaaaattcaggtctaactcttatcccttgtttccacttctacttcctacttgccactgctcatttggcagtgaggggagatttcccaaattataagtggtttcactgtgtctttcttaccaggccgtaagttactctggccccaaaggacgctcctctgagtatgctttccgacggaccgacttatcatgaatagagggtcaaagaacagggttaacttcaagttagaggctattcctctctaacaaagccgcccccaagccacgagtggtggcagtagtccagagcagaagccagccagccagtcttggggctgccatctgccccaggcgcccatcctaagcaaagtccccccagtgggcacatgggagtgggcagggaagacacagggaagggagtaaggcagcatctgggccaaggagaggccttcctgggtcaagctagggaagggcatcactagttaacacagaacgcccattatcagtgcttgggctaagagttgcccagtggcaagtttatcaaaagtctgtgtgatgagttggtccttctcaataagtgcctatatttccttctcccaagtgctgttctacttcacccagggcaccatttcctcatctctttgcaccatccccaaccccctttcttgatttaaccagcccccactgtccgggaccagagtgaaagcgaaagcgctttagagtagcttcccgttgacgcttccagctaagagtcaaagcacccgctttttccaccagcctcgcgtgcctgttcccttcacggacactctagacgacccccctcagaaaagaaatactctatgctcattgcgggttgcaagcgctggctgctacaggcgacctccctgcgctcccgttggtctctgcattcacttctccgcgcgcgcttccagggtcccctggccgctgcatctcctccacccctctgccaaccctcaagcccagacccattaccccggtgtggacttctcccgcccggggtaagtccccggttggtgctcccgcccgcagcatccctgcaaggcaccgctctcctcgccgcctggggcactggtttccaacctgggacagcgcacaacgcgcagccgacagccccgccccttcgcggcgccgccaggaggcgcctgggtgctgcggggctgctttgcgcgcggcgctaacgtgtgtagggcagatctgccccgagacaagtgacgaggcagccccgccctgaggctggggtgggaaaactggtgcaagtggaaaggcaggaggcagggagaggcgagaagggtgtgcgtgatggagaaaattgggcaccagggctgctcccgagattctcagatctgatttccacgcttgctaccaaaatagtctgggcaggccacttttggaagtaggcgttatctagtgagcaggcggccgctttcgatttcgctttcccctaaatggctgagcttctcgccagcgcaggatcagcctgttcctgggactttccgagagccccgccctcgttccctcccccagccgccagtaggggaggactcggcggtacccggagcttcaggccccaccggggcgcggagagtcccaggcccggccgggaccgggacggcgtccgagtgccaatggctagctctaggtgtcccgctccccgcgggtgccgctgcctccccggagcttctctcgcatggctggggacagtactgctacttctcgccgactgggtgctgctccggaccgcgctgccccgcatattctccctgctggtgcccaccgcgctgccactgctccgggtctgggcggtgggcctgagccgctgggccgtgctctggctgggggcctgcggggtcctcagggcaacggttggctccaagagcgaaaacgcaggtgcccagggctggctggctgctttgaagccattagctgcggcactgggcttggccctgccgggacttgccttgttccgagagctgatctcatggggagcccccgggtccgcggatagcaccaggctactgcactggggaagtcaccctaccgccttcgttgtcagttatgcagcggcactgcccgcagcagccctgtggcacaaactcgggagcctctgggtgcccggcggtcagggcggctctggaaaccctgtgcgtcggcttctaggctgcctgggctcggagacgcgccgcctctcgctgttcctggtcctggtggtcctctcctctcttggtaaggggaacgcagggcaagaggggaggacacaaggggactgggacaggaatcaaaggtaattgtcagtaaggtagagtagcgtgggttctgggaaatgtggagcaggagaaggactcctagcgtgggtcttggaacaccacttcggtgtagaagaaacggcactggactggcgggggccagaggttctgggctccattgctgaccgggtcttgattctttgggccacgccggaagcggggaaatcctttgctctggggccgaagggcggggcatcctcatctctaacaggaggcttttctacttcatgatctccagccttcctaataaaatcctgaaagttctggtagagcaaccacagggtagtgagttccagggcagcctatttaggttcgggattgagacgtcagtgtttcctttctgctgatgccctccaggataatggtgagggggaggaggcgtg

SEQ ID NO: 10943 - DNA, 6000 bp, Homo sapiens
ttagtatctgggtaaatctgggcaaccacttaacctccctctgcctccattttctcgtgggtaagatgaagatagcattcttcaatagttgtggtggcaaaaaataaaattaaaaaaggaaaaatagttgtggcaaatcagatagactatccctagtagttcaaataatttgactgtaggttggaaggatggtgaactgactacagaaactataatccaaaggtcagggtctagagcagtgaatcctgacagggtaggagggtgtgtgtgtgggcggaggtgaggtaaggggtagatggcaggggtggggtggggattggacagattgggcaagtaatataatcttggcaggatgtaggtgtgtgtagttttgaaaagacactgaagtcacgaatgtggtcttatgctatgaggcgtgattaactggttgagcaattttgtgtttataaaatggagacttcagttaaaaccgtctgccccaagaacctgcgaactgacatggagcaactttaggaagtgcctagaagagatttattattatggccatactctcagaaaaaaacaagaaatcacatttgtgacttcctccaacgtgcagtgccagtgacgttattgtagcttgtctttgttttagctaacccaggctctcgtaggacacctcctccctgatggcacctcacagcattgtcaagcttgtggagctatacaccagacctacaatgccaactgccttcctcctctccaacacaaatccagcccagtattcaaggctcattccaggccctctcgactgagagtactccctgtctaccatgtccatggtgatttctctcttctcttttaagaccactggccttattgcttacttactttaatataaactatttaaagtgtttgttctcactccccaattgacgtacaagcaaagcgatatgggggcagaatccatatcttctcactctgtattttcccagtaatgctttgcacacaaaccctgggactagtttactgcaggcatgtggtggtcaggctaagggcagaggcaatgggaaaggagaggactcactctttgggtggttgtgtagaggcaataaaagaaaggcaacatgtgggaacctggttggggctccatacctcttcggtcccggtgctatatcaataattaacaaataagtaacaatggacagagcaactgaaatgttattttgaattggctagaggtggaaagacagagctatatctgtaaaaatggaagggttgggaggaggagaggaaggaaaacactgctgagcacaggtgtctgggttttctgtccttctttattctaaaaagctccctcagtgtttgaattaatagagaagtgaaatcctctcctaccatttcctgttgtggcctcacagaaggtttcacatctcctttgactgccggagcagagatctagacataagagggaactacattcagccccactgttactggctagggccatgttcagtgctggcacaggaccacacagccagtgctcccttgccagggctaggctttgtagacattgaaaaggatcccaggacttggttcctataaggttaggctaacagcttacctgggcaggatggggaggaatgtgagggggaaatgtattgggggggtgtgggggaaaattcagttttgaaacttgtcaaaagagaaagtggaagggacggtggttctcagagcagaaggaactctgaggacaggaaagataagacttgggtgaattgggttatggattgtgactcttctctttctctctttctcagcggaggcctcactaactccctttatttgagccatcccagttccaagatgtagtgagtgtgtgggcatgctcaagagagtgtgtatgtgtgtgtgtgtgtacacatgtgcatgtgtaacagctgtataagaagaggagttacagcctttagaccttgggtgtgaatctttggacctgttttccaacctgggaaatgaggacaattaacaagttttttttttttttttttttttttgagacagtctcattctgtcacccaggctggagtgcagtggcacgatctcggctcactgcaacctccacctcccaggttcaatcgattctcctgcctcagcctccagagtagctgggattacaggcacgcgccaccacacccagctaatttttgtattttttgtagagacggggtttcaccatgtttgccaggctggtctcaaactcctgacctcaggtgatatgccttcctcagcctcccaaagtgctgggattacaagcgtgagccaccatgcccggccaacaagtcttttaagatgagatgagatattatagaaaggacctacctagcactgtatctgtagaagctctacagattatgcactccccaccccatattctgcccattccaacacacttgacagttcgttagcagagttagagtatataagcaaggtgagtgggggcagtggctgggagctatggcagagcttcagttaatctcaattagttacacaacgaatctttcgtttttggtaataatctttgtatgcattttttatccccattttcttcataggtgttagattttcctgagatcagggactttgagggagggcaggtaagtgtggtgtcaaggggccccttccacaatcctcttttgtttagctcactatttaataaaatccaagagttctcagaaactaagatgtgaagaggcagccctgaaacctactggggagcagaaggaagccaatttagagtttcaagttagtgatggaaaatccatcaactgtatagttcacaatgggatagaagaatgaattgccgtttaaaatctgctttttcaggccaggcacgatggctcatgcctgtaatcctagcactttaggaggctgaggtgggtggatcacttgaggtcaggagttcaagaacagcctggccaacatgatgaaaccctgtctctaccaaaaaaaaaaaaaagacaaaaactaaccaggagtggtggcacatgactgtaaccccagctactcaagtggctgaggcatgagagtcatttgaacccaggaggcgaagattgcagtgagccgagattatcccactgtactccagcctaggcgacagagtgagactttcaaaaaaaaaacctgtgaaaaaaataaatacgcaaatacataaaatctgccttttcaagacacacacgtgaccaagaagcatatgaaaaaatgttcaacattactaatgattagaaaaatgcaaatcaaaatcataatgagataccgtctcacaccagtcagaatggctattattaaaaagtcaaaaaataacaaatgttggagaggttgcagagaaaacggaaggcttatacactgctggtgggaacataaattagttcagccattgaggaaagcagtttggcaatttctcaagaaccttaaaacagagctaccattcgtcccaggaatcccattattaggcatatacccaaaggagtatacattgttctaccataaggacacatgcacatgaatgctcactgcagcagtattcataatagcaaagacatggaatcagcctaaatgcccaccaacagtagactgtataaagaaaatgtggtacatatacaccatggaatactccacagacaaaaaaggacgagatcacgtcttttgcagcatcatggatggagctgggggctgttatcctaggcaaactaacacaggagcagaaaatgaaatactgcatgttctcacttttataagtgggagctaaacattgagtacacatggacacaaaaaagggaataatagacactgggccctacttgagggtggaggatgggaggagggagaggatcaaaacactacctatcagatactatacttattacctgggtgatgaaataaatttttacgccaaatcccgatgacacacaatttacctatataacaaacctgcatgtgtacccttgaacctaaaacaaaggttaaaataatttaaaataaataaaaaataaaatcttacttggtattctcaaaaaataaaaaacaaaatctgtcttttcaggggaagaaaagtaggaaagctttatctcattttcctagtggcttcataatgcagggacctgcccccagggaacagggtatagtaggggaaacacacaggggtgtttagagtttggcgaaaggcaggtgagctctgggcactgacccgtcaccagctatttttcaaggagtctgagaggtgttaacctgcggtctaccccgtgagattgctcagagtgtaggaggatatggtttactagctccggaaagcagctattataactgaggaggaaatgaagcttgactggctagaacagaagcaacaatggaggcccatggagggattttccaggcccctattcctgatctccatggtggcgctgcttcccttattctgcagtcttgctttgagaccagacaattctgtactctgtctgtgccttcttccttctcagcagccctgcctctgccacctgccccagaagggctctgggtcctctcatctcaggacagacaagggtttttgtaattatcttcttgggtaacctccctgtaaggaataggagaggttatctggtcctggtcttttgggagagcattgagaagaaaaagttaaaccagtgggcagcccaggctgcatacatcctgggaatattgcgattattctctccagtaatctacggaaatctactggttgttctgcagaaaaagaattaagagagacaaggagacctgttgtctaagactaaggcaggatgacgtttacctagtaactgatgatgctaggctgaggcactcagtgatttgtctctacatttgtccctgcctacctagccaatctgtccctgtttgggacactggactcccgtgagctggaaggaacagatttaatatctaggggctgggtatccccacatcactcatttggggggtcaagggacccgggcaatatagtattctgctcagtgtctggagatcatctacccaggctggggcttctgggacaggcgaggacccacggaccctggaagagctggtccaggggactgaactcccggcatctttacagagcagagcatgatcacattcctgccgctgctgctggggctcagcctgggctgcacaggagcaggtaaggacacttcttctggggactctcccttcccctgctcctgtttcagggtaagggtgttccgttttgtaattgcatttgacaccccagatagtttgtctccctggtatacattcctatagcactttgtactttgtagcaattttaatgtaattaatctgtataattatctgtgcagtgtatattccctgctggaatataggcaaggacaatgttcatcttatttattgctgcctcctcagctcctagcacagtgccttgcatgcagcaagtgcttcataaatatgtgcgaagtgaatatttaatatttccagcacaatacaaggctgactctttctcttgaccctttttctctctcaataatttgccttactgaaggtctgtgttctgggcaaattgtcatgtttaaacatgcaaataatctcggggggctactcctatccctgtgcttagtcttgcataaagaggagactggatctaaaaacttatctactacttctactgactccctcaaatcagactttcagaaacttcagtgtatgagcttggtcagtagatgttccctgagcaggaaatctgtgccagactagctggatgtcaccaaggcttaggttctgagctgaatataggaaaaatcaactttttttcttctatatgctcacactcaacacttctttgaccaactgtgtgaggttttttttttttttttactcataccaaccaattctcctatattagctggatatcctataattcaattccattgtgacattaactagagttaacatagacaccaaaggttaaagactcag

SEQ ID NO: 10944 - DNA, 6000 bp, Homo sapiens
tacttaaagggttgctgaaagaaaggagtcccaaagggactgaaaaggggacgccagaaaagtaggagggaaaactaggagagagtgccatcagggatgccagaaatttgaccaatttaggagatggggtatggccaacagtgtcagatgttgcagagactagttcatttgatttggcaacacaaaagtattggtgaacaattgcattgttgagagttaaaagattaaatggcaagaatgggagcggggccacagttgcccatgacttttccaagaaatctgactctgctaggggaaaaaaaatagagtcctttttatatatttatttatttattttttgagatggagtcttgctctgtcacccaggctggagtgcaatggcacgatctcagctcactgcaacctccacctcccgaattcaagtgattctcctgcctcagcctcctgagtagcttggattacaggcacccgccatcacgcctggctaattttttttttttttgtatttttagtagagattcaccattaaccaggatggccttgatctcctgacctcgtgatccacccccctcggcctcccaaagtgctgggattacaggcgtgaatcactgcgcctggccaaatagagtccatttttaaatgctagaaagggatggcagagctgagtgttagaaagccagagcctcctggatttaccggtgctgtgccattattttcagaggcattcatagctaatgacaaagtagacagtgaactactgcaaagcagaactggctgccttgctcatctcttgcccacaattattactttccaaactgatgagagactattcctgagatacttatgatggaggtagttgggaggtcctggtggggaaggattacatggagggaagagtagttataagtgtttgaacttgttaccatttaaactgagattatagaaggggagaatggagttaaccacccctcaccacagtcttggtgagggatggttatgtttgtcctcaccttggtcttgtctacactgtgctccctatggagaacttggacccctctgccttgttcctctcacccagagaaattgcagtgtctgctgtacctattcctatgcccttccacccagtctagtttctcctgttcttccccagatctccttccaaatagactggtgtaactggcacaaagtgtttgttaactgattgccaatccaataataaggggactgaggttcttctttgaagggtgggtttaatttggggctttcgtaccaattctgaccacgtgtagagcatcattcagcacactatgggctgtgagcacaatcttgcctaccacctgtttttaaatggcctaaaagctaagaatggtcttcacatttttaaatggttagggaaaaaaaaagcaaatgaagaatatttcgtgacacatgaaaattacatgaaatttgaattttagtgtccataaataaaaagagggttgaggacaaaaactccagggaacaccagtatttaaagagtagctgaaaggaaggagtctatgaaggagactgagaaggagatgctcaagaagtgggaggaaaagctaggaggaaactaggaacacagccactctccttcatttacatattgtgcatggaggctttcgtgccacagttgagtactcatgacagagatctgatagcccacaatgtctaaaatatttgccatctggccctttacagaaaaagtttgctaacccctggtttaggactctaggtggctgtgtcccatatgtctccccactggtagtctcataaacttcttttctactgtccaggggcctgaatctccccactgccagaaccgctgatgggttagtgcataaatgttgggatactgggaaatgttcttttgttttctggagggttaccatgatttccaaaccctagtccttccctggcaccctgcctccaccacacagacacacacacatatatacacattgctgttccagaatatctaggaggtcatagagttgtttttgtttttggctattactgctgctattacttgtttatcaaaagaggatatgaagccaggcacagtggcatgtgcctatagtccccagctactgaggcgggaggatcgcttgaactcgggggttcaagactggagtgagttatgattgcacctgtaagtagccactgcactccagtctgggcaacaggggaaactttgtcttaaaaaaaaaaaaaaaaaaggtggaaggtatgaattttgaaagcctcagaaacactgttggacaatattcacatatattaatttctcagattacttgattgccacattagagctttctcactgcctcttcccccaccccttctgtctttctctttcttttgtctaacaaacttgaagcatgtacactgacagtttcttcctcacctcccacttacttctcagcccaccacaatctggagttgactcccactacaacactgaaactgctctcaataaatttgtcagccatctcataatcaccaaatctaaggacacttttcaatcctttcttgacttttgagtagcatttaaaaatgctgaccttgccctccttcatggcacacctcttttttatttctctgatctgcttctaccttggtcttttcttagtgctctggatggtcctcgtgccaccagattcttacaaaccagggtatttcagtgtactcgttattatctttgtctcagtgacacacacaccctcctctactgtgttttgaactgcttagcttaggagtcagccaggtgtgtatttcccagccttcctggacatctggcttcctttttgattctgccagtaggaggcactgatgggagatcagaaggcaagagaaactgagaagcatcctgcttcagcctctaaacagtgtcggtggctggcaatagctggtagctattggctgtagctgtagcagcaggaagaatgggagactcaggactccagcctcctgagcagaagtaccttctcaaggattctagccttgaaggaggtggcacctttctagtagattggaactgactatgacagtgtctctcacaaggcaatgagtagatttacagattccagctcagggatgatggcagcttctgatttccagatagcaatctttttttaaaatgtacatttctaggactctccttttttttttttttttgtacttcttgcccttttaacacctttgtaaccaattctctatattaaattctttcagtctgaagcacataaagtagttaaatgctcctgactggatcctggataactggtatgaggtttggggtttgagcccatgcatgcttttgtccttgtttcacttcccactccttctgcacagtttacttgggtgatcttattcatggcctctgcttcgacatttgtgctgatgactctcaaatcagggtcttcagaccatacctggggtccatacccacacgcctcactgcgctcccatgcagtttcagctggctgttccactggcatttcaaattcaacatgtacaaaatcaagctctttctctctgtaaacctgctcccatggcattcttttctgcttcaattcagtccatccctgaccacccacccagccacccatgctggaaatctgagatatctttgactcctccaccttcccactcccacagctaatcagtagccaaaccctttagattctacttcctaattatcttgatattctatctcctccgcctcctcttattatgacttaattcaggctcttattatctgtcatttaaattattgctgtattgctacaggagtggtgtgtatatgtgcaactgttcatcttggtatgctatagactcttgcccagcagttttgcctcaattctttaaaagctccagttcattgtttgaaatatcaatcagaacattttttccaaaatgctaaaatgattgtcattccccagttttaatatctctatcatctgctaagtaaaagcaagctcctccttgtggcgtagcagggcccacgtgatctggcccttgccagaatttgtagcttatcacaacatccttctaccccccattacctcctattatacaggaacacccaagcgaccttcacaacattcatatcaactagtacacagggtctccaaagaggacctctggatgcctgtgatctttgtacttctgcctaccctttgccctggcgtgtttttctcttccttcatgttctgctggccaaattgtttttccttcaagtcttaggagcctgcctgattatgttcctcctattccgcatcctcataaaattactgcgacttccaaaacacttggcacattcttatttgaatacattacattgttgtgtaattatcccttggccccctcccccagcactagactctaagctctttgaaggcagactatgcctattcatctttgtatttctagccctgggcccaacacccagaatttcttgtattttcaatatatgtctgccaaatgaattagagctaatgcctgaaggagaataagtttttttgagaaagaggaagagccaggagggaggagaaggcagggtccgaagagccctgggggtttacttggggaagatgcggttccccattgcagcattctgccaggaggtggcactgctctgaagagccagctggtcgcttacagactgaggctgacagcttgaaaccaaagagggaactccaccaggaagcaacattcctccactgggcttcccagcccagttacatgccatactctgccctggtcaaacagccaagtcttcaggaggttactggccccaggcgtctccccagtgactgatgatgttaaaccctacgcttctctgattggtttagacaaaatgacaagggcacctattggaaatgatctggcaaaacatgatctaaggccaccctctcggggagggagttggggaagctgggttggctgggttggtagctcctacctactgtgtggcaagaaggtatgggtcatgaacagaaccaaggagctgcgctgctacagatgttaccacttctgtggctgctaccccactcctgggccgtccctgaaggtaagatggtactcctatttacttccatcctgaacctagggagcccactcagctttgtgaggaaaagcgctgtgctttgtgagtggtgggaagtcttatgaggcagtggaaacaacaggggagtggggaaagacagctgctatgtgtggttggtaaacgatatcagtgatgctttgcatgttccatttaagacaatctcttgaagcggagattgttctctccattttacaaatgaagaaaatgagactcagagttatttgtgcaagttcacaccattggaaagtggtagagctgggatttgaacaaagtgaatgttattttcactcctccactcaagattctactctgctttctatcattaacttatcttgtgattcttgaaaagtgtcttagtttccttctctgtagaggatggggcagaatggaagaataatctggaagatccctcttcctccaaatgtctgtttttctgggtattgggttaaaggtttcctgctggctgagcgattcctgccaagagcttcaaagaagagggattattttatgcagttatggggtcacttctcccattgctgtctttgggaggcctggtaggttaaggaacagaagacattttgagagacgcttggtgccaatgaagtggctgaagaaatgtctggatacaggttttccaatttaccatttgtgtctggggatagtgggaggcagtcccatctatggcttggggaggctgtagccattcctcctctttcccttctaagagtgagaaacccatccatggccttctctagtcaatacagtggcctggtatgaattagacaaaggaatcccctttgggaggatacagccctatgccaggatgtatggcatggtgagcagaatgcaggctttcacttgcttctttggct

SEQ ID NO: 10945 - DNA, 6000 bp, Homo sapiens
ctgcacaggacagcacagtccttgaggaaggggatcatgtcctgctcttctgtgctcccagagcagcacacagtgcctaagtcacatcaggtgtcctataaacatgtatttaatgaagaatatcccccaacacctacctgaacttgtcatgctccaaagaacatgacagatacaactttacctcaaagtcagcattttagacaatttagaacaactggatttgtgtcatttttaaaggacactttagtaagtttttgtcgaatctgtgtttgcctcattattagactctagtcccaataacagtacctctccctagagtcagggttatccactttattcacttttatttgttatcattgacttatttatttaataacgtgctagcgtttagggggaaaaggaagattgtgtaacaaagattcaatcatccatgatcccttcttacaggccctttccatctaggagggaatgtggaccatacatatacattccaagaaaacaaataatgaggaagccctggtgagactgaaaggtgttctgaactgggttgcttgctggctgtggctatgagaaggttcctggaaccttctgctcttgcctccccggtgttggccttgagcaatcactgcctgctccctgctgcaaaaaacgatggcaagatcctgattgcctgtccagctgttgaggggtgggtgagaaaatccaagctgaaatcctgctggagtgggaggagctggggactgccctagtcattgcctcctctgccaccccagctatcagtgctccctacgcctcctagtgctcccaccctgaagtcctgacctgaagtgacacccaaagggtagtgactatggttttgcgctggcctaggactccagctggccctcctttctctttacacacatgacaccaacacagatggccactagtgggtcaaaataatacctttagggagtgccgacacctcaaaagaaaaacagcaaacaggaccatctatgtccttgaaagaagtggtagaaaatatagaccagccgcttaaaatgagcattaaaagtgcactttaaaagtcagaagctattataatatgaaaaaatagagaatatagggaaaacacctagaagttctaggtgtaaaaaatatatataatagtcaaagtaaaagccacattaatgggataaatagtgggagagatgcaactgaaaaacaaaacagaaagatggaggactacactgaggagctagttcagaacaaaagagggaagaattgagaagtcatcaatagaaaagtcaggggaaaaggaggagagaattatccaaatatagattatatgagtttcacaaagacaaaaaatagaggagaaaaatagttaaagaaataaaaagatgaattcccagaattaaaagatagagaagatccataatgtcttacagagagaaggaaaaacccactctagacacactagcaaaatttaaaaatatcaaagacaatgagaaaattctagaagattccagcatgaaagactgacatgggattttctaactgtgacattggatgcaaaaaaaaaaatttggaatgatgttatttagaatattaaaggggaaaatacttcaaatagtatgtaatacacagctaaactttattcaaaagtgctggtataattttaaaaaattatcaagcatacaagactttagaaggtttgctatgcaaattcccacatctgaaagtttttggaagaagaattctaatcagagaacgcattctagaaggtgccaaaagatatgaaaagtaatgttgaccaaataatttggtgaaggagaaaatatgtgaataaatttgaaagcatgctaaagttcttatccagtcagagggaagatggagaaggtatcggtaacacttaaaaaaaaaaaaaggcaatgaagattaaaaaagaaaacttggccgggtgtgatggctcacgcctgtaatcctagcagtttgtgaggccgagccaggcagattgcctgagctcaggaggataagcctgggcaacacggtgaaaccccgtctctactaaaatacaaaaaaaaaaaaaaaatagccaagcatggtggcatgcacctgtagtcccagccactcgggaagctgaggcaggagaatcgcttgaacccgggaagcagaggttgcagtgagccagcccagatcatgccactacactccagcctggcaacagagcgagactccgtctcaaaaacaaacaaacaaacaaacaaaaaaactttaaaaaatagaaatattgaaataaataaggtattacaaacaagcccaagtgcatcaatattcacaataaacacaatcagaatgcagcaaagacagtgccatgtgctcaccaaaccattatatcttcctgcacacataggtaacgtacatttttccatccccgtgcgcctatgtggggtcattgtttacttcttgccaatggaatgtgagcagagatggcaaatagtttctggtccaaaaccatggaaacaatgtgcctttcccaggttctctctcctacctgcaaagctaggagttcatgaagtgcttttcaataatagagatgcaaagtggagcttagccaccttgaggcatgttttggaaaagagctacagagtgcccaacctgccttgaactacacgtggctaaaaaataaacctgtgttttgttaaaccactgaggcttcagtgtttgtctcttgcagaaacaagtttgctcactttgactaccatatgaattgaacataggttagaagacagagatcgtcagattgaatcagaagcaaaaatctatatttatgacatttcaagggctacatctaaagcataagtacaaaggaagagtaaaaacaaaagagtagaaaaagatacagtgaacaaatacccaaagacagctgtagaacttattactatcagacaagacagagtaggacagaaagattctcaggacaaattgggaaaaggctcagttcaccaagactgtaataattcccaagagtaaacaccttaataacctaaatgcagagagggcaaaagttgatttaaaaattagaaacaagttgaaaaacctacagtcacagttagagatttaaatataccattcataggccaggaattgtggggcatgcctatagtcccagctactctgggaggctgaggcaggaggatcgcttaagcccagctgtttgaggctgcagcgagccatgattacttcactgccctccagcctgagcaacagagcaaggccctgtctctaaaaaataaataaataaatgcaccactcttagttatgtataggccagtccaaagataaagaaaaccgtaataaattagaatgacaaaatccacatgcttgatccaataaacatgtacatgtataaaattctgcatcacatttattagagcccatgtgaaatatttacagaagttcaccacactccaagccatagaggattatcatgtaattaaattataagttaataacaaaaaacatactttaaaaaatctatgtatgttttcaaataaaaaaaacacccgatactcgactgttattaaccaaagaagcaacattctttatcatgagtttttcatggctttcccgtctttcatctcatggctccagctcccacctcacttggggggaggtgaaggtggcaagggtcctaaccagggcaggaccaaagcagtgaagacactgttcattcatgcgcaggtgtctcctaggcgcctatgatgtgctaggcattacgtagacactgtggactagaaacgaaaaaactaagattagggctccccataaaccgggccatgcaaatcaattactagctgtcatttgattaatttgaagtcagaagctgtgtctgccccacttaaaataggcatcccttattcattgaggaaagagcattggagcaggttttaccagtccacagactacccgagaaccacctggggagcatgctgaaaacacaggttccctggccctgccttggaaaggctaatctaacccattaagtaaagaggaaactcaggaacacgtattataacgaaccccccaggtgattctcatttggaaccagagacccgcatgatttcctagctccctccaagttgaaaatcatcgatttcatggtctttgacacatggcctaatttggttagatttctctttacacagacgttagctttacgttgttgttgttttgttttgttttgttttttaaatatatatactggactaaattctcccagtgcctcttattagccgagcccaaccagaagccaaaggcaagggtgatgccgtcctccagcctgtgtcagcctggaggaggtgcccgggtcctggagggaccaacagagaggaccagcacctctgccctcctcggggagtccacgggagctctttacactttgctttagaccaaacaactccaacaattacacattttttcttacacaatgaaattaaataataataaaagaaaaataaaataacatttttgaaagtgatttaaagttttaagaggtttttattccattgtgtagccaatgttttccttttaaagattattggtaaagtttattttactttctaactcaaaatttgtccacggaaacttcttgggaaagtaggattccctgcatcgcagatggacatagagagaggatttgttggagctcagctgcgcggtgctctgacggccttttctctctcttcagggggtcccttcttggaggacgtggtaatagttggtccaagcccctcccatcctccaaaacttcctctggcctctcctgggggcccagtgaatccttccaccttctcaccccggctctttccctctttacccagcaacagatacattcactcagagaatttctgtgattggctgaagacagcaggggtcgcccccatcctcgaatctgttttcttcttctttacctccgccttgttcctgtcctcaccacacggactgagactgatttgattaaagcaccagagtgtaatggccctcagagcagggctggtcctggggttccacaccctgatgaccctcctgagcccgcaggaggcaggggccaccaagggtgagtgcgagggcgaggagggtgcggcggggagcagagatttacggagttgggttacatgaggaggtggcatggaggatgcttgttcctctcgctctctggtttatgggcaacttccttcaccaagagacacccaatccccctcatctctgtcacatccactctggacctaaatgaagatgcagctcggtcagctgcgcaggtgccccagtcagcctttgctgacgttcagatttctcctcattccttcctccttcctgagacccaaacctccacccaacagatgccagcaagcaccctgatttctctaccacccctggccgggaatgtgcccgatcaagtccagttctgttgcagtatttatgcccatgccggtagttaactatttacctgtctttgttcttcgggagacatgagctggggtgcgggtctacagatggttcatcttttttttcttttatttccctggccccccattgtgctgggtgcatgctagttcctcaataactgttgctcaaacaacttcatagagttctacaagaattaaaacttaatccctaacttccagaaaactagacaacagttatggaagagccacactcagtcataatgctctgagatggaggaattgggacatgaaccttgacttctgactcctcgtccagtgctctttgtaatgccttgagttgcctctccctatccccttggtctctgggtcactaaccttaattcttacccctgccagccgtggcctgtttcccctcacacccacctgcactgcatctctgtgcaaagctccatactctcctgtccttaatcattcctcctcatcccacccccacagtcccaccagctcacaacacagggcctgacaacacagccagggcagatgaccacag

SEQ ID NO: 10946 - DNA, 6000 bp, Homo sapiens
tatcctgtttgtggaacccttagcaattgagttgcccagagcacggtttgaaaccactgatctgaatgaattcgtctcttattcagaataggatatattaaaaacctctagctccctatgggttgtctcagccaagcttttctcccccagcctctttaagctatagcctggctcctcagccctttggtcttgtgccctgtttgaggttggggatgtgtgtggagttgggggagcatgcagggaattgtggaatcagccctgcccactttacccactcccctatggctccagctctccctccagcaggttttgattgaacattcattctacgcagggagctccagtaatctaccctcagtccctgtcacatggctccactgcctcatctcattccccctacaaacctcaacccagcctttgcccgtcctccctttcactgcccagcatcacatgcccccttctgctctctgctcccccacctctgggtttccttggtggctcccaacactgtccctcatcccacatgacagctctgcctatgggatgggggcgctgcatccgtcacttcctcctgacactgttcagtgtcaccagtgctgctccagcctcctctctccccagcctcacccctctgcagttcccagggctgagccgtcctgctggttagttctcagcacccttctgtgactacaagttcaagttctcctccccttcctggacaatgaacccaaggtaatagataagaggttttagggcttgaggggctgtattcaggagattccaaccttgctaccctgaaagatgaggaggtgacatgatgtcagtaccttctaggtgtgtcctaggaggggtgtggagaggtctaggaggaagggtgtaagcaggaaaagtggaagtcagtggaaaactaaggtacctactttgcagtccttcctctcagagtgttggtgtaaatttggactagaaatgtcctgagagtacaatggttgaactagtttacagtcccaccaacagagtaaaagtgttcctatttctccacatcctctccagcacctgttgtttcctgactttttaatgatcgccattttaactggtgtgagatggtatctcaagacagtgtggcaattcctcaaagatctagaactagaaataccatttgacccagccatcccattactggatatatacccaaaggattataaatcatgctgctataaagacacatgcacacatatgtttattgcggcactattcacaatagcaaagacttggaaccaacccaactgtccatcagtgatagactggattaagaaaatgcacacatatacaccatggaatactgtgcagccataaaaaaggatgagttcatgtcctttgtagggacatggaggaagctggaaatcatcattcacagcaaactattgcaaggacaaaaaaccaaagaccacatgttctcactcataggtgggaactgaacaatgagaacacatggacacaggaaggggaacatcatacaccggggcctgttgtggggtggggggaggggggagggatagcattaggaaatatacctaatgtaaatgacgagttaatgggtgcagcacaccaacatggcacatgtatacatatgtaacaaacctgcacgttgtgcacatgtaccctagaacttaaagtatatatatatataaaaagaaatatcctgagagtatcctgagagaaaaacaatggatcatagatgccataatattacaccagccacagggaggcagcaggaagaagagatttttcacttggttactgcttccttggctgtctgataacctacactcaatccctgtcatgcacccacacaacctcatctcattcttcctacaagtcgcaacccactctagtaccctaaccaagttctggggaggctgggagaagtacctttaatgagaatgccttcaggggctaaaacctatccccctccctcccttctctccttaattgtccaagggatgtgggctcctgctccaccctggggaataagaggcattcttcgtgagcactgaatcctcagtgatcctcagagcctggacactccagcttagggctctctgcctgagtcccctccaggctggatgcagacatgaacacgcccaggagcctgcacttgccaacttctctctctgcaaaccttgtctgtccaaggttatccaggacctcttggtcccattttccccaaagacactgaccactgggcacctctctctgtttactgtacccatgtccttggagagagaataggccagtagggtagcaagctatcctataggggatgaacctctttctctagctgggaagagaggacactgccttagggcaggagcccccgcagcctgtctcagaatttgatcccttaaagataacgtcccctaggaattgttccctgagccagaccctccaagaatggcagttcggctcttacctggagtggccctgccctggaccacagatgtgagcagcaccatcagtaacgccgtcagagccactgtccggggggccgcagaaacctgcagaaccatcatggagctggaaaaggatggcaaaatgaaaagagctgcagtcaggaaaagaaggactcgctaaagggagctcctgtttgaaatattagagaccatgaacccaagtagtcttctgtgaccctgggattggacagagtctgagaaaagaaccaatggacactgagctttgtatgagtcattgctcactaggcagaaagttagtatgaaaggtctgaaaatataaagcctgtgatgcacttaagatgacggaggaaagacagtgatactcattttaaccagtcagataagtcatgatgtttggggagattatgcgttttctttgctctgaaggtgatctcaaatattctgctggcccatctacagggattatcatttccccaattctgccacacctcacacacccacaggacatggtctgttgtggaaaaagtgctatcttagtgtgtaaaaggtcattcagtggcatgacttagagggattagagtacccatctcagaactcaaatgaggtctgagtctgtctgtcttgcctttgtccaagggtgtgtttaagattagcacccattcatatttactttctcccagaggtctgtgagtcctgcgatgtgcaggagttaccaggttcttccacaggactgtcatcagggtcaggagggctcagtctagggaccttacactgggagcgtggacacaccacctaccctaccatgtaaatatgcagctttaacgacactgcctctcttggacttcgattccttgtcttcaatatggggatgatataacctgccttatagcaaagctcttaagatcaaatgagatcaataggtctgaaattgctttggaaaaataaagtccatagagaatataaattgactggtaaataaggaagaaagtgaaaaaaaatcatcaaagaccccacctccttcaaagcatctgattctattttgtttagagtgaatatttttacaaactttcaaagaacattacttcttactttagacacttataaatgtgatcctgttggaccaccaattctaatttcaaaaaaaatcaaattggcatcatttctttaaatcaatattaaaatgtaaatagaaggctagcatgtaaaatgcaagagaagaaaataattatgtagtagaaggtgtctagtaggattaaggggccaggagaggattgtggagaaaaactcagtttttttagtaactgcctgggtgggacttttctccttgtcatttacctgccatagataattagacaaatacttcctcgatgtctcaggtaatttatttttacagtagacattaataatacctccctcaggtttaatatgaggtttaaatgaggtaatgcatgcaaagcactaataacagaatctctcatgtcctaatctgttagtaattattatttatgcaaggtaaggctaccacaaataagataaaatattaacgtaatatatgtacttcatcattacattaaatagtaaatgttttgtgaccttctctatgagtatcaaataaatagctcaaaattgaaatatttaaaatgagactagaaaagtatttcttaaatatggtaaagagaatataaaataaaaaattaacattacctgtaacagaaaaacattagagaaacccttcttaaaaacaagatcaaaatatgggcgcacattgttaccacaggtaatgctgtcctgggtattcttatatgaaaatgaaataacaagactagtaatttaaagataaaaatgttattacactgtttaaataccaggaaaaatcaaatactaagaaatctgaaaaataaaaattatctagaaatttcactaacaaaggtaaccaggaatagataaacaattaaagatcaacttcattcaagttaattaaaacctctaaatagaaattataacacttctgcagaaatgattaaataaaaaggaggtatctcagggaggtggacctgaaagaaagattaattatatattttattagatagcacattcattcttaattatcagcagaatatttttgtaaaatattgacaacataacataaaacatgatttaaaatatagtgaccaaaaaacatcaaagatcatctgactgtctgggatgggggtggggctcgggagaaggaacataatggaaaacatttgccgtcagaagaaggtgtaacttatctttttacatctctttctctaactctgaaaatgaactgtgaactggagctctcttgaccacgctggtacctaaaattctcccatctcttccccagcaccttccagcgtcctctttacccagcaacagagaatgtcagctctatgatttctctgataggtgaatcccagccatgctgattcctctccacccatttccagtgctagaggcccacagtttcagtctcatctgcctccactcggcctcagttcctcatcactgttcctgtgctcacagtcatcaattatagaccccacaacatgcgccctgaagacagaatgttccatatcagagctgtgatcttgagagccctctccttggctttcctgctgagtctccgaggagctggggccatcaagggtgagtgctcaggaggacgcaggagcgtcggggtgagtgatggggtggttcacatcaattgctgcttcagggatcacagattttaggggctcattgatctatctggtcctcatagtctatgttccctctggccctcataataataacagcaataacagccagaatttatgagactcctgcatagtttctttccccatttacatctcacaggaatcttcaatgaagataatattccattcatttagaaattattccttttatttagaaattattttgaaaaaactgaagctcaaaaagatgaataagttttccaaggttacacagcagatcaacgagccaagtttgaagtccagacccagctctgagggtcatacactgccttccccagattcctgcacacagtgacctactatcagggccctcctatctctctgggatccccagcctctatcttttgtggctgctttacaggaactccgagctatggactctgcattaggagacgaagtgcaaagagtgtttctgtatcctccctctcttctaggaccctagggctcttcctgggtctttgtgggtggtcacaagctttcctctctcaagacagcagggttgcatggtcttgatagccttgtgattcgggttctgagagattcaggactgcaagggaggcctagacttttgatagctgcaaggactcagccagagatggaccgtagtgaatgctcctttttcctgtagctgaaatcagggagaatgacatcaagcctgtgcatgatgctgtcattccaaaatctagtgatggggaaggttagaatccataacgtacaagatgcacactggcttcagacagttttattta

SEQ ID NO: 10947 - DNA, 6000 bp, Homo sapiens
ctcacatttctctttacagagagggacatcactagctacatatagggagactggggggtctgcagcatcaccactgctaaaactaatagcactgtgtgggcaactgagtagggcagctctaaatggaaaaaggacccagcactttaacattccctattagaatggacagaaaggacaggaagccataggtatataaactatttattaacagacaaggcctacagacttatttcttcttggacacacccacggtgcggccacggcggccagtggtcttggtgtgctggcctcggacacgaaggctgcaggtaaaaagagaagagtcacaggtcatgcacagcagaaacaaaaggttggggaaaaagaagagcgagtaggaggaatgctgagtcgaggtaggcagggagatgagaccccccactcacccccagaagtgacgcagccctctatgggcccgaatcttcttcagtcgctccaggtcttcacggagcttgttgtccagaccattggctaggacctggattcagaggagggggcaagggatgttttatcccctgacctcctatgcccaattctgttaggaccctccacccttcctctaatcctgccctcatttcagtacacacctggctgtattttccatcctttacatccttctgtctgttcaagaaccagtctgggatcttgtactggcgtggattctgcataatggtgatcacacgttccacctggcaggcagaccaaggtcagatctagatggacccctttctgaggctgaccccacccccagcccccttccttgtcctcacctcatcctcagtgagttctcccgccctcttggtgaggtcaatgtctgctttcctcaacaccacatgagcatatcttcggcccacaccctgaatgaagtgaggggtttcggaattagtgttgaatctgatttttaaattcctttatagcctcattcaaaaagctcacaaaggtaggatctgcaataatctattttgcaatcccctaggtcaccctttcctcacccacctttccagatataaaccgttcgacagaaggttaactttgggccggtcgcagtggctcacgcctgtaatcccagcactttgggaggcccaagtgggcagatgacattgagggcaggagttcaaaaccagcctggccaacatggtgaaaccctgtctctactaaaaatacaagaaaagttgctgagcatggtggcaggtgcctgtaatcccagctacttgggaggctgcagcagaatagcttgaacctaggaggtggaggttgcagcaagccaagatcacgcaaccacactctaacctgggcgacagtgagaccccgtctcaaaaaaagaaaaaagtaactttgttcaggggtatgactgaatcatgaacacagaatttagtattacagacaaccctttgaaagcaggcagtatcttttttttcccccattgctcagcatatgtagttgtcactaagtgccttctgattcttgcatttaggagaacaaggggcctgccactccaagctgatgcagtaaaccagggtcttatgagttacaggctttgattaaggtattgggctgtcagttcctcagaatctctaagggtcacaattatttaggcaaatcactgtatccccataatcaaagtattccaagatcacaaactcaattttgtcagtgcccagaactgactgcccaagttattataaaaagaaactaatgcttacattggtagcatcacatcaacaccagcactagcacccatgccatctgaactcatgaaccaaagtgatttggagagtgaaggaggaactgaatactgagccctgcccctcattttgtccaactagaacatcagaatgtggccctatttggaaataaggtcgttacggaaataattaggtaaaatgacgttatatttgattagggtgggctctagatccaatgacaaatcatgagagagacacgaagaggaccatgagatgacagcaacagattggagtaatgcagctacaagccaaggaacactaaggattactgacaaccaccagaagacaggaagaggcaaggtaggattcttaagtgcctccagcgccaagagtaattttctgcttagtttatatgaacttgttacagtaggctccaggaaactaaaacaaatggcagttcctatctgcaagaaagagatcaagggttggcttcaccgtggctcatgcctatatgcctgtaatcccagcactttaggaggctgaggctggaggatcactgagcccaggagttcaagaccagcctggacaacacagcaagatccagattagccagatgtggtggtgcacacctgtagccccaactacttggaaagttgaggtaggaggattgacttgagccctggaggtcgaggctgcagtgaagagtgattccgccactccagcctgggcgacagtctcaaaaaataaatgtggctgggtgcagtggctcacgcctataatcccagcactttgggaggctgaggtgggtggatcacctgaggtcagaagtttaagaccagtttgaccaacatggtgaaaccccatctcttctaaaaatacaaaaattagctgggcgtgtgcctgtaatctcagctacttgggaggctgaggttgcagtgagataagattgcaccattgcactccggcctgggtgacggggtgagactctgtctcgggataaataaataaacatgaccaagggtcaaattattaggttgattcagaagagagcagggtctttcaaatttattaattaaatgacgaggtttcaccatgttgaccaggctggtctcgaactcctgacctcaggggatccgcccacttcagcctccgagtgagccactgcactaagcctcaaatttaattatatgtttacaagtgaaaagatttacttcaaaatgggtgtgggaagagatatagatgaaataagatttctaatttttagttagatacatccatgaaggttattctctattacacttatgaatgctgcacctctacttaagcctcacagccggtctctgaaataagtacagtatttcacactgccttattagtttcacagagcacccaacagaaggaatttccctctacaaattcctcaacagagccaacagtatccctactactatccattccctaacgtcgcctaagtacctaccatgcaacagaagccaagaagacaggcctagccctgcacgcatggacacatactggtaggctatttccacaactaactacacattctgacttaagggaaaaaaaaagaacgttatgtatctagaaagccaagaattcattaggtttgtggagagaaatactcaagtgaaataatattcttgcattcattgattcgattcttaaaagccaaagaaagatggatgtactccttcacacttcgacaggaaaggagtgtcaattatggctcatctgagtaaatgtcccactcagacttcttccaccctccatctacaggcttcttcacactttttatctgttggtatttctacttatccctcaagatgcccaataatcctccaattctcagggaatataaatttcgcaggaagggttgctgttatgatggtgggatgggtaaagaaaccgaatctagaagaaatctcacaagctcgtggttcaggaaaatcttagcgaattcgggtgagcaaccatacctcctccccacttccccaggtgaaatgttttggcttgaccttagaccactatcttggctttaatcacttattttctgtggtaaatgctaaaggggtcagtctctccctaaaccactttcttttcttaatccagcagtcaaggtgatctggatgagactcaagtctccccagccttgcttcatttttgcttatgtcttcacaacccaattctcatttacattccctattccttaccctacttcacttaccttaatggcagtgatggcaaaggctattttccgccgcccatcgatgttggtgttgagtactcgcaaaatatgctggaacttttcagggatcactagagactagttgaaaaagtacgggggaagaaatcagacacagtaaactatcaaacagtaaggccgataaggcaaacgaacttcatacaaaaaggttaagcctgtcacacaagtggcaagacacccgccccccattccttaggttttcacaccacagagcaaactcctcagtcctgcagagtaggcacatgaagcgttcaagcttgggaaaatgcaacctctggagagaggaagcaggtctcctgcccattcccaaaagtgcgtggcaaaagccagagttccccatatacgcccaagccttagacagctttcgtgcgcccgagcagtgacccttcctcgggcccgctctccggaattggaaatctttggtgtccctttccagggacgcgatccaaggctccatacagaaagtcgcaggccctcagggcaggacgtttccagaaccctgacagccggctttccttgcccgagctgcgatgccgctggatcacggcacggattccagtcttaccatggctgcagcacaagcggcggcgtgtaggcctcctgtggaagagagagcggaagtgacgcgatatcattatatagcttccaggaggaagaggcggtgcgatctaggagaagtgcttccggaaactgtttcagcgcgacctggctggatttatgagagtatggcttgggtaccacaacttccggtgcgcctttctttacagttcgtaaggttcataggtaagagaacagcgaaggttccggggctagtttgtgtttcagacttccatatttccatttgcagttgggtgaagtggttagagctgaaaggggacagctggagtcaaacaacttaactcaaatatctgggaacgatttcgcgctgaggaagaccctttgggacttgtagctccactccggggaacggactcgccgggactgacagttgccggaagtgaggctgcggggaatggccgccgctgcgaccatggcggctgcggcccgggaactggtgttgcgggctgggacctcagatatggaggaggaagagggcccgctggtgagagcgcggagctgtttctcctccgtagttccggtgctcctagcttcagaaagacctgagctgggtttaggcacaagggtgggaacttggctgctacccgtgatattacctgtttggctccccgtacccttccctgtgatcagacccgaccctgagcgggaccctagtggctgaaactcatgttctggggcacaaaatttcaacttcactccacattttggggtagagtcacgaagtagtatagtgtaaaggttaagaacatggcctctgaagccagactgcctgagttctatctctgccacttacacgctgtgtgcccttgggcaagttaaccagcttctctgtgccatcatttctcacacctttaaggtgaggaagatagaacctattgtatacatcgtcgttaggattagatgaatatgtgtaagattgcacctggcatgcaggtaaacactatgtgttttgacatttctagaaagcctggggttccccagaggtgtgatagaacacccaagatggcaggagtctgagggtcttaaatttaagtgcaagttctgctctatcctctgcaattcctagctttcctcattcggtcatctccactgcacttttttttttttttttttttttttgagacggagtcttgctctgtcgcccaggctggagtgcagtggcgcgatcttggctcactgcaagctccaccttccgggttcacgccattctcctgcctcaacctcccaagtagctgggactacaggcgcccgccaccgcgcccggctaattttttgtattttttagtagagacggggtttcactgtgttagccaggatggtctcgatctcctgacctcgtgatcttcccacctcggcctcccaaagtgctgggattac

SEQ ID NO: 10948 - DNA, 6000 bp, Homo sapiens
tcccaaaccccccattcacagcctcctcggcctggtacttgcaaggtaagaaggggagggcgtgtttcctctgacaatttgttctctttcattggctgtttcagctgctctgtctgaatattccacgtgccacatcctgtctcttcctttttcccacccattttatcctctaaatcctcctgtttcttttctcctgtactccagatctctttgactctttgtctctcacttccctgcagacaagtgtggccacacaatgcgatccagaagagatcatcgtgctctcagactctgattagctgcctccccttctccctgcctccagaatgttctgggataacatttggaggaaggtgggaagcagatgactgaggaagggatggactaagctaatccccttttggtggtgtttctttaaaaaaaaaaaaaagcttaagttttacacagaaacattaataaacaataaagttcttttcttactgtatcactgtctttttcttgtccttctactgttacagattggcattagctgtccccttgctcagggttagcccagtatccccggggtagtcccgctctgtcctttctagcctggcctttttttttttttttttttttttgtctcgctgtgtcgcccaggccagggtgcagtggtgagatcacagctcactgcagcctggacctcccagtctcaagcgataatgcctcagcctcccgagtagccgggactacaggcgcgtgccaccatgcctggctaatttttgtttttgttgtttgtattttttgtagagacggggtttcgccacgttgttcaggcagtacttttttttttttttaagtgcttcagccgccttaacgcactttactttttcacttcgtgcagtaggagtgagaaagccaatgaggggccgactcaaggttatttagccaatccaggcccggagaaagggggcggggcttcagtgggactgtaaggagctaggaagagggcgattagatcccaccaaccagctaatggtcacagctcagaggcggagcctggggaacgatacctggacccatcgccaatgggaaaaggcaggcttatagctttaaaggggaataaatgcttcggccgaaccaagtcctgagctcccagcggaggaggggacctgatcttttaaggtggaatgtggcgatgtttctttaaaggcaaagtggccgagtcggccgagtattgcccagcggcacgggcggggtgcccggctgtgcctttaaaggcggaggggcgggaggcggagcggaggcggagggcggagggagtcggcgcaagatggcggcgggaggggcccaggttgctgctctggccgccgagtgaggggcggggggggcccgggggcgcgcggcccggtaagcggggacgcgcgaggttggggggcgccttccgggtgggagaagaggccgaggtagcgcttggggcggagcgggggggggcggggtccgttgtgggcggaggtagacaaggggcggggtcgaaaggcccgatagtgggcggggcacgggggggtgggcctggaaaggggcggggctagagaagctggggcgaaagggggcgtggtcggcgagagagcttggggggcatagcctgaggggagatggagcaagcgttggttttcagtagcagagctgccctgccccctcccaaaaagtgggtgcaaaacaccaaaaaggtagattttggaatgtcaggctctcaggtaagtcggaaatagggtataattccgaaggaagccactccagcccctaagagcaccttatttctctaacctccaaggaaagggcacaagatttgtcagatacctgtgtttgctggcgctgccacttgctgtgtgaccttggataatctcttaatctttctgagctttagtttcctcatctgtcaaatggggttgagaggaatacctacctcactgttgtggggagttacacagataatgagcgtgaacatatttttgagttgtaacgggctgtgtcgttatgagatgttatcattattcttttctctttttcttcccagagacccccccggccgccctcctcctttctttgttcctgtggctgggggggtatcccctccctccacaacatggagccatctcctctgtctcccagtggggcagcacttcccctgccgctgtcgctggctccgcccccactacccctgccagcagctgcagtggtacatgtgtccttccctgaggtgaccagtgccctcttggagtccctcaatcagcagcgtctgcagggccagctctgcgatgtatctatcagagtgcagggccgggagttccgggctcatcgggctgtcctggctgcctcctccccttacttccatgatcaggtcctactcaaaggcatgacctccatctcgctgcccagtgtcatggacccaggcgcctttgagactgtcctagcctccgcttacactggccgcctcagcatggctgctgctgacattgtcaacttccttacagtggggtctgtgctccaaatgtggcacattgtggacaagtgcactgaactactccgagaaggccgggcctcagctaccaccaccatcactactgctgcagccacctctgtcactgtccctggtgctggggtgccatccgggagtgggggcactgtggcccctgctaccatgggctctgcgcgctcccatgcctccagccgggccagtgagaatcaatctcccagcagcagcaactacttcagccccagggagtccactgatttctcatcttcctcccaagaggcatttgcagcttctgcagtgggcagtggggagcgtcgaggaggtggccctgtattcccagcccctgtcgttggcagtggaggggccacatctggaaagctgctgctggaggcagatgagctgtgcgatgatggtggggatgggaggggggcagtggttcctggggctgggctccggagacccacctacacaccccctagcatcatgccacagaaacactgggtatacgtgaagcgaggtggtaattgcccagcgccaacacccctggttccccaagacccagatctggaggaggaagaggaggaggaagatctggtgttgacctgtgaggatgatgaagatgaagaactagggggtagctccagggttccagtggggggagggcctgaggctaccctcagcataagtgatgtccgtaccctgagtgagcccccagacaagggggaggagcaggtcaacttctgtgagtcctccaatgactttggcccatatgagggtgggggtcctgtggcaggtcttgatgactcaggggggccaactccctcttcctatgccccctcccaccctcctcgaccgctccttcccttggacatgcagggcaaccagatcctggtcttcccgtcgtcgtcttcatcctcatcctcacaggctcctggccaaccaccagggaaccaagcagaacacggggcagtgaccgtggggggcacgtcggtggggagcctgggtgtgccgggtagcgttggtggggtccctggagggactggcagtggggacgggaataagatctttctgtgccattgtgggaaggccttctcccacaagagcatgcgggaccggcacgtgaacatgcacctcaatctgcggccgtttgactgccccgtgtgcaacaaaaagttcaagatgaagcaccatctgactgagcacatgaagacgcacacaggtctcaagccctacgagtgcggagtctgcgccaagaagttcatgtggcgagacagcttcatgcgccaccgaggacactgtgagcgccggcaccgcctgggcggggtcggggccgtacctgggcctgggactcccacggggccatccttgccgtccaagagagagtctcccggagtgggcgggggcagcggcgacgaagcgagtgcggccacgcccccgtccagcagacgtgtctggtccccacccagagtccacaaggtggagatgggcttcggtggaggtggaggagcaaactgaaggggcaggctactggggtggggtagctttcgggaaagggaataaggagcacgatgcaagggcgctgtggcccccgggtgatctcccaccacacttactgtcttcctttatctctgtggacttgtatatattctggaaggggaaccacagtttcaccatcgcccgcccattctactactcaacccctcccccccaaggtatttccagaactaaacccttcctttccctctgatgggtacactgaagcccctgctccacagagtagattgcacatggagggagggagagggggcgtgttgaacatcctgcagtcacagggtcaggggtcaggtggttgtagtctgtgcctgaagtctgtgtttgtgttgtcgtggagacaaggcctttgagccccacccttgtcctagaacctaccccctctcaaggatgcgctctttatttctaccctgtctctccccgccacccccgacttcccgtggaaattcccaactcggttctcatggaggagtgggtggagacaaggagggagtaagtcgtaggagtacaaggtttttattttttttaacagtgattaaaatatttattggtcatttacttggcttcccgataacccgtgtgtttgctggggacgcggcacagatagggggaagccggagtaatggttttcgggcaagtggatgttggagagcacacacaggagttggggggcgggggagggcctggggttggggagggctcgaactcggggctgctgggtagtccaggagggcgcggtaaggctggggtgtcctggtgagaactggagaggatctacccgggtccctgcctggccagtggggaaacaccggtcccccaggcaccttcacctaaccagagcggggatttccaccgcccctcatgccgccctttggaggaaagtgaaagtgaaaggaggaagaggaggcttcatggctgaggaggtcgcagcgccatgaagtccctgtctctgctcctcgctgtggctttgggtgagcgaaccccgcgactcatcgcccaagaactagagggaagcggagggaggtggccccactggagccgatgccagggtgggagtggggcaggtcaccagacatacaaaccgctcctcactcgcgtccctatacgccaggcctggcgaccgccgtctcagcaggacccgcggtgatcgagtgttggttcgtggaggatgcgagcggaaagggcctggccaagagacccggtgcactgctgttgcgccagggaccgggggaaccgccgccccggccggacctcgaccctgagctctatctcagtgtacacggtgagtctctagggactcgccgcccccctacctctgtcgcctccaccgaaaccccctcctctttagatccggcagtgacctcaggcctcagcttcccctttgtaaagtgagtctcactacggggtagtctgtgcatttgaagttccccgaacgctgcccttccagcccctttcccggcggtgactctacagctgcaacttccttctctacactcagaccccgcgggcgccctccaggctgccttcaggcggtatccccggggcgcccccgcaccacactgcgagatgagccgcttcgtgcctctccccgcctctgcgaaatgggccagcggcctgacccccgcgcagaactgcccgcgggccctggatggggcttggctgatggtcagcatatccagcccagtcctcagcctctccagcctcttgcgaccacagccagagcctcagcaggagcctgttctcatcaccatggcaacaggtagctggggaggggaggtggagaagggtgggtagattctaagggtccagatcagccggtggtctcgctttatggacttgagcaagacatttcgccaatcggggttcagtttcctttttttgttaagagaggtggtttggctagaatgaatcaatctctaccgctccttctagcc

SEQ ID NO: 10949 - DNA, 6000 bp, Homo sapiens
tcttctggtggtaaggagaagatggcttttgtcggcatctggctgtggaggccccagggcagaaggtgggaaatatgcccttgtttggacaagtagagaccaaatttatctcttctcccattcagtgcccagagattcaacactgcccccaccacctcaccccacctagtctcagtggacaggatggaagccactccataggtcaggagccttctcaaggcacagtgaggagcttgaggaagaaagatgtcagggggaaagaatggaatatccaggcctggtgacacagaggggcctccaaagacaagagctggagatgggaacaaaactttgagaagagagaacagtagaccaagtgtcgcctatggctgagatgagaccagggtcctccttccccagctctgttgttcttgccatgccgctctccctgcaaactgcctctcctttaaaccccaatgccacacaggccctattgaagtaagagagatgtcacattggcgacagcaaagagctagaaattaggcttaaggtatcagattttagatggaaaaaagatcaaactctgtcacctttatgggataaccatgagtatactgcaggagaactggtctttgagcttcattccaacagaatgcactgagtagcagagttttgcaaattcagcccttttctgtctataaatatgtctctcaaatttacccaacctccagatcacagtgagcgatgaaccctcagaatgtccaccatttagaaaccacatactttgaaactctatctcaacccatctcagagactaactaatgttctctagatacagagatcaccaatacctagcctctgaaactacagacattgcaggcaacatgcccaccgcacttagacacttggtatacccagaggagaaatctgttgatacacataagcatttggggaaagggctggttcaggctgcagccaagggaggcgggttagacttcagagggcatctttctcctggcagcagggaacttaggaacaactctagaaacacacacacacatactgtctggacttggtgaagaatgattctgggaggcagatgcaagaggcagagcaacatggctgagaaacgggaaatttttactaggatgagaaatccctcaagggctgagatggggatcccttgttctaatcatcaaaacctgtgtctttgtaccccaaatctccaacaccccaataagtagaggagacaagaaaagagaaatgataataagagttgaggtattaagggaaagtgggtaggcacagacttgtggtgacaaggaatggtctgggagacaaataataggagtagatagaaaaggaggcagaaatgatggtaaatgcccaggggcaagggaatacacctgaagggctcgactggacatgtgtcagagcaaaggaggcagacctaatgcggaggctatgagaaggggtcaagacggactagtaaagaagtgatagagatataagggagcgaccacatagaaaagagataagagagaggcaatgaacaccagagaggggactgatataggggaaggacagaagggggactcatataaggaacggacaccatatggggggaaagatataggtgatggacagcagaggagggagggggaatggaaataaggattggaggggtgggggaagggggtaaaagtgatgaagtgaagacagcattaagaccccagaggttacattttactggtcaagagcctttaagagggtcagagtctggggcaggatcctaacctgtcccctactcccatcatttcatcttacttgtactgccacccccccaagcacacataatttggccctccccctgccctggtctcccctcccccaccgttccctctctcttctctcttccctccatctggaccctccatccccccaccccccactgcctccctctctctccatctggccccttctctccctccatcctcctctctttttccgccccttaccatactctgagtcccccaccaaattatccccccacatcttcttggcttctcttttcacccctatgttttcatttctccttcctagcccctctcccaagactctgtccctctatttccttgatgttttcctcatcactcagctcccacccccaaattatttctgcagctttttccccaacccaatccttctaccttcccacccctttctggcgctttctttccccttcatcattttcccttcagccccctttcaaggcccatttcctggcccctccatcccttatctacccctatccctctggcctccaatccctccttcccggttgctcccacccctgccttcccggtcctcccctctccctccatttcagccgctcccttccctcggccccgactctcccccgccccctgcccctccccctgttgccccccatatggccctccccctccccccaccacgtacctctgaagggggcataggacatcgcggggatgctcccccgatggatggaggctcgagacctgctcatcaggcctggggggagggggcggggggacgggggagaaagaagagagaaagagggggagaaagagggggagaaggaggaggaggtggaggaggaggaggaggagagaggaggagagaggagcagagagaagcagagaggaggagagaggaggaggaggaggagaataagagccaacggcagcagcggcagccgagagagagggggggcgggggagcgagcgagagcgaagagagcaggaggaggaggaggagggagagactctgcagcccccacccctactccgggaggcccagattgtgagagagagagagacccctgactcaaaaacacaccagagagagacagaggtcctaaagatgcagaccccagaccctgagacagagagaccctagacccacagagaaagatacttcaccaccccccactgtggggtaatttgagacacagggccaaaatctagaggaaaagagactcctgatttgaggaaaaaacgaccccagatcccccagagagagaagctcaatatcaaaatctgaaaatccagtctaaaaagggttctccatacctacagatatcttagactccagaccctgagatgatgatttcagggaccaggacctgagacctagactcagaaaaagatgaggcccagattcagaaagagccagatgtagaattagagcttagagaactcagacctagaaagagaccccagactcagatctcagagactgataacttagagacagagacactcctgacttaaggggagatagagacttcagctggtccggagatggacaactcagagacccaaaattcatgaagaagacttcgaaagacctcagagtgcgaccacagaccctgaaacatagaaaccccccaaaccagaagcataaaaggaaactcaatcctaagaaagatctccacacaaatactgaaagacccctccgaaatctgtctcagagacaaactccaaactcaaagacagagatctcagggaacctcccctccccacttccctgccctagaacctccgagaggtataaccctgacgtcagcctgggaaactccgaggcatccccaccaccagaccaatgacctcagaccttgaagggaggggaaatattgggtgggggcagtggcaagagcttttttctctgcacctcctcccacctctctgcctctcattggcccctctctccatttttgggtcacaggatgtgcttgggccccagggaagttatgtagggcaggtcctggctccttgggggatgggttagggaaaggagacccgaggctgagaggtggaccaatcctggggagtggaataggcagggaagaggggacagaaggaccatcaccactgtccccatcctgcagccctcgttctccttccctctgattcagtagtctgtctcaagctttgggttttcaattaagatggctaggccccattttcaccatcctctaccacagggtctcgctctgttttaaaatgcttctttcctcagctagctattgtcttgccatgcccgtgcctgcctaatcactccctgctacccagggacagcgggcttctagatcaccgttgttcattcccaaacccaggcatatctctgcccaactaaaagggcagggggcgctctcttaacccctgagtttggggtgaagggtccttctcagaccctcccactccttaagacctcggaaacagtgcaggggaggtcactaggcacattgtggggtttaaggatgattccccactccacagcctgacgcatcgactctgcggggtctctggcccccctttcctggaaccagctctcgcctcacgtggcctgcgaggctggcctgtgattggccacttggcgtcactcactgagtgccgccgccgaagaggaccggccccctcacgtgacagtggaacgccgcagcggctctcctcagccagcaagtggcagtttcgggttcacacggaaacgggcgtgccatttccgcgcacgtctgcagatgcggtagtcgattggtcaagtctcccatggctcctccttcatcaggaggtgggcaaaccgcgccatgatagggtcgggattggctggctctggaggcgcaggtggtccttcttctactgtcacatggtgcgcgctgttttctaatcacgtggctgccacccaggtaagaagaggccgctcttcctggggttgtttctccgtgtgacgtgtggcctttgagatcaactctcctgtaccagcgtaggccgcatgagtggggggcgggctcccgcggtcctgctcggcggagtggtgagtgaccggccccgccccgccccttccggtcctcgaagcctcgaccgctacccgcaccctaaatcccagaggttggccccctgaggtgtgagtgaaatgagcttttgctttattttccaagtttctctctcaccttcaggggcattcttcgggggtgcatcagagggagggcagagcctgaggatctaagcgaaggcttccccgggtgtaatttcctgggctgtttgtgaggagagatcgaattcgcctcctgctctcaggcctctctgctcctgtcttttgtttggatgccggcgctgctgcctgtggcctcccgccttttgttgctaccccgagtcttgctgaccatggcctctggaagccctccgacccagccctcgccggcctcggattccggctctggctacgttccgggctcggtctctgcagcctttgttacttgccccaacgagaaggtcgccaaggagatcgccaggtagggacctcgatgtgcagcgagaaaggatgatcatgaagggacagttgggggtggggcagaagagtgctgctttctcctttctccagctctggaagcctgtctctgggctgccagtacaaaaactggggttatggggtactctgaatgggactgtctcttcactccagggccgtggtggagaagcgcctagcagcctgcgtcaacctcatccctcagattacatccatgtgagtcataggagttggggggttaacctaactgtaggagctgactgggaacctctttcctgggggaaattctttgctccccacaactctccccctctgacctttcagctatgagtggaaagggaagatcgaggaagacagtgaggtgctgatggtgagaaacatttcccccacccaacaaaatatccccaatccctgacccctttagcccttacccctcttctgagaaactgaactcaatcccactccttgattcaaccatgtttatctttgtcccttagatgattaaaacccaaagttccttggtcccagctttgacagattttgttcggtgagaactttgagatggatggggtgagggtgtgtactgtgtgggtgtgacttgctgggcagtctagggcttgcgtgtaagggagtgggttcttttgggtaaatctttgagtgatccccttcccccac

SEQ ID NO: 10950 - DNA, 6000 bp, Homo sapiens; identical to SEQ ID NO: 1212

SEQ ID NO: 10951 - DNA, 6000 bp, Homo sapiens
aaatctgatacttagtttaagatccgtagctttcaaattatagaaaatctaaaatacagggtataaaaccttggaagttaagagagcagttagtgaaatatttcaggtctggaaattatatgctatcgacttaatttaaaacacactcacggtgtaaattaaagctaaaaagtatctcttcccttccttttctatgtggttccatatccttacgaaaaccatcgtgtacctcaggccataaatgcagataactagataactccctgcaagctctctaagggacttttaaaacacagtattcgcaggaattatctcaaaaaatatttacaatacctcccagcactgttaataactttttgatcttgagggcgccttacagatctgaatctttcttgctccaaatgagaaaattgttttgtcgaacaatacttaaatgagcagtggtatgtgactaatcagtgagcctgccagtttctcaagctgcagtgttcttgcaggcactaccaccgccgcccctccacggaaaggaaatacgctttcaaccgaatcggaaacacaccactcaagctggcacagtgctcaccgagataaagtcggtattttaagctctatggatcgctgttaattcaagtgcgaattcaaaaagaacgcttttcaagatgggatttcgacagagttttgaaaaaaaaaaaaaaaaaaaaaggcccggagagagctcccttcctggtcagttttgttcagatgaccgcagtcttcgggttgggctgtgcccttctgcttctcccggcagttccccgagcttgtctgctcagaggacccagggtccggagccccagcgtgggcgcatcacgggagagggtccttctgctccaggtaggcagggagacccccaaggaagcggcccttcccccggtgcctgttgccgagcagcaaccctccgagaggggaaggcgcagggtgctagccagaaccgagctccagcaccaccacctacctctcgcagcggacctgagtgctgcacacggtggaccgcatacctgcgtgagtgcagggcgaggggtgctggaggtgcagaacgggcagagctcgaaggggcagcaatgccctcccccgaggaaaattcctgccacttgacgcaacgctgagcagtggagcaggcctggccctcgggcgcgaggggccaccctgcccacagcggccccaggcccagcgacactcaccacacagagccataggcgccagagcccactggagacaggttctggtaacgctcgggcacctcccagattgtcttgttcagctcctgccggtagaacgtgggcctctcctgagacattttccagcggcagccgccgggcaagaaggtggccctgtggggcccccgcctgcacccgcaccctctccccggcccttgctgcccgcccagccgggcggggaccttgcgctggtcgcccgcgcaggtgcggctgccgcgaccccgcagactcccgcgcgcgcggctgctgtcagccgcagcggctggatgtgcccctgcgactggggcaagccccgctaagggcagggacgcgctccggcgctcaagactgcgcccgccgcgatctccctgcaccttcgcccctacaaggccgactccgggctgcgtcgcagtactcccgttccagctgctgcgcccgctaaggctccagtggtcgcggttccaagagccagcaaacgggagcctcccgcagtactctcgcgagaacagctcccgggactctccgagagccgagattttacccaatatggaacctctccgcgggcggggcttcgtgagagaagaggatgggaggagcagttctcgcgagaagagaacaataactggagaccaaaggcagaaactcccagggactgtctccttaagggcgcgaaggcggaccggggaaggaagagagaagctggcagcacacgcctcgcgcgcctcaccgtggccggcggggcaaatacctggctctgtggtggaaaacgacactgacaaatagcgtgtcggggaaagagtcaaaagatctttaactgcgagtagttaccagcagcagagcacctgctcacctgaacccccaaattccaaaaaacacttgcataaaaaagagacaagtggccgggcgtggtggctcacgcctgtaatcccagcactttgggaggccgaggcgggcggatcacctgaggtcgggagttcgagaccagcctgaccaacatggagaaaccccgtctctactaaaaatgcaaaattaaccgggcgtagtggcgcgcacctggagtcttagctattcgggaggctgaggcaggagaatcgcttgaacccgggaggcggagttgcggtgagccgagatcgtgccattacactccagcctgggcaacaagagcgaaactccgtctcaaaagaaagaaagaaagaaagagacaggttccggccagaaggctgttgcattcccatctgctcaaggacatatgggttactctttgagatgctgacgaaatatgtcccaaaggcaaatgttaaccctgcatcaaagctgaggctttccaggggctgggctcagtggctcacacctgttatcccagcactttgggaggccgaggcgggtggatcacgaggtcaagcgatagagaccatcctggccaacatggtgaaacctcgtctctactaaaaaaaatacaaaaattagctgggcgtggtggcacgaccctgtagtcccagcttctcgggaggctgaggcaggagaattgcatgaatccaggaggcggaggttgcagtgagctaaaatcgcgccactgcactccagcctggcgtcagagggagactccgtctcaaaaacaaaaacaaaaacaaaaacaaaccgaagctttacattaaaactctcccagttaaacttacatgcagaaaaatcaccctgggagtttaagatgcaagttcccagaactcacagggagtctaattgggtaggtcagaggaggtcttgatcaagagcatgcatttttataatacatcttaggtgattctgattcaggaaagtctctgatatctccctttgagaagcatttaaaaaaccgttacactgaagatttgaaactgactcctatcctgaagagccatcagtgaagaggattttaagcatttaactcaggcctcttcgagtaaggagaatagggcaggagtctcatcgaatttaggcaagtcaactgacctttcctgaacctcagttccagcttctacgagagaattcctgccctgcattcccgactaacagagtcatttgtaaaaaccaaacaagataaatgtgaatgggcaaggcattctaaccccatgcctacatccattatcaacctatgcctatgctaaagcttgttacaatgagcagaagaatcagatcctgtctcattctcttagtttcttgtattagaaataactagatccaagccaggacatttctcaacatttcccgtgattattctattttgtgtcatacacaccttggagggctcagactttgcatatcttgtcccaacatctagcacaatgtctagaacataaaacatgtgtcataaatatttgttgaaaaaattatgaacagtgaccatgatttcaagtggtacagtatcctcagtcctcttcaaggaaagcaatataaaaccaaaaaacagatagtcatgggtgattcatggaaagctgttttggatccaatgtagcttaggctggaattctcttatctacaaaaacatgttgcttgagaatgttccaaactagggaggataggaagctttctaagaagtaatggagggtgaaggggaagtaagagcaaaaacatgattgtgaagacatgagggatggggttggggggatcaagggaatgagggaatggttacaaagggtgaggaggaagcttggaagtaggaatcctcagaaatgcacatttttatcctacaaattgggatgatgaggtgagggtgaatgaaagggtaaagataaagtaagcagtatattcatacactcattcaaccaatgtgtattaaatgcctactaggtgtcaaacacttgcagtttaaaagtgattaaaaactacagttgctgccggtgtggagcttacaatcaatgggagggcaatcattcaacaaaaattaattgaatacttcctatgtccaccacactgctgtaggcactgataataaaacagttaatgaaagggataaaagtccttgccctcataggggtaagatgatttacaaaaaggaatacataaagtgcattataaggtagacattaacacagtcatcaaacaaacaagtgtaaaactgtaactgggccaagcaggaatacaaggtggagtgagagacagtgctagggacagggatagggtgggaggagggtaaagggagtgagtgcagatggcatgtctgcatccagagcagatctgggcaggagggtgtcattcagtggggagagccgggtttgtggggcagacagcctatggttggagacctgggtgaccctcctagcctccatttctttttacctcttctgacctgaggaaggcttaagtcttccggagacgttagtgaattaccgtctgtgcagtacacatgtgacacatgtgcactgctgtatgttcaggacacgaggcctggcaccaaataggccctcgatcaagaatagcaaaacctcggagagagaaggagccttggtatacaggtttaccaaataccaaggggatcccacgactcaggtatgaggagggcgacccaggtaccactttcctggctccctagcccagctgctcatgctcctcttcctcgtcccctcccccactctcatctcctcagcccgcccggaacgcccgcgggctaggccacaacggctcgggaaccgccgccggtatccgcgtccgcagcgccgccagccaggcgagagccgtgtgggatcccagcgcccgcactcccgcccccgccaaggagccaggtgagccgctgctgggagacgcctgggcgccgggggctgcaggtcccagggcgggggctgcgtccgtcaccggcaggtacccaggtatgccgcagagccaggcacgccgtgggcactcagtcagtatctgtggaatgaatgaatgatggtcgtccctgggagcttatctctgaggtattgtctctactttcaaaggccgtgtggatggcaatgacaagagacaacagtgtgtgcgttttgcaagctgcatcctttcaaattctcctgtctatattgtcaaaagccccagaactgacgtgctacctgcaccccaccgcctaccccatccatttcctcctgaggcctgactgcccggccgttcctcttcctttcagaccccactgcttttgttaattttgttccctgtgactgaatccccacccccacctccttgcccctttcttttcatgtcaaatgccgttgatgtgtcaggggccccgtgaagccttctccagcacccccaccccaataatgagcatctctccaacacaccatgttactctatccacattgcatggaaggtggttgtcctatgtttatgtgtccaatggtcatccgcttaaggactgtcatcttactagtcatccctagccactagccagagtgactaaaggatctaaaggccaggctctttgcttataccttttctgtattcccaatacattctccataaaaacctaggtagtaacaggtgtagggttgtttctgatggaattacaaatgcttattttgaaaattcggaagtaaattttgcctttccgtgattatagaaaacataagaaagttaacaatatcagggggaagatattcctgcaactaaactagctttcaagatttcatattatttgggtcaatagctaaaaaattggattgtatttaaactttttattcttgacttttttttttttttttttttttgagacagagtcttgctctgtcgcccaggctggaatgcagtggtttgatctcgg

SEQ ID NO: 10952 - DNA, 6000 bp, Homo sapiens
aagtctcctatcagattcattattattttaggatcggcttcaagttcttaacttggcctctctttctaacaacgaagggcctggaagactcaggtaatttcgattttggccagacgcagaggctcatgcctgtaatcccaacacttttggaggatgaagtgggcagactgcttgagcccaggagttcatgaccagcctgggcaacatggcaagacctgtctctacaaaaaatacaaaaattagccagggctgggcacggtggctcacacctataatctcagaactttgggaggctgaggtgggcttgaggtcaagagatcacttgaggtcaagagttcaagaccagcctggccaacatggcgaaacccccttctctactaaaaatacaaaaattagctgggcatggtggcatgtgcctgtaatcccagctactcaggaggctgaggcaggagactcgtttaatcctgggaggtagaggctgcagtgagctgagatcgtgccactgcactccagcctgggcaacagagggagaccccatctcaaaaaaaaaaaaaaaaaggtgattttttttttctcctgtgcccgagctctagacacacacacacacacacacacacacacacacacacacacacacacacacactgaccaaagcttttttatttttcccccataggtttgtgccaccaagcccagataatttttttgtgtgtttttagtagagacggagattcaccatgttggccaggctggtctcgaactcctgacctcaaatgatccacctgtctcagcctcccaaagtgctgggattacaggtgtgagccaccacacccaaccagatcaaagcttttcaatttcagtttcaaaaactgaagcaaggagagaaaacaaaaatgatagctactatcatcgtaactatccttcttataatagctaatattattgtgtacctcctaaccaattattatgtattatctcatttaatcctcataacagccccatggagcagatactctgtccctattttagagatggggagactgatgcattgagaggttaattaaatcccataagatcacatagctagaaagcagagctgggattttaacctaggcagtcagatttcagagcctgcatttttttttttttttttttttggagacaatctcttgctctgttgcccaggctggagtggagtgacgcaatctcagttcactgcaacctccgtctcccaggttcaagagattcttgggcatcagcctcctgagtagctgggactacaggcacacaccaccaagcccagctaatttgtatttttagtagagatggggggtttcaccacgttggccaggctggtctcggactcctggcctcaagcgatccacctgcctcagccttccaaaattctgggattacaggccaccacacctgccaaagcctgcaatggtagagattgcctcttatcttctaggcattaatacaatgaccatttgatgtgctaagtaaatggggctcatgtgaataactgagagaacttaaaagatgcttagttccaccaagttactacatgacccagcaattccactcctatttatcagcagaagaatagaaaatatatatccaaacaaaaacctctgcataaatgttcataaaagcattacgtacaatagcccaaaagtgaaaacaattcaaatatccatcaactgatgaatgaacaaaatgtggtgtatgtatactatggaatattattcagccataaaatggaatgaagtactgatacatactacagcgtggacaagcctgaaatcactgtgcttaataaaagaagccactcacaaaaggcctcagatcatattactccatatatataaaatgtccaaaagtggtaaatccacagaaacagaaagtaggttagtagttaccagggtctggagtggggtggatggggagtgactgtaaacaggtatgtagtttcttttcaggatgatgaaaatgttctgaaattagtggtgatggttgcacaaaaccatctatactataaatgaatatactaaataccactgaattgtacactttaaaagagtgaattttatggtatgtgaattatatctcaataaagctgttatttttaaaaagaatgtttcattcatttgcaacttcttttatttaataaaatttctatttgttgtcactaagattgttggatcatgatcagacaaatggaaagaaccctgtcatcgcttttatttttcacctttcaatttgcaaagaagagtaaactagtttcatttccaagtttgcatgcatccagtagagtcatttgtgtcatttccccacccaggagaaagtttttcttctctaagaccgaaagagtacagatgcaaaagttctattcttgagaaaatgccctaacattttctttaaaccaaagtacctttctatctaaaagaaccttagttttctcctatgaccagaggcttgtgggcttcactgctaaaagcacacagctgaacagtatttctctttaccaagtaaggtactaaaaactattatgaattgtgacaatatttgaataccttaaacaacgaagacaatgagctggggtaaggatctgagtaacattattttaaatgtttacttgctgtaataatgacagcaatgttaataactactgtttttttgagcaactataatgtgctaaataaacactgtcctaggctctttacaaatagggtatttcacttagtccccacagtaactctgaggaaagtatttttatttctcatttcataggtaaggaaattgaggcctagaaagattatttgtcttggtcacacacacaacagagcccaaatagtaacccaagtctttctgaactcgaaagttctctatttctctatattcttcaaaatgaaaaaggaatccagaaacttgaagaaactgaaaagacttctcttcctatctcagaaaagtagtgctttaaaaaagttgactgttcttatagccaaatacaggaaatataggaaaaaaagattgttaatagcaaccagcagtcagaaggcacagaagcccatgccacgtcccacatctcttacactgcttcctgatacaacagtcttcctattgattatgattataatcttaggatgtcaaaatttaatgatctcactacggaaaaccccagagaatagcagttagcacaactagagagctcactagaccaggaaggaaaaggaatcagttggcaggaagtgtgcttacctaaaaacacagaacatctttaacagtaatattaacactgttgagtccacagcactttaatctgaagttatctttgcattcctttctattactttaataagtattactaaaagctgatttccaccctattctccatatgtctactagaatccttaataaaataagactcttggtggggcatggtggctaacgcctgtaatcccaacactttgggaggccaaggcaagaggatcacttgaggccaggagtcagagaccagccctggcaacacagtcagaccttgtctctatttcatttaaaaaaaaaaaaaaaattaaggctcttacctagccactactgaccctcatctctctctcgcttaaaaaaaaaaagtcacgagttcaaaagattatcccagaaggaaaaaacctgaatccattagaaaaggtagcacaggggacacaaccaaacatgaatttcatcaccaagtagactgtagctggcagaaatcttaaatttacgactgaaatacacactcttccttatacttctcaggactttgcccaaaataaactgaaacagtaaaccaacagtagattgatggatggataatttgccaaaagtctcaacatacaccgaaaagagggtgggggtagtcttagggggtctgctctccagttaaacaactgaagaatgaacgaatttagtgcatttgcacaagaagtgcattacaatgcaggggaggaagaagtcacttggggttggacaaatccttagaaaatgccaaaggaataaccctgattctgtggtcgtcttgtaataattcctagtgggaaagggccaactcaagataaagtaaggtcagggttgagaatcgtcctcacttttcctgcctaaccctctcggcaggcggccccaaactcccaccggaatccttcgggtaagtgccgacctcagggatcaagggaaggggccatcctcgagcgaccaaccacctgtgcgtggtggagacccctgagagggagtcctaattagagtgggaagcagctctggggaggaacttccgagaccagggccgacactgactattcacccaactccactcccctttacgcccaatcttcggccaccttcccgctgaggtcacccctcctgaaacctccgcccccagaccccggtctacacccacatccagccgtccccaaagctcgctgttcgcttcgctgcctgacagctgccctgccgccaccaggcagtcccagcttccccaaaccagtcttctggcctctgtggcgccccaggcccgcgggattcagggattaggatctggaagggtttggtccaatcccctatccctctcagcgtcctgggctcacctccccggcagcttagcgctcctcttccaaaactgcttgctgttctcagcggccattgctctggccgggggaagtccttgtaggcgggccaagggtttgcccggcgagatgcccccagaccccgcaatctgagggccaacccaggccgcttccccgccgccggtcacccgctcccagctcctggggacgccatcttggatgtgggcacccctccacccagcaccgctgccattggtgagctgcgcaagccgtggacgggccgaccaattgggagccggaatcctgcaggccgctgaagccgaccggtaacgtcaggggctgggcacacaggtggacggggaaggcggagcttggacgagccgagaggcggggctcaaagttcctacccgcgagagggaagaagcaggtaaggtaagggacctatgggaaggaagaggggattatcttcttcgtgaggaatgaagttccttagtctaatatttcttggcaagagagaacatactatgtatttatatataggaatctttcacctaaaagtaagggcccatgtgttggttgtggcccatttttaacatctctcaattcaatgacactctggttattaccctcctttcctcattccgtttacatgtccattcgtttttctgaaggaaggtcagcagggacccgatagcccgggattgctaactgttcaacacgtgagcaacggttcatcagagtctccctctccctctgtttattgaaaacgattgaaggacttgtgctgtgggttaaaaattcaaatgatctaatccctatgtcaatccataactctcactttctgactatgctaacagtgtatataggaaatggtttatgatagctgtccaactcagattaccaaataccatttctttgaaggacacagtattgctccatcgtgtgaatcacaaagttaaggatgtatctcctcccggccccaccaacatccttaatttcccttgttaatctattataaatcttgcacccttgaatttattttcaatctaattttcccagacaatgagatttagtattagcattttgaatcctttgaatgtcttgtcagcgttttttgctggttttgagtttctgtggttgtattccgtggtgatttggggaaagagggaaggcgggcaccagtccagagtggtttttgtcccttcgaaggactgttgaggtgggctgcgtgtcccccacccccacccccaccctccatttacagctaccacatgtacttccacatattggagaatacttaaagacctgacccctggccccagccaaagaaggaccttcttttatatgtcctccaacgacggtttcttcattactcccattttcaagcttcttttgtcccctaatt

SEQ ID NO: 10953 - DNA, 6000 bp, Homo sapiens
acccaagacactcctaaaaatatcaaacaggacagagcaatgttgatccatttcttgaccctttttgggtaagggtgaattgaccagctatgaatccagttaattgtagattacatttatttacctgatacaaggaaacaccaggtccagatggttttactactaagtccgaccaaaatattaaagaaacagttaattcctattttgttcaaactgttctagaaaatttgggtggggggtgtggaagatggaggcacacttcagcttatttcataaggctagcaaaatctatctaaaattgaggacagcacatgaaaagaaaattataggaaaatctcactaatgaacaaaagatgtaaaatttctagaaaattctcaaactgaatttagctttgagttttatgttttataaagtgatttgagttttatttattccatgaatggaggatgatttaacaacagaaaatcgattactataccccaccacactaatagattaaaggagtggggaatcaagaatgagcatacagggacacagggaacttaaaatgttcttcttgggtattgggtatgtatgtattggttagcatttgctgtgtaacatgcaactgcaaaatttcagttatgtaaaataagcatttgttttcatacattttagggtaagctgggggttagctatttgaggctgtgctcagttgggcagctcagctttaaactgcaagtctctgggtcagccaggtgaccacaacctagatgtctttcattattcttggattagctggctagctgttgcaagttcatctcatggaaatgtggaatattaagagaatttatttaacaggacaaacacacttcaagttcctgctcacgtagtttctgccatcatcccatttggccaaagcaatctgcatggctgagtttacagtcaaggaatggggaagtctactctgccttttacggcgtggatacagataggaatatagaatcgggccaatgactcaattctataacaaggcctgtattagtgcattcttgcattgctatgaagaaacacctgagactgggtaatttataaagaggtttaattggttcacagttctgcaggctatataggaagcatagctggggaggcctcaggaaacttataatcatggcagaaggtgaagggaaagcatgcaggtcttacatggctggagcaggaggaagagagaaggggcaggaaagtgccacaattttttttttttccaagacagggtctcgctctgttgcccgggctggagtgtagtggcacgatctcacctcacggcaacctccacctcctgggttcacccaattctcatgcctcagtctcccgagtagctaggattacaggcgtgtgccaccatgcccagctaatttttatgtttttagtagagacaaggtttcaccatgttggccaggctggtctcaaaccccttgtctcaagtgatccacctgccttggcctcccaaagtgctgggattacaggcgtgagacactgcacccagccatgccacacacttttacacaaccagatctagtgagaactctatcacaagacagcactaggaggatggtgctaaaccattagaaaaaaactcatgatccaatctcaccaggccgcacctccacactggggattacaatttgacatgaaatttgggcagggacacagatccaaaccatatcatgtgggtattttatttataacttatatgtatgacacatacacattatatatgttatgtatatggcatatacattatatatatgtaaaatgtggcatttacaaaatatttcataataaaaattaatgaaattcacacattaagcacattttggggacccttcttatttactagtctcataatcccgtccaaagaggaaataaagttggcttggcaggagttgttcttcatgatggtctctttcatcttttcttttttctattcttttaacctcttccaaaaaggatttaaagaggcttacaaagcaccaagtaaaagtaaattcataataaataaaacaaagcaaaaagaaaataaggtttccaaagcaagacagagcaggaaccacattagctctggcctggatgttctgtttgcctcttctgatcctctttccacccttctctacctgttctatgctccctgaagggctcctgtgtctccttgcttctcctatagctacagggctcactgggttctgataactgctctgtcctcctgatgctttgggcctagagacaggtagcacttcctgtgaaccatcccttgctggcttccttcatcctgccacacctttgtaacttactccttcactaagcccttcttacttcaccctttggaaggtgccacgtttcctgtcagggaccctgactgcaaccgcccacaaattgtatgccttaattctatacacctgcaagatgcgggcctaaggtcttagagtcattatcaagtgggagacaaaatcggttaaagaatcccatctctcaagagaagcagacatactcctgacaccaaaatgggcaagaaatttcctcttgtggtttctcaaagagaggacattgtggtgtaataatcccattcttttctcttacaaaccatctctaatccactcagggctcagccctcaaatctcttcttatccacactcactgtttgatcttatctagtcttacagctttaaatatacacatgctgatgactcccagtgtgtgcctccggtcctgactttcccctcaaatcattttcactatctaactgcctattttttggatatccaataggcatcccaagttctttgtatgtccaaaacaaaacttccagtgtttattctgtaattctctcctcccagtgtgccctcatttcaatagagggccccagcatcatttgcctggttgctcagggcatgtgtgtatgtatatgggggggcaggaggagtggggtagtaatggaagaaacctgtcatcctttttttttttttttttttttaatagcgatgaggtcttgctatgttccccaggctggtcttgaactcctaggttcaagcgatccccctgccttggcctcccaaagtgctgggattataggcgtgagccacgatggctggccctgtcatccttgataccttttttcctcacattccacatccaatccgtctcacaccatgttggctcaggtcttcaaaatacattcagaatctgaccaattctcgtgacctccatcactaccactctagctcaaactactacagtttctcattctaccatatttattcctaactagtttcccttcttctattcttgcaatcttccagggtcccacctccatcagccagtgtaatcctttaaaaatatgtcatatcatatcatctcctgctcaaaatccactaactgcttcccaccacacttagtcttcaccatggcctacagggccttacatgcacgatcttgcccctggcatctttattttctgtcactctttcctccctccctccctccctctctccccctctctccctccttccctccttccctccctccctccctgcctccctctccctccttccaatccagtcataacagcctccctgatgttctgtgaacaagtcaagcgtgctatttgaggcctcgggacctttgcacttgttcctctgactgaaacactcctgttcagatatctacatacctcactcatttaagtctatgcccaaatgacaaaccttcagggaggtcttctctaatacctccaccattgcctactttgcttcacttttcttcacagcacttatcagtacctgatatgacatgaaatatgtagatacacatttgtttattgtctgtatttccatttggagtgtaagctctaagaaaacaggtttttgtttgttttttcctttcatcccagcatccccagtgcctgtgactttagacagagcaggccctaggtaaacgtctgttaaatgaatggatgactctgttctaatttgtctaatttctcgagtcaccctcagccagatccaacaaatatttgagtcttaattatgtaagtgacacttagctagatgcttacagctttaagaacgtataaaacagcccctaacctgaactgtgtccttttgggagggtactgattgggagagggcacaaggaaactcccagagtacagaaatgttctttctctccatctgggtggtagttacacaggtgcatacataagagcaaatctactgagtcatattcttaagatgtgtattttatgttgcaccccaataaaagtttttgttgttggtttttttaaggttctgacgtatctagacacaaaacgagataatttcccaacgtggcaagaccaatgatggagctgcacagcctgctttgtgagcagtgagaaagtcaccctccaggtactaagattggcataccctttccttgataagagaaaaagggtaagatgtagcctgttattcctctgacgctggaatgtcgtagagatcacgggcctctcctaacccctggaaccatcttctcactgtggcgctgttcattggggcccagcaacagagatcccgaatacaggacgctggatcagtggggcctcgagcccttaagtgagatgcagcaaggcagagcggcctttgggagagggcaatggggcagccctgtgctttagacttggcttgaggaggtgacactgtgtccacgtgcctgtgaagagagaacggctgagtatacacgcgacccgccagacttcacaaacggaggagacgcgggtcacaccagtgcgcatgctcagcaggggcttctgccacgcaggcgcacggcggccggcgcgggccgagcggaggcaactgctgtgcggcctgcgggcgcgcgctcccttatcggccaacggacgcgaggcgcgcgccatggaacagcggttagctgagtttcgggcggcgcggaaacgggcgggtctggcggcccaaccccctgctgccagtcagggcgcacaaaccccaggagagaaggcggaagcagcagcgactctaaaggcagccccaggctggctaaagcggttcctggtatggaaacctaggcccgcgagtgcccgggcccagcccggcctagttcaggtgagacgatggaaacttcggccctaggacctggcctcggagccacagtcgagggcgcggccctagctgccgggggtgtggccctagctgccggaggcggggctactggccccccatcctgatcgagggccggaccgctcatctccggccacacgtgtcagcactgttaccagttttgacattttctttccagcccgcgacccacgcaggtcctgattccagcgagagtcgagggtcctgggagaaagcacctctgctcttaaattattcactccgaattgagttatcgtgacgccctgtggcattgggaaacctctccacaaccaagttgagccacagccctctgctaatggaggagggtaaaaggtctaattggataccgatcacaagtagcagtaattaaaacttcatttgattcgcacctggggcacatgcagctagtagcccagatagcctgtgacttagaaatgcgtttgaatacagaatttaccaaagtgtggtagctgtaactgccggtagtggcagaagcttattccagttccatagtgaatgttcaagacacaaacaaaaaaaagtgatttagtatgataaccttttcacatttaattgttttggtaatctcttgttttgcagatgaatttaatttgcatccttttgtgttttcatttagttttaactcagtaaaatggtaaggtggcttgcagtgaggttgaaatgtctatgtggaaatacaagacaaaacatatcaagggatgagtgctttgtaacaatttgtgcccagtgctttgttcctcataagtgcaataagaactaaaaaattccttttaaaatgaaaatatactggaagaaaagtgtaccttgctc

SEQ ID NO: 10954 - DNA, 6000 bp, Homo sapiens
accaggtaattcaccatttagtggcatcaaggctagcattagagagggtgtcttgttcacaggaaggagcctgggatgtggagtcaaaagatttggtttgaaatacagtgccatcagtcaatagctctaaatgcctggagccgtcaggtttaacctatctgggactcagtgtctttgtttgtaaaatggggataatgatctatttcatgagattgttgtgatgaaaaagggaggtaatatttgggaatgctctttatagactgtaagtcatggtgccagcattggtgtgtcttttctctccaggaggaaactctgccttctccttctttctcttctcctgtacagtatttaacaaaatgctaggaggtacataaatgatattcagcaaagcccgggcacagtggcttatgcctgtaatcccagcactttgggaagctgaggcgggtgggtcatttgaggtcaggagttcgagaccagcctggccaacatggtgaaaccccatctctactaaaaatacaaaaattagccagacttggtggcggatgcccataatctcagctaccccggaggctgaggcaggagaattgcttgaacctgggtggcagaggttgcactgagccgagatcatgccactgtactccagcctaggcaacagaaagagactccatctcaaacaaacaaacaaacaaacaaaaaatactcagtaagcacctctattttgattgattatgatttctctgtattgtctgatcctttgatgcatcaggaacctactcccagacctggtatttgggcaaaagggtgagtctgtgaagggagtcccttgggcctaggggaggggaagaggtaaacagagggctgaatgatgaaaagtaaactggatttagaaaacaaaccagagctaatggctgtaggtggtgttagtcattctgttaaggaatttgggaatacatatgcatactaataagaatttattttggcttcttcttaatccagcatttgggaagggaggagaggtagaagacactgcagaaataaaagacgtcacccttcatctccagatagggcaccctggtgctgggccctcagctcctgaggatgcatttgtccaagttctgtgaggctaaggctgaggcctgtggataaactggggttgggctggctgttggtcctgggggaagctcagtgaacgaggtgctaattcaggagtggctcccagcatccagtccatggaatagactcagtggagggagatcccaagaccttatgaaactgtccaggatctttcttattccccagcccacaaagtcactcttcaggccacagtgagccaagggaaactctaagaagtgtatctagcacaccctgggattacagactgcaccccttctttagtgaagcaggttcaatggtccctaccctgggattccatagcttcaccgggctctgtcctgtcatcaaaccagaatacttcactgcaaaaagccagtctcctctccttttcatactcagtgaatacagagaagagagactcaccatcatccattgcaaaggcgtcttttcattggttataaaggcctaggccaaatcagccttctcttcaggctgagtgcctctctacctcaaaccctcctgggaactcttctgatcagacactgtgattccatttagccagtgagggttgggagccaaccatgtgcccagaagtgtgccaaggggtctggggtttatagtccagtgaacaaaccaagagatacagacaacagggtaaggctggttaggggtgtcaaggagagcaggcatggcctgcaggggaaggcgagtcctgattgggagtggcagggagcccaaactttcttcttactgggggtattgaagttatattcaaggatggagtgctgccttgatgtgcagcctaaagcacaaggcacagtcattctctaccacatcgagacatgaaagggtgtgtgaaaatatccctaagcacctgctgggagctctctgggaaatcatttatctgccctgcacttcagtgccttggctctaaaactgaaacaaaaaaaagtatgtacaaagaaccttaaaaatgttcataccctccagcccagtgattctacttcagggagtctagcttaagcacaaaaacaagaatgtggggaaagacttaggtacaaagatgttcatcacagggttatttagcagaatgaacacgaagaagaatcaaaatgcccattattaaaatggctttcactccccaaccccttctggaatgatgggatcacctctttgggaagccctggctcaactctgaggtaagtaaccagtacaggaagccaggtgccacgttagtgaccctaactcagtccttgtgggcttgttcgaggagccaagaaatccaccatctttcaccttttcatgatccaagtgtggattatcttctggggattttcatggtaaacggtgactgtagattggtgttctcttggcctctcaagatgtatgtggtccccatcctgctccatctgtcaaggttgcttgggggttcccagagctggaaaggctcttagcaaatgcacagtccaaaccctttgaggaaaagggacttgtcacattgcttgttaatacaaagccatggtgagcatccaggccacctgtgccccagcacagtactcaggttatgttggggcaaatgtaattagaaaaataaaccagtaattctcagaattaccaatgacccaggtcttggctcttcatggaatatccatgtttctgacttgagaaaacttcttgatggagtattgggttcactctagagcagagattgatccatccttcctatatccctcattcacatcattctaatgcttttctggtttctaaaagcagctccatttctactctggtgccagcttggtcctatccctgccactccgttctggttgtctcatgggtgactgagggttaggggagataacctagcccactgcccccaacccttgggagaattcaaaggcttgagcccaggctgtggttcttcctaagcctttcttcctgggagctcccgccaatagtaggcaagccctcaggtaagcaaagagtaaggcagtttccctgctgttctcccctccttcttcccttccccttcctcttccctacttgccctccccagtttctactccacacctccttttactcacctcttccttcctcattactttccttctcatgactcttccctacctctatccctcactccctgctcctgagttagatcccttctctccaaggcccaccccatataccttgagtttcatcttggccatgcccctcccccaccaggctttccagaattcctgcagggagaggcttgtcttcaaggatatgcagcatgccagtttggcagtttcccggggtgcacatgtggagggtgcacacatgaggaccagctgcctcggcttctgcagttatgcatgtgtgtagagaggacacagggtcgtatgttacagatgtatccagccgagccaatcctgggctgcagagacacatccacatgcaacatgtgcctccctgtgggtaaccgggacaggtgcacgggatgtgttagccaccaggagagaagagaaggactgcaacattgacattcttcctgcccctggatttaccagctggagtaccaacaggaatctcaaaatttcatttcctttagaaggaaggaaatgcctcttggggagtccagtaaggcagaggacggtcctacctttctggtaactagttgtttatagtgaaccgagaggataaccaaagacgagaccttggccagacctgggtgttctgactgtgagctcacagtctgctttgagtagggtctccgctacctaccacatgccttggacaagtcactttactcttttgggcctcagtttccttatacatcaaatgagggttgctgagaagatcaaacaagtgaagagttgtaaagatgctgtgcaaacacttggcgccactgcacccttcactgattcttgtaataatcatgaaaagtcaaagtgcgtgtgtgtgcgtgcacggggcgctcgttattcataggtcccttaccaggattcgagaatctgaactgggccccaggactgggtgggcgcgatcgccccagcccccactcccagcctagggccggcgcggtcgggttttcctccagcaggcggcgggctgacggctgcagggcgcgctaggcacgtgaggtggcagcgccgtcgccagctgcagaggtgcagccctggccgcccggctcgccttccgcaggggctgcccgtgccgctggaccgcggagaccgccctcccggttccggggctcgcggcctgcccacctccctccgcgactgcggccccagcccactcccgccccaccgtgcgtccccgcgccacccctgccaggaccgtgaatccctctggtttccgcggcggtgttggtcgtctcggaagcgggtgcgctcggcagcgggcagggcagcgggcgcagaggctgccttcggctcctgcagctccgcggttcgccactgggggctgccgcgccggagagctcggcggggacggtgcgcacggccgccgggttcctgggcgcctctggccgctgggttttctccactgctggccctgcgctgtctccgcagcccgcccgactccctcccagattggagcgtgtgatccgtgtgtgtgtgtgtgtgcgtgtgtgtgtgtgtgtgtgtgtggagcggagagagaaaccgggtacgcgcgtatgcgcgcgcgcgtggggggcagtgtgcatgcggggagtacgggggagtgtgtttgtgtgtgcgtgtgggtgtgagtgcctggctccctctcgctgagacacacatacactcacacatacacaacccggcaggctcgtctgaacttgaagacaccccacattccaagatgcccgaggttcctgggaatgcctggggttcttcgatccggaaaatcctaccggcatcctcctagggagggattattattattatttttctttaatctggaagagaagagaacaagttgtgcttttccccccttcttcttgctaaatgccatggatataactgaataagcggctcagggctttccccgcgtggacgtccgaggccaccatctgcctgcattcgccggagccgccggagggtttagctcgagtctgtctcgggcggggaaggatgcgtggccgagccggggagcccgggcgccccgcggagccggcctcggtgccacccagccgggggtagatgctgcctcgcccaggtgagtggtcgccggcgctgcgtctttgcgatcccgggtgtccgcgggagctcggcgcggggctgaacgcacccgagggaaccgggaactttgcatccctttctttttctcttgaagactccccgcatcctaggtgctcatgcggacacccccttctcttttcgcccatccttatcgcgagagatttcctttcctttctttagtctttatttcctacagtgggggtgaaactctggcggggagcggggagagccgggtccatgtgagactggagagccggatggagagacggggagccacgggtggatggaaccgttgaaaacagcaggagaactttgccgccagaccactctgttgcatctccgcacatgcaaggcctggctagagccattgctgggggctaggtgggggcgccggggactccctgagctctgtggactgggtggggtggggtaaagccaagtgcggaagggttgatgcagagcggatgggaggaaggaaggcatggttgcagtttgtgggggcaggtagggcaggttcagggaccctatgctggcctcaggcagaaagcagatcagggggattgtgtgtgtgtgcagcttggggcatcagaatggcatgatgaagcaatatggaaagtggcattagccatgcctgggttcctaggtctctgtctcccacccagccctgccctggttctaa

SEQ ID NO: 10955 - DNA, 6000 bp, Homo sapiens
agcaggagaggttccctatgcttccatctcagccctatgatgcctgcgatgtctgcaccaggcttagcacctgggttcatctcatttcctgagttctcatccagcccttcccttggtctaacatcctgcatcacttcagttgggcccattggctgctgctagactggcctgctgcctgcctgagacctagtccagtgccatcacacactcgcatgtacacacacactccccaggaggtgtcctggcttggagaggggagtcattggccctgaataggaaccgagatcttcaacttggaaaatatgaagtgttaaaatggaagaactgcctgagctgaaagtgtcagaggatgatgcaacaaatacaaagagagagatgggaagaagggtcaagtctgagccagatcagaggcgggataaagattgggacttgaaggcaggggtttggatgtaggaaggtaggataaagtaaaagcagaacagaatcaaagaaggaactgggaaagagaagtcttaagtggctgcttattagtgaatggcatttgtgggctcttatgtttgtagtttggtggccccagccaagggtggaatggacaccaccaatcacccctttaagcccagttctcaggcaaggctttgcaggggctgtcccaggttgggctgacaataagcctaatcaaattggagttattccagctttgagaggcctgttcctatgtcggctgttccagtcacatgcctccccagcctagcacaggggctggcactggccatggtcctgaccaacacctagtgctttcctggctgctcaagctggctgggtgcagatgggaagataatggaggatctgatctgaaaggtggtgaggatgctcatacttgaccgtcttgatttactcctagggagaaaggagaagagagagtgaaagtgtgtgtttgaggagagtgatgatttggaacagctactctagcctccaggagttctgaagaggatgaccaggcagctgtgaggtctcagttaaagttagacatcaggagcatgtcatgtgtgcagtcatgcttctggttctgaggctttccccagcaatggtcaccatcatatctaggaacacaaaggctccatggttctgtaacaccatgcctggcacatgaatgaatgcatacatcggtgagtgaggaagttcagacgtaatgacagaaggacataaactctgtgcccagatgtgaggtggaaggtatctttgaattcagatttagcaaagggaaaagaagaatcctgtgcttgggagtgcgggtggtgcagaactgttcctgtgctcaaatataggatcgagggatcaggaaaattaacacaagtttaaagaagagcctttgatgtacatgtgctgtgagtaattggtaaggatttcttggtgccttcgcttttccatgaggtttaaagaccttttcctcatgtgggaaggagtggggacatggggtcaatatgcagcttaaatggaccagaagataagataaaaacttatggagcttatgagttatgcttctgcctaggaaacagaaagctagaatcatgtaaaatagcaccccaaatcataaaatatttaggtagaaatttaacaatatatgtgcacgatttgtatgctgaaaactgaaaacactgatgagagaaatcatagaagaaacaaataaatggacagctgaactgtgtccatggcttggaacactcaacagtgttgtctatttccctctaaaactaaaccatagagtcaatgcaatcccaactgaaagcccaacagatttttgggggtgagaagaagaggattagaaatccacaagctgattttaaattttacatggcaaagcaaagtaactagaagagtcaaaaccattttgaagaaccactgtttgattttaagacagtgtaaagctacagtaagttatcaagacagtgtgatattggagaaagaatagacatatagatcaacggaacagaacagtcagaactagacctacatgtcaattgattttcaacaaatacactaaggtaattcaatgaagaaaagaaagtcttctcaacaaattatgctagtacaattggacattcatatgttgaaaaaattgcaaagtgcatcttataccacatgcaaaaattaatgaaaaatgaatcatagaccacaatgtagaacctaaaactataaaacttccaatggaaaacataggagaaaatatttgtgactctgagatgggcaaactttttaacagagcacagaaaagcacaaattgtaaaaagaaaaatcaaggaattggacttcatcagaaataacatctatccatttaggctgggtgcagtgactcatgcctgtaatcccagcactttgggagtctgagccaggcagatcacctgaggtcacgagttcgagaccagcctggccaacgtggtgaaaccccgtctctactaaaaatacaaaaaaattagccaggcgtggtggcaggtgcctgtaatcccagctactcaggaggctgaggcaggagaatcgcttgaacctgggaggcggaggttgcagtgagctgagatctcaccattgcactccagcctgtgtgacaagagcaaaactctgtctcaaaaaaaaaaaaaaaaaaaaaaaaaaaagatgctgctaatgctgctaaggaaatgagaaaaaaagttacagactagaagaaaatatttgcaaatcacatatctgataaaggactgctatccagaataaaaagaattttcacagctcaataataatgataataataaacaattaaaaatggacaggacaaaagttttgaactaatactttgctgaagaaggtacagatggcaataaacaacaaaaagatgtccaatatcgttactcactagaaaaatacaagttaaaattgaaggagatatcaccttaaacctattagaaaggctttttaaaacctgacaatattaactgttgacaaggatgtaaaaatggtacagcctctttggaaaagactttggcagcttttatagacttaaacatacacttacatgtgacccagcagtcccattcttaggattttatccaagggtaatagaaacatatgtccacacaaaacatatgtacatgaatgtttatagtggcttcatttataattgtcccaaactggaaacaacccaaatatccatcagcgggtgaatgaatacgctacttgtggttcaaccatagaatgaaagatggtttagcaataaaaaggaatacattcttgagaagtgaaacttcacgcatgctgaatttattctgatgagtgaataaagactgacccaagaggctacatactatttaattccatgtctatgacattttaggaagggcaggaagctacagaaacagatgtcagcttagtagttgccaggccctggattggagagaaagagactggctaaaatgggcacaaaggctctcgcttaagctaaatgaaactttctatattatggtattgtgttacacagacatggtgattgtggtggttgttatagagatgcatgagtttgtcaacatttacacaactagacatttaaaaggggtaaatttttgtatatgtaaattatgggccaataaacctgacttctagaaaaagaccctagaagagtacctacagagtgatcttcaggcagcctcagacttcagcccccaggcccttggggcaaggccgggcagttggccctttgagtggaggcctgtcttctcctcactatgaattccccatctccaagcacattccctgtccgtaagttagatgcacagtaaatatgagtaaataaatgaataaaagaacaaataagtgagtgtttgcaggaaactaaagtagaccctgataatctacaggctcctgcaggcttctccagcctcttctgccactcccagcacaactccatttcccactcctagaattgactcaagcctcctccatccaatccccgactcactgggccatttcacacttttgtgcctttgcacacgtgggtccctgtgcttggatcaccatgggaacctgtacgtgtagaaaaacacacccctacccccagaactctgagaaatatcctgtcctgtcctgtaggataggatgatcaggagttcaagcatgtgtgtgcacaaaataaacaccagtgtgagcatgtgtgcacaggagacacccaacagttccaagaaggctaaacttgggcagaaaattccaggtgggagagaaaattttctgtcttatggacagcccatttcccttttcccttctaactaggataatggtaatagttagtatttgttgaatgctgtgtgtcaggccctactggaaagcactttacctgtaggaacccatatggtgctcctgataaccctttgcactatcattattcccactgtatagatcagggaacagacacaggtaggttttggatgtgtggttacacacccagaaagtcaggaagtctggctccagagctgtgtacttaactgctgccacactacaggaatgacagccctggggggatgaactaagaggtgctggatgagggtcctggcctctaaaggcacagctgttctccaactcttgcaaggctgaaaccagaagatggcgggcattgcagctggtggagggtctgaatacagctgtgaggatagtgatccctgggctaggctctgcaaggaaactgagcagtgcagggccttaccagccccaaccatctgggggccaccctggctggcaccagcaggagggtgggctggcttctcagaggtctgggagactcagcctccttctgccagggctgcagtggccgactcctcctcccctctgtccccaccctgcaccgcctccagaccccagtcctgactattgcttaatccccaggagcccagttcctgtgggcagcgcctgacatgcctgatcctctcttttctgcagttcaagggaaagacgagatcttgcacaaggcactctgcttctgcccttggctggggaagggtggcatggagcctctccggctgctcatcttactctttgtcacaggtaggatcccctccgtgccctgtgatgccttctctccctcactttgagcatgtggttggggcgcgggtggtgggccctggggtgaattatgaaggcggtggcagtcctcgcatgcctgagtgccctgttctgcactcctctcctccccaccctgcccatattcttcacaccctccttccctccccagtatcaaaacctaccctcagactctttctgcatgtggacatgtaaggggctggtggactctggttgcattggaagggaaggagtgctaacagtggcatcccaggcactagctggcagttgggggaagctttggggggcactggcactggtaatagcctctgaaattataagccactaattatgagcccctacagttataaaggaggaaagaacctgaggatgttcatctgcatctttggggcactctctcccctgctctgaaggtccccttgtcctcagctcttgatgggaggtgaggagcgtagagatttccgttgctgagttgaggggaattgacacaccaaatttttgtacacaattgcttcttcccgctgaggaaagcgcaccttttgctcccccagagcactggacaaacctgggcaagaggagagacggtgccaaatggagtcttgttcctgcagcttcttagatggtggtcagggggaaggcggggttctgaggcatggatgggaggtggtcagatgggagagggccacggcccatctggtctctctagttccaaaaggcaagccaccaacttcccaatcctatctttcaagcctctgtcacagtaatggttgaagatggcaggcaagggaggaccaagagagaagtcaaagcagggggctctgggggctgccccagcaacaggctggtgctctaagcccatctcccccgccctaaggagggttcccaaaatagcagcctcatgtc

SEQ ID NO: 10956 - DNA, 6000 bp, Homo sapiens
agtcctttcgcttccaagtggatgccgttttgattgctgtttgtatattattaaaatgtttttatattaaaaatgtttggttggtctgaaaattaaaagaacttcatttaggaaaaaatcattaaaaaacatctgaggatgtttttttaacatctttcttgtgaaccacggaagggacgatactgagcagaccctccaatgcaaaggaaatagactgcagcactgactggcggactttgggtaagtggggtgcatataccgggtaaagaatgggattgggttagaggcccaatttaaaggagttagagtctctcctaagacatagtgggttacagccccctcttaataaaaggcaagaacgcctgaccaactgggttagaggcccaacttatgagggttagagtcccttctaagatttagggggttagaggcccctgtcggtaaagtccctcttggtaaagtcccttttggctaagaacgaatttagcactatgggaattaattgctgttctcttggaaataatctgctttgcactctttgctgatggctgtgggtgacagggttaggcatgtacaggatcagggggcatggggagcattttccttcctaaaaaggggaaacttgagagctgatggcactgctggaaaaaattccttcatgatcagcaagcggctgcccgaacttttcagtgtcgctgcaatgggtgtgtctttctctggcctccctgagtgccttcctcaccctgccttaggcaatcctttctcctctctctctctgtgcaaactggttgaatgaatggtaaaaatcactgtttatctcctctgtaaagttttgattaatggaagaattaattcatgaagctagtcttaagctgtagtgaatttggtatgttttgtgtgtctttctgtgttctataatgcagaggagtactttaggatagaacacaagcctaagacacctacctgtaagcctgcttttcaagacagcccagtaaaccagtcagttacaaactttgctgcaggttcctgaaaaaactggatgagatttccttcctgtcttgtatgtccttgggagcttgaccttgtaaccatgtggccatgttctcttttcacaatggcaggctgggttcagggtttgattcctggcttgggtataagtcctctatcttctgtctatgtatttatatgaattatgtgtgtgtaatataaaatagctagattaattggtttaaaaataagtgcttaaatcaaatattttgtcaaaaaagttaaaaagtgtaatgtcttttggttcatatgacttaagtaatctttgggaaataaaaacagttttaaagattattggtaaaataaaaatattttcaaaaatgtaaatatttggtctaaattatgcaggtcagatattaagtttcctaaatgctttaaggtcataaactgcttctttgacttttaaaagttgttcaatttattttggagcattgattctagataaggcctggggacatgtgaaattagccatgccccctagctatgctaagaaagttcttcataaaatgccactgtgattcttaactattcaacttgtctgctttactgctaggtgaggcctcagacacgtggagtgctcttgtttgactgtgtgagtgagctggttattcagtcatcgtctctctgattaacacttctttaccttggtttgagtggagattctgaaactcgctttgtctttgctggctggttccctgctggactctcgataggggcattagagggagattgggaggctggaggaggaagacaggacatgctcactgattcctatttcattctctttcattgtgagtagcctcagtgatgcttttcacgggcaacagtgactggttccagtttgcagttttccccactctcagaagtagtctcattgggcctcctcagagatatcagcaccagggtcacactatcctcagagatctgtgttccagttccatgtgggcccctcctctgagccagaaaagaagatattttatatgcaatctcattgttaaaaaatgttacacatatattctagctaggttagattaaccaatctttattaaggaagaaactgctaatttaccccatagtgaagatcgagacctactgacttggggcagtgacttattgaagacaaaacaaaacagaataatattggtattatttcattaattgtatcaatgttgaaactgtattgatttcataatagctctgaagatgaagtttggcaaatatggaaaggttcatggtacccaaagactaaatcttcctagtgctagaggccaccctatgagcaagcatggaaatgggacatgtgacccagccttagtaaaattaacaggaaccataggtcacaaatgacagtgctcttctatgagaagccttaagaaataatatcttgttgggagcagtagcttgagaatttaaagagaccctaatagttaggcaggaatatcgtcctgcctattcagcctgaagaagttactgatcgggtcattaaactcctcagaaaaataaagtggtaaggattagagaatgctgccatgtgctgcacaaggaagttttggtccatgacagactgcatatatggtggaggtcccataagattataatgtcataataccgtattgttactatgcctcttctatgtttagatacacaaatacttactattgtgttacaaatgcctacagtattgaggactgtaacatactgtgcaggcttgcagcctaggaatatgctttactttgatttatgttcaagtatcattctcccttagattttgtgaggttgaaaggtatttgtctaaactggatgtgaatggagagggggcctccggagagcaaagggccctctgttccccttcctaatattaataggctataccatacagcctaggtgtacagtaggctgtgccatgttaagttcgtgtaagtgcactccatgatgttcctgcaacacaaaatcacctagcaacacatttctcagaatgtatctgtcattaagtgacacgtgactatttgcactgttgacctcaagtacacaaatagatcagacaagtggagaaagacctcattctacttcattctaatttaaatgcaggtgctgtccgtagttaggaaaatgtgaaggagcaatcagcctccagtgatattcaagtctaattaaaaattcttcttggactgtttagttcaaagctccctcttaatcttccaggagcttaatcctccacacaaagtatatgaagacacaaaaatgtagaaagtatgtgaaatagctattatttaagtgtggaatattaattttgttgtaaggaggggatttattcactgaaataaactttattaatttgactcatcgccacagaagtcacgtaggctcctctctgagtcagaaaatgtcaagagctttctgtctatttttcctctttagggactgcttgagtacagcaaaaggaggggccagcagatttcagttcaagcatgtttgaagcctgttttccgacattatttgtagaacaaaaaataaacatagtaaaatctccactacaaatgatctctataaagtgtaataacatgatttaagtttatgtattattttctatattttataaattgctgcattgaacagctttaataaaaaaaattaaagttagccttgaaaatttttttggttgttgtttgttttaatttacagacatgatagtaccttttagctgttcctatacttgagtagcaatcaatttgggtgtaaaatattagggtcataatgttctttatacctcatcccactctctcatggtatttgttactcagagaagaaatctgagtcctgattatttcaattcctttgaagaaaccaagttatttttttgtttatttagcagtaggaatctttttatttaaatttaaaaattttcacctggaaacttcctattctaggtctcactttgtgaattttttccttgcccatgttgaactctcaacctccaattttagatttcttctcagacctggaaagcatattttttaagataaaatttttaatcttgcttgtgatccaccattccattttatgctttaaggacatctctgatttgtagattggaattctgtgatttgtcctcccttaaatttctgagctcttctaaatgtctttattcatttcacatttgggaatatttctgaagtgaatcctctccattattgatttgattttcacactgtcaaatctgtcttttcttgcttctagtacaaaacctgctggattttttcttcttgcttcagcgtcttgaaccaagtttcctttttaaatctaagtctgttcttgttgggtggtggcagtgtcctctcaaattgtttctggggtccctacacccccgtgagctcccaggccatgtctgtggcaatgctgaaggacaaatgcagggtgtggccctcctggtgatgaagaggaggtgcaccccaggtcaccagaagccaagagaacccacggggctgagcagggcaggatgaagcaacatgttctcacaaaaaccctgaagatgagatacgattgtcgcagcctctccctatgtgggcctgactctcttcactacactaaactggatgtgaatggagagggggcctctggagagcaaagggccctctgttccccttcctaatatgaatgccttactttgatttacattcaagtatcattctcccttagattttgtaaggttgaaaggtaattgtcattattaccacagaaaggaaaactggagttcaaagaaacttaactgagaagtgagtcttggtctctgtattattgtgttgatgtcaggagtcagagcaactggtgatgaaacagaacccaaactcagtgactcccaggaatggcctcatatcctgttgtgcaactttccgaagcctctaggtcattgtggtgccttgtagctgtcccgggagccctcagcagcagttggagctggtgcacaggaaggatgaggaagaccaggctctgggggctgctgtggatgctctttgtctcaggtaagacaaggaagaggactgagcaggggaggcgtttggtccaggatctcggggagcccttttctgttgaagcttcagagcacagggccatccaagatagagccaaccagtagttatggcagaccgtgctgctctacccagaattgggagaacatgcagtgtctgcacacaaaagtaaaagaaggagagagtcagggaaaaaagatgtctgtgcatgtcgatgttgttagagacatgcaaagcctagtatgggaataatgatagagtagatctcatcatggcatgatctacaataagtttatttgatgttgaaatttttttcttatattccatcatgatgtgtttgatgttgacaatctgttaaacccaaaagacagaattgatttaacaaatatttcccaggggtctactatgggacagcaaatatactactgctgaggacacagacgtgaccagaagaggctggtgctcattttggtggaggtgatcatcccagctctccatggcacgctggggttggagggcacagttgctgaggctcagcagagccggcgcatgccccagctctttcttgtgtctcctcttacgatccgcacagctcacatctgcacccaaaccagaagcatgcgggctttattcactcctcctcctaatccttatgaataacaggaggaaagtgtcaatatgagttaaaagcgaggcttgccttgggaaggcatgaaaaatcagggagaggtatcctcctgggctctctactttgagcaaagtcatggacaactgccttgaagagcctgtgctcagacattgctctgggtcttcttggagctggggtgataatctagatgggcagaagggagttagctcctcatggacaagtgcatttccttgtgtttgattcatgtttttctgaaggagaactgggagatggcagagg

SEQ ID NO: 10957 - DNA, 6000 bp, Homo sapiens
caagatgtctatggcaaagccggctgccaggccgctcaggcccacgctcaggccggcgctagctggaggcagctcctgtagaggctgatgtcgtcattcggggagctggcgatgaggactgtcaccaccaggccatagatggcgatgatgccagccgtgaccaccgggatgatggacttcatgatcagctccggccgcatgacagacatggccgcgatgccggcaccggtcttgaccgtgccataggcagcgcgcggggcgctgaagaccatggcggccgaggctgccatgacggcgaaaaacgaagcatactcggggccgttcttggactcggacattgtctgcgggtggggagggggcaagctctgcggccgaggcggaggcgaagaccggggcgaggccgggccgggcgcgaaggcgagcacgcaggcggcggcgaagacgatcagcattaatggtatttctaaagaagaaaagtgaaccatccttggttccgctaacctcttctattatctctataatagatgtctcgcatctagactcacatccaacatggtccggaagcaggaaggagccctcccttctctgacagattaattactgcttcctttgcagtccacttttctctgcttgttcatcgccatatcttgccttgattcgtacttgaaaggtttggccagagacatttctgatgtgtctgttctttttctcttacttttctgggtaatttaacgtgctggggatgcgagcacgttaaatttccatccattgaagccattctatttagggccaccagggggcatccacagacttgctatgggctcagcaccgccctcctcgtcgtatttacaacctcaaggtcatttgaggagaaagaggtgcctgactaatcgggttacccttgtagagctatttttaaatttttgtttctggtttctacattaaatctttcttcctcttcttccctctgattttctcttgtctgcacgtgtgcttctaagaggctctctgtgatagcgtcacagtcatctacatcctatttcctgcaggacaattgtcttccaatttttattttactttttgtaggaggtatgagtcctctggttgtctgaacatcctcttttggaaaaagcaaaacaaaaggaaacaacttcaaaagtggcagcaattcttttcaatgtccttgatgataaagagttgaaatcctttcataatccaaagctattataagccaacactggctgttagaagagtgatcactttgggtaatattgtttttgacccaaaatgctgtgtgactatagtataacaagaatgtttccccatatggctcaggacctggcttttgaaatcactcccatttggagtccagacttgagctgagcaatggaataagtgctttgttttccaaggtgattgttggatgggaaaactcatgtcttgttgcttagttcttacacctcctctgcctgtggagactattcctctgatttacataatgatttggagaccttgaagaggagtgtgtgggtagtgagtctagtgtaggggaatcaatgcacataagggaagaaaggagattctggattagagttttgacccacttgccaccaagagctcacaggcttcatattctaatcatgaaaccctttttggtattaggtggacaggaatttgatgacaagattggtttgttctttttttttttttttgagatggagtcttgctctgtcgcccaggctggagtacagtggtgtgatctcagctcactgcaacctctgcttcctgggttcaagtggttcttatgcctcagccagcctctgggagtatagctggggttacaggtgcctgccaccatgcccagctattttttttttttttgtatttttagtagagatggggcttcaccatgttggccaggcttgtcttgaactcctgacttcaagtggtccacttgccttggcctcccaaagtgctggaattacaggcatgaaccaccacacatggccttggtttgttcttaaaagcccttgtacttatgcacaggctgttctgagaagtaagattattggatctttgggaattttaatgcattttaaattttagggtgggtgaggtggctcacacctgtaatctcagcaatttgggaggttgaggcagaaggattgcttgagcccaaggagtttgagactaacctaggcaacacagcaagactccgtcgctaaaatttttttttgaaaattgtaataggtatagctaaattgcccttccaaagggctgtaaaactttacactctaaagaaaacaaacaacattattaaaaagtgagcatgctgggcattgtggcaggtacctgtaatcccagcttctcaggaggctgaggtgggaggattgcttgagaatagtagttggagaccagcctggacaacatagatagatcctgactcaaaaagaaataaaagcaggcaaaagtgctgaacagacacttcaccaaagaagatatgcagatggcaaataagcacatgacacatgaaaagatcaaatgtcattagggcactgcaaattcaaacaagatgcagctacacacctattacagtggttaaaatctgaaacactgacaatatcaaatgttggcaaggacatgaagtaaaaattgctggtaggaatgcaaaattgtacagtcactttgcaagacagattggcagtttcttacaaagttaaacatagtcttactatgtaatctagccattgtgctcctagatatttacccagatgaatggaaaatttttcagcaaaaacctgcacgtggatgtttatagcagttttattcataattgtcaaaaactggaatcaaccaggatattctctgataggtgaaggaataaaccgtggtacatccatgtgatgaaacgttattcagtgataagaagaaatgagctattaagccgtgaaaagatacagagaatcattaatcacatatattgctaagggaaagaagccagtctgaaaaggctacatgttgtatgattccaactgtaagatattctagataaggcaaaactatagatctagacggtggttgcccagggctgaggagtgagggaaggaggaatgaataggcagaacatggcaggttattagagtagtggaagtattctgtatgatacaataatgatgaatacatgacattatgcatttggcaaaagtgacagaattatatgcacaaagactgaaccttaatgtaaactatagactttagttaataatagtgcatcaatattggttcattaattgtaacaaatgtaccacattaatgcaagatattaattagaggagaaactggttggggagatggagaataatgggaactccctgtattttctgttcaatttttttgtaaacctaaaactactgtaagaaataatccattaattaataataataataaatgtacagattcaccaagagtgtacacttctacttccactctctttgttgatgtatggtgacagaattttgacatacattcaatttgatggatcgagtttggtctttttctttttttgagacgtcatttcactcttgtcacccaggctggagtgcaatggcgcaatcttggctcactgcaacctccacttcccgggttcaattgatgctccttcctcagcctcacaagtaactgggattacaggtgcctgtcaccatacccagacaatttttgtatttttagtagagacagggtttcaccatgttggccaggctggtcttgaatgcctgacctcaagtgatccacccaccttggccttccaaactgctgggattacaggtgtgaaccactgtgcccggccaagtttggtattttattgttgtttggatttgcattttcctgcttattacccaagttgagatcttttccagattattggacttttcaagtttcctaattatgaattgtctgttcctggtttttgcctatttttccagttgattattggtcttttgattgtgaatttttgtttattgtgaatttgtgagacttaaaacatttttgcatattaattcttttttttttttttccagacagagtctcactgtcacccaggctggagtgcaatgtggggatctcagttcagtgcaacctccacctcctgggctcaagcgatccacctgccttggcctcccaaagtactgggattacaggcataagccaccatgcctggccactgtatattactttttaattttacaagttgcaaatgttttctcacgatctgtcactttctttctttccttccttcttctcttcttttctttgtctttttaaaatttgagacagggcctcactctgtcacccaggctggagtgcagtggcacgatcatggctcagtgcagccttgaactccccaggctcaggtgatcttgccacctcagcctccagagtagctgggagaactacaggtgcatgccaccatacccagctaatttttttttttttttttttgtgtgtgtgtgtgtgtgtgtggagatggggtcttcctatgtagcccaggctggtcttgaactcctgggctcaagtgatccacccaacttggtctcccaaagtgctgggattataggcgtgatccactgtgcctggccctgtcatttcttttctcagagaggataacaatttatttgtcctacagaaagttttaaatgttgaaggagattggcctggaaatatgcttttggggagcaacacggtctgagccagacatccagatacagcccattcttctggccagtcttgccctttgctcctgattctccaagctgtacccagagctttctggttcagcatgtacctggaggctgcttttgaccatgttttgagagtggcatggctttatctaatgggatgaacctggctaaagagattagcaaaatgtcttgtggatcccacttttaatctgcagcgttcaggctgccccttcttggctgggaagggcgctgaagaaacaacgcccaggaccaggactatcccctgctcaagctgtgattccgagacccctgccaccactactgcattcacggggatcccaggctagtgggactcgacatgggtagcccccagggcagctccctacagcttgggccatctgcacttttcccaaggccctaagtctccgcctctgggctcgttaaggtttggggtgggagctgtgctgtgggaagcaacccggactacacttggcaagcatggcgctactgaaagtcaagtttgaccagaagaagcgggtcaagttggcccaagggctctggctcatgaactggttctccgtgttggctggcatcatcatcttcagcctaggactgttcctgaagattgaactccgaaagaggagcgatgtgatgaataattctgagagccattttgtgcccaactcattgatagggatgggggtgctatcctgtgtcttcaactcgctggctgggaagatctgctacgacgccctggacccagccaagtatgccagatggaagccctggctgaagccgtacctggctatctgtgttctcttcaacatcatcctcttccttgtggctctctgctgctttctgcttcggggctcgctggagaacaccctgggccaagggctcaagaacggcatgaagtactaccgggacacagacacccctggcaggtgtttcatgaagaagaccatcgacatgctgcagatcgagttcaaatgctgcggcaacaacggttttcgggactggtttgagattcagtggatcagcaatcgctacctggacttttcctccaaagaagtcaaagagtgagtggcttccagtcctggggtcagagctatgaatatattggggacactgaggctcaggcctctgaccagcccctctccccgcacccagtgccttttcctctccatcgggtgcacaacttattgctgcgtatgtgagggtgtatcaggtggaaccatatgaaattgctaatattctacct

SEQ ID NO: 10958 - DNA, 6000 bp, Homo sapiens
tctggaaagataggagttggtaataggaaagtgtgatacttaaaatagagatgatggagtgtgtgaagctattggtagcaacaaggtttagggtgggatcatctttctcactggagaggaagaaatcaaggaaatgagaagctggttttatcagatatctattgctatattaacaaaccattccaaaatttagtggcttaaaacaaccaccatttatctgcttatagcttggcaatatgggctgggctctgctgagcagttcttctgtttgtcttgcctaggttcactcatgtggctgcagtcatctggaagcttaactggggccaggtaatccaatatgactgcacgtctagtggttgttggccagggtacctcagctctcctccacggggcgtttcatcttccagtaggctagatggacttcttgacatgatgttggaagcattctaagaggcaaagcggcaagctgcaagtctcttgagacctagaccctaggaactcacacaacatcatttctaccccattctatcagctaaagcaagtcataaggccagcccagattcaagcaagaggttgagaaatatactccacctcttgctgggaaaagcagcaaaataattgcaaagcgtcttgtagaacaggaggaagaaaagtggccatctttgcaatctatcacacttgttggaagaactgtctatgtcatattgaatcatcaagaatcaccaataatttgacagaagtgagagtgaagagactgacaagccaggtgctaaaatcttcaaagcacaagggggcactaagtgatacctctaatggcatcaactacctttattatttcatgagtgaatctcagtacattttatcagttaaaaagaatttatttttcatgacttctttgactcagtcactcatcaattcagacttgatcataaggaaggagcctaaaacatggggaaaaaacctaccttcataaaaatgtgtggcactaataaatattatctgggagctgtatcctcagtggctctggtatctaatggtaatatatgactactcaatatttgttgaatgaatttataatgacaaaaaaagtaaacaacctaagcagccaataactagggctaagtaaagtaaatatagtatatctatttaatggaatatcacatagccataaaaaatgcttttgagaactatcaatatatgacatggagtaaaaaaaagcaggatacaatactgtaggtacattatgattatacctctgtaaaaatatctgaatggaaaaaaggaatcaaaacaacaataattgtggttttctcaagctagtaggattgtgggtggtttttttcctttccttttctttgagatggagtcttgctcttgttgcccaggctagagtgcagtggcatgatctaggctcaccgcaacctctgcctcccaggtgcaagcgattctcctgcctcagcctctcaagtagctgggattaaaggcaggtgccaccacgcccggctaattttgtatttttagtagagacaggttttctccatggtggtgaggctggtctcgaactcctgacctcaggtgatctgcctgccttggcctcccaaagtgctggatttacaggcgtgagccaccgcgcccagccagtttgctttctttttttttttttttttgagacggagtctcgctctgtcacccaggctggagtgcagtggtgctatctcggctcactgcaagctccgccccctgggttcatgccattctcctgcctcagcctcccgagtagctgggactacaggcgcctgccaccacacccagctaattttttgtatttttagtagagacggggcttcaccgtgttagccaggatggtctcgatctcctgacctcatgatcctctcacctcagcctcccaaagtgttgggattacaggcgtgagccaccgcacctggcctttttctttttactttattctaaaaaaatgttaggctgggcacggtgactcatgcctgtaaccctagcactttgggaggccaaggccggtggaccacttggggtcacttcgagactagccgggccaacatggcgaaaccccgtctctactgaaaatgcaaaaattaactgggcaggccgagggcagtggctcacgcctgtgatcccagcactttgggaggccaagcgggcagatgacctgaggtcaggagttgtaaaccagcctggccaacatggcgaaaccctgtctccactacaaatacaaaaattagcctggcttggtgggggcgcgcctgtaatcccagctactcgggaggctgaggcagaagaattgcttgaacccgggaggcggaggttgcagtgagccaagatggagccattgcacttcagcctgggtgacagagcgagaccctgtctcaaaaaaaaaaaaaaaaaaaaagagttaattaaacaaacagaattttaaaaaaatttattgaatacctactatgccaggcattgttttagacactggggatgctgtgatgagcaagaaaacatcccagacctctggagtttgctttgtagtggggagatggtcaataaacaataaatatttaatataatgtcagataatgatatctgacagagaaaagcactgaaagtctcgagaaaaaaaaattagctgggcgtggtggcgctgtgcctgcaattccagctatactggaggctgagacgaggttgtactgagctgaggttgcactactgcactccagcctgggcgacagagtgataatctcaaggaaaaacaaacaaacaacaacaaaaaacaagttatagatgttcattgtttaaaaaaaaaaaaaaaggggcgggcgcggtggctcacgcctgtaatcccagcactttgggaggtcgaggcgggcggatcacgaggtcaggaaatcaagaccatcctggctaccatggtgaaaccccgtctttactaaaaatacaaaaaaaaattagccgggcggggtggtgggcgcctgtagtcccagctacttgggacgttgaggcaggagaatggcgtgaacctgggaggcggagcttgcagagagccgagatagcgccactgcactccagcttgggccacaaagcgagactccgtctcaaaaaaaaaaaaaaaaaaaaaaaaaaaagtgttaatgctgaaaagtattaataagaaaaaaaaaaaaacctctataattcgatcatccagagaaaagcactgccaatgtcaaagtacgttcttctttgtttccggcttccccccaccgcactttacatattcttagcttttttggacatctttagacgtcaaaaaaaaaaaaaagtatttttaacagtcacatagtgttgatgtgccataatttatttgcctacagtaatttttgaattataggttgtttgcaatttttcaccaaaaaaaaaaatgtgtttaaacaaaatgaatggtacagccatgtcattactcaaattcagagagctcttcagggaagaggcgatcacagctgagaggaggccagctagggagctgagtgggtgtaagtgttatatccaatggagactgcaggaaaaatgagccctggggctctgtgcctgtggaggtggctgtgtgaaggtgggaagctgctctgccccgactagcgactgctccttccgatgttttgaatttaaagatggtgaaatctcaatctgaaggactagagatgggcgctagcgttcctgacctctgccctgttgtcctgcacaaactagaaattatgttctgggtccttgtctttttttgggggggggcgggggtcggagttttgctctgtcccccaagctggagtgcagtggcgcgatcttggctaactgcaacgtctgcctcccgggttttcaagcgattttcctgcctcagccttccgagtagctgggattacaggcgcgcaccaccacgcctggctaatttctgtatttttaatagagacgggtttcaccatgttggccaggctggtctcgaactcctgacctcaggtgatccgcccgcctcagcctcccaaagtgctggaattataggcgtgagcccaccgagcttggctgggtccttgtcttgaaatgtgtctctgagccattagccagaagggggcaaagaggcctggagggcagctttcccccactccccctccgttactctctgaatctgagctccaggtttgggcagttgaggtttagcctgaggccaaggacgaacgtgatggggtacaggagaagacttggcggtggagggggttttgtgtgcacatttacagagtcaggggcattcccagtccagaaaggattctcagaggcagtcacaaaaaggaatggggtggaagggctgagacttgagggagggaagggtggtgggggtagggccggggtgtggttgggtggatcgggttgatatttatatagggataggttgatcttggaaggctggagacggcaacgtggacaggaagaagcggagggcgaggaggagcagaggagcacacagatgaagcaggtgatgaaggctttacaagcggggaggcgtgggctggtgacaggcggagggcggggagcgattgcctgcgtgtgcatagatctatatgagaagcgtgatgagcggcggacaagcgaaggcagggctggggcgtgggccgcggagcgctggtcgggaaagtgggcatgggagatgagagaataacggggttgcgctcctttggcttaatagtttgctcccattgagactcctaagatttcctcctctcttggaaggaagctgggttcggggcgttgggtagccgcggagggccggggccccggggcgcgccgggtgctaggtgtgcgccgtgcgtcgcggggggggggatgggggtgggggcgggctccgcccctggcagggggcctgagcgcgcgcgaggagcagccgctgccgccgctcggggtcgcctggagccccagattcccgagcgctcggctcgcatggcagccgcttcggcgcccggccccgcggccagctaggggcggccccgcgctccctcacggcccctcggcggcgcccgtcggatccggcctctctctgcgccccggggcgcgccacctccccgccggaggtgaggactgcggggacagggcgcggtggggattccaggccccgcgccgccgccgaacccagcgcggcggagatagaaaggggacgtgggagagagtggtggtggcgggggggggggctgtcggagctgtggggcggagactgctcgctgccgggaaccgtccttccctccggcccccgcgtcccctccgtgctcgaggccgcctctcggcgctgtccccatcccgcggacccctccgtcctgactacgatcccaaccccagccattcccgcgcctggcctcgctccgcgatgcccatctttcccctccttgcagaccccgctcccgggttcctgtcttcgctctcctcgctctcttcgcctgctcaacccttccctgcccccatcctcccgctacccccatccccttcttctgtcccggcgcccctctccctcgtcggctcctgtcacttggaacccgtatccgtgccgctatctccgcgtccggccgcctcccaaccggtgccgtcccacaggtgtccacgcgtccggccgtccatccgtccgtccctcctggggccggcgctgaccatgcccagcggctgccgctgcctgcatctcgtgtgcctgttgtgcattctgggggctcccggtcagcctgtccgaggtgagcgcgcccgctgggctccagtcgcggccctgtccagccgtcctcgcttgcacgttgacctctgccggccggaggcggcactgcagtcgctccgacccgcggggcaagcaagaccgaggttgcctttttggaatgggatgagtttctgtgttatgtcctgccctagggttgagtccgctcagttactggaaccccaatcctctcctgagtcccgcatcccagcgagctgtgccctgactca

SEQ ID NO: 10959 - DNA, 6000 bp, Homo sapiens
gagctagaaactgaggagacagacccaagtaagacatggcctctgtcctgaggtgcttgcatcctgggctgggggacttgtatcaacagctaaatacacagcctggtgacaagagttgtgatagagacacataccagctgctatagggtccagtgtctgtgtgcagcagccagggaaggcttacagaggagatgccatctgaatggagcctaacagagagttttgccagggagagactgcccggtgcctctatctttcctcctgcagcctaacccctgggggtaacagaggtctcctcacagggtgaggggctagactctcctcctacatgtcctttctccagggcctaaggtgacttacaagaaaagcagagagctactttcttcaccttgcttccagaattgggatcccaagagcttggtgggggaggggtgtgacaggggaagggctcggtagtatttccttggaagaacaggttatggcctttataagctgctttcaaagaagatgctggcagctggtgattcttgagcccaagcatgttcccagaggtgggagcatgctgcagtggccccatgaccctctatttgtgcctccagacagcactccatctggctgtacatctggaccaaccgggcgcagttcgggcactggtgctgaagggggccagccgggcactacaggaccggcatggtgacacagcccttcatgtggcctgccagcgccagcacttggcctgtgcccgctgcctgctggaagggcggccagagccaggcagaggaacatctcactctctggacctccagctgcaaaactggcaaggtgtggacagtctttaagactgcccttagggcctgtgggatgaggagggcataggagatagggacctcactcttggggaagggagggtcccagcttgtccattggtgcccctcccactgtaagcacatagatattcagtacatctttgccaaatgaatgaatggatgatttgatttcgaatttaaccagtacctactgcctgctgagaagaaaactaaatcttgcccttaagatacttagtttaatagagattagatgacctgattcattcattcaacagaaatgtactgagggttttctatgtgccagacgttatcctaggagctacacttgcatctgtgtgcaaaatagagaaagattgagatgagcaataaatgtaagaagtgaactatgtaatatgttaaaaggaagtaagtgctgtagtaaaaagcagagcagagtgagaggaaggaatgtggggagtaggagagttgatatgattgttaaatagggtggtccgggaaggcctcatggagccagtgacatctgaatagcgccctgaggaaggtgaagaatgtaaatttgaatcgaaatctctattactaagcaagggtcgggagtgtccagactagaaaggagagcaaaaaggccaggggagcacagaaggaagcggcccctgagaaagggctgggggcatgaggatcttaggtggcttttcagaaaaggtggctttcagactgggcttgaaggcaggttgtgtgtgtgtgtgtgtgtgtgtgtgtgtgtctgtatgtgtgtgtgtgtgtgtgtgtgtgtgtgttgtagtttgtgtataggaggagggtgttctttgggggtgtcactcagcagcctgacccctgaagcatgaaagtttcaataacatgactctgaaaaggtggaaactttgagttcctttccccttagacttttgagggggttttggggtttgcattttaacagtcttgtgattagagacattgagtgggctgtgagtcccttggggctgagtggtagggaggtcccagaagagagggagttggtggatgcagatcagcagccctcaccctcactctcaccccatcccaggtctggcttgtctccacattgccacccttcagaagaaccaaccactcatggaattgctgcttcggaatggagctgacattgatgtgcaggtgagacagccagcaaagcactgcccggcccagggcctgcccccacctgacacatccccaagtcccctgcccagcagtcagaagtggtggcattcacttccttatccagagcccaggcccagcacactgcctctgagggccttggctgacatccttattcctccccaggagggcaccagtggtaagacagcgctgcacctggctgtggaaacccaagagcggggcctggtacagttcctgctccaggctggtgcccaggtagatgcccgcatgctgaacgggtgcacacccctgcacctggcagctggccggggtctcatgggcatctcatccactctgtgcaaggcgggtgctgactccctgctgcggaatgtggaggatgagacgccccaggacctgactgaggaagtaagtggcatatgctttgctctccagggccttgcacacccatagcagagagaggttctgtcattagctgaaagggccagggagccaggagtcctggggtataaccaggactctgccactgaccaactgtgggaacttgagcctgtttccttagttggtccaaggagccaaatttggactcttacagggaccctgcagttaaagtgaatcagtgaagttggccagatatgagaccatggtgtggtgaggcctataagaacccagagagccatccctgagggtctctgtactcagcttcagcaaaggcttacaaagcaggagtgtaggcccagtttttcctggtcttggactttcttgagaggtgaaactcagattttctgtacagtctttcctatttttaaatgttcagtgtaaaaaagaaacctaaatgttctgcgagtacccagcagcccccccaccccatcccccaacaacaacaaacaactccaggtccatgggctggatcacctctaagggtccctcctaactcggatattctggcattatcttagaaaaggaaggcttgtctaagtcctcagggctctgccaagcccagaggggccactattttgaggattcgtgtgaagatttgttccctgatggtcttcaactgtcatttggtggggagggagtggcccaacaggtttccctgggtcccctttcccaagtcaccttttcccatgtcctctgatcttgcttctctccattctccttctcagtcccttgtccttttgccctttgatgacctgaagatctcagggaaactgctgctgtgtaccgactgaagccaggcagggtctgggatcctcagggctccacctctccatctggaagccggagccataactgctgcagtttgggcccaggctatgtgctcttctggtgccctagggactgctgtggccagagcctggggccagccagtacagtcctgagccgaggaggagggactgcaagtggaagagagccagtctggaaggaagagctttccaggtggacagggcttcttggaagacccccaaagccccaggtatcctgggtgaagcctgtttgcctctcttgaaaatggcaggtgctcttgttttacccatgttgggtcagcctgaaactgccaaccagtaggaagcatggactctcctgagtgagaagagactgaaataggagcaagcagaaccctgagaggtgtcccatcttattgctgttgaggaccctgaaacaccgttgtttaaagacttcacacagaaggctctgaactgagccactggggaagggaagtttcagtaacatgacactaaaatggcagagacgttaaaaaaagtttttcccttctagagctgttttgcgcgcatgcatgtctgtgtgcattggggctttttagacaggcctgccctgtgactttgtggtagaggcagagagaaggaaattgtcccctgagcacggtagggccttgctgggtggggtcagaggccagtagttccaggcctttctctgtgtccagcacagacccttgtccttgctgtggaaatgatgagggatggagggacaagaggaagaatgagaggacacacgccctggagccctcaccactgccctgggggttgccatctggaggagcctggggataagggtaacccagggaggctgggcacgagggagctgactccacgtttttccccccgttcctcaccttcgagggccctgctaggtcacccctatgctggcatgaagagcatggggcaataaaccagcacagtctctgaccacttggagcgtctcatccagtgagagagacagccgttaaaagcataaacatccaaataaagatgcctttccaagttgcagtgggtgctatgaagggaaaagaatagtgggaaggaaaaggatggagtcggtagagggtcatactttgggtggtccgggaaccctcgcctgaggagtatcatctcaactgggatgtaaggatgagtaaagggatgggggcagagcattagggggaaagcctgtgaattagaggaactgagagcaagccagtggggcttcacagcgggcgagtgagtgggcgaggaacgcgggcgaggccatgtagagcctcgaagatcatgggaagtgggacagaattactacccagccaacaaagcaaggagacaccttcatcctgtcagaaaacggggaaactaacacagaggagcggcttgggatgcagagcctcaatgtcctgtccacaagatggcaatggtcaccatgacctctgggacgcttatgaagggcgatgacgaagcacaggggacacgccgggcgggcgcctcttcagggctggggctccccgcgcccaggggcagcccaggtccccggaacccaagccgcgtctgcctccgggccgcgcgggggcgctgtggtccggcggcggcccggggcgctgcgtggtcgcggcaggggcggagggggccgcggggagggaggcgggaagagcgcggcacttccgctggccgctggctcgctggccgctcctggaggcggcggcgggagcgcagggggcgcgcggcccggggactcgcattccccggttccccctccaccccacgcggcctggaccatggacgccaggtgggggctagggcagcagcgagctcacgtgaccgagcccccgggccacgtgactgccgcgcctcagcacgggggccgggtggggtcccggctgctcggccgtcggccagcatatcgctgcccggagccagcggggatgggagctgcggcttggttttgtgctccttggggagcttcgggcggaggggctggggaccctgacgtcccggatcgtggaggggagtgtgggggaaggggcgcttcctctgacctgagcagccggctagcgttggagggaacagaggagacctgtgtggccagaggggcggatccgcccccggggagggaggaagctctgcctggccagcgccggcgcaccccctccccgagagagagagagagagagaggctctttgtccgggccggagctgcagcggagggggcggggaggagactccgggcactactccagtgtggtcccctctggagggcggaggggatgaggagctgcgccctaatccttatgtccgctttccttacagatggtgggcagtggtggtgctggctgcgttcccctccctaggggcaggtggggagactcccgaagcccctccggagtcatggacccagctatggttcttccgatttgtggtgaatgctgctggctatgccagctttatggtacctggctacctcctggtgcagtacttcaggcggaagaactacctggagaccggtgtgtgaagaaagggcggggaagtgagctaggtcgggaaagagggtatttggccagcagtccaaacgggatatgacttggagagggcgggaggtcggtaggccggacagcagggcaggctggctgctctggggaagatgaagtgctatggagaagatttggggcttgactttgtgtgctttcttcaggtaggggcctctgctttcccctggtgaaagcttgtgtgtttggcaatga

SEQ ID NO: 10960 - DNA, 6000 bp, Homo sapiens
tgcaaatacctagagtggaaaaatgtatttttgatctggatagaggacaatatttttaggtcctcccccactgctagtaaatttacagaattacaatacccataaggagccaataagtttttaaatagtgatgttaaactaagtatgttcaggcatctaaggggtgttatgtgctttacaaagaactgagaatgtggttttaacaaaatgttttcaccccatataccacaaacacatgtgcagtttcgtatttggctcctgagaatatgtcttacaaaataggcctcaaaccaacaccaaaagatgactatctctcctgctatatgactgcatcctgcactgagttagttattcaacaaatgacattcagttatggcctagaaaatatttgtagtagagacggggttttaccatgttggccaggctggtctcgaactcctgactttgtgattcgcaaaatataaaaatttagcctggtgtggtggcgcgtgtccgtaatcccagctactcgggaggttgaggcaggagaattgcttgaatctgggaggcagaggttgcagtgagccaagatcacaccacggcactccagcctgggcgacagagcaagactctatcccaaaaaaaaaaaaaaagaaaagaaaaagaaaaagaaagaaagaaagaaaagaaaaagaaaataattgtttagccttgttttggttttacttcatagtttcctgacttcattcatgagggaaaaggaatgacacccagcagagcaggccccgtggagctcctgcacttgcaagcactcacaccctgcaggaagaactggtatacacccgtacacacaggaaaggccactgagagtcaaacaccaccagcaccaatttgtgaactttggtgaggtgtgaggtattatcgcagggtagggtttatttattgttgctgctgtttactgaggtataatttccacacagtaaaattaaacatttttaggcacatagttctctgaatattgacaaacttagtgatgtgactacaaaagcaatcaaaattctatcacataaaaaaattctttgtgcccctttctagccaatcccctcccctcacccctagtccttggcaaatgctgatttggtttctatttccattgttgccctttctagaatatcatataaacagaatcacacagtgtatggccatttgtgtctggcttcgttcacctagaaaaacgcttttgagattcatccatgttgttgcatgcatgagttctgtattccttcttactgccaaacagtactgcatttacggacacactacaatttgtttattcactagttgagggacatttggatggtttctagctttacatgattatgaataaagctgctgtaaaaagttgttgaccggtttttcagtggacgtctgtcttcatttctcttagataaatactcaggagtgagattcctgggttgtatgtcacgtgtatatttaactttataagaaacttcaaaactgacttccatagtggaagtccattcccaccagcagtgtatgatagtccagcaatatattatagctctgaatccttgtcagtatcagatgttgtcagttaccttgatttgagccattttattagtaatccatcaacttttgatctaggctgggccataaaattaaactttctgctagctatatatactgggttgaataagtgtccttccgaaatacacattcacccggaacctcagaatgtgaccttatttggaagtaggatctttgcatatgtaattaaatttagatgaagccatactgggctgaagagggccttaatcccaatgactggtgttcttataagaaggccacgtgacacagggacacacagagtagagcatcctgtgacaggagaggcagagattggagctaggctgcagcaagccaaggaataccagaatccccagcagctgttagggccaagcaaggattcttctcagagtctcggagagagcatggccctgaatacatcttgatttcagacttctgacctccagaactatgtgagaatacatttctgtttgtcgtaagtcacccagtttgtgataatttgttaaggcagtcctagaactaaaacactatgaatacaatttacagaatacaacaatacaaataggtttatatttgacttatataaagctttctgaggataaaagcataataattgcttctacaaaattcattctaattagttcaagcatatcactagaagcctaatttattaatatgcataaaaattcttgggctaagtttttgactattctataattcaacatttcactcattggactgaacttctgctaatgagtcaagattagtgaagaccactgtttatcatgaattaagagcagtgcagaagcagaatcccagtggttcctatctatggccattgaatatgtgagacccacattttgcagaatgttctacaaaggattaaaagatgaactttcttttagtttagtcatttgtggtataatgtactggaatgcacctttaaaattttttaattgtaaaattatgtgtttatttttcctatcatgaagtctagttctgaaaaacaagacttctgtggtagagccagttctggttgtttcttaaagaacagatcccttttcagttttagcacaaagctcttccagcccctgacgaagaaaattgtccctctctcaacctgtattagacttccttggggaggcagagggatctccctccccacctgaccccaaaacctttgaaagaaagaagttggttattctgttacactattattcaattagaattccactaatttaataacagagaataaaagaatagttacagtcaatagcaggttgtggtttctgctgctaaaactttctgaaaacctattgcaaatagacagatactgaggcaacaataagacaggagggcaggtgcagatgtgggagcaggaatctcatgttttacattcattcctctatactatgtaaaccagactttctccccatgaacaacataaggtaatagcaagcctatcaggtgaacattagatatcattatatggacttctgggaggaatctggcagtcttatgagcacttttctgtgttgtgcactgtggttaccagctgtaccatgcctatttcacaggaatagctggtgaatataatcataacttccataaaatttgcagagcaaagcaggttgtcatccaaacagagtccaacaatgttcagtgatccgaacaaaagtcaggcccattttcaccactcctgctctctgataagcgtacattgtcctttgagtgttttgggagagcacagagttgacctattctgggggacaaggacttacaagattggaccactctgttccaagtttgggcaatttcaaaggacagggctttggggaattggaacaacttgttcaacttcattgtgtttgggtctcactaaacatagaaaccagcctccctcttaatccccatcccacgtgttgaaaaccataaactcaagttaccacgaataaaaggccatggaagagtgcccagatgcccttcgggatgggatgacccagttaggaggtaacaatgtttggggttgagattgtccctctattagaagcagacagagaaaaagctatgaccaaaatgtttgcatggcttaattaaatatcaacagatatctctattcactttaaagctccagcacaccagacaagggatccgagctccgggcaggagccaaaaccaccattgcagatatgctcccagttttaccagctaattagatgttaaacttacattgtaacaatcaacctgatattattgcctactgcagatagaactagaattctaattaggtcagaattctagctgggattgtgtagatggacaaattctttcagggtagtttgatatcactgctataatttatggtaaagacagttgggatcatactggcaaactaagtacctgcctacactccctcaggcctaaaaatgccattgattatcccaaaaaaactgagaaaataatccactacagtacggaaaaagacaaaataggggcactaacacacaagaagcactgaaggctttctgaaagagtaatcaggcctgatgtttgtagttttaatgtttactttgcaaacaaaggtagaaacagagtctggagctcggatgccaccaccagagagggtggctgttcagcctctctcctgtgcaaattaacctaattctgaacctgtcttggtttaattcgcacaatttcaggtgccatgctaggtacaccacaaatatacctcagggacctcaattgcaaaaacctggactgcaaacgttggggctgcagagttgactaggttaataaattctttctgaggtaaagcagataacacccactaataaaaagaatgaaacttcatcgtcccattggcatcctcgggtgtgcaggtgttcctcagagcaaagcccatggtgtgccccatcgccaattcgtgacaaggcagggggcggggggcgggggaaggaaaaaagcctgggataagaaatcagagaatacaagtcgcttttaaacaaaaaacagtgactgttagagtacacccaccattggggtaacacgcaataatctctcagcatcactgactccagcacagctggtcccctggaaaaggcacgttgccggaaggttttgtgtgtgaccaagcaattggccatcccacgccttcgccctaccagatgggtccctgcccccgggagtcccctccccctccaccctccaaacccaggcagcgcccgcccctgcccccgctgattgacaggccgtgcagctactcctgggagcctggctttcgggggcaacccaggcagaagtgactatctctgcagcagccaatagaagccaggaggcggggcggggaagcggcgcggtcaggtgctccgctccagagttgagcgcaggtgagctcctgcgcgttccgggggcgttcctccagtcaccctcccgccgttacccgcggcgcgcccgagggagtctcctccagaccctccctcccgttgctccaaactaatacggactgaacggatcgctgcgagggtgagtccaggggcgtgggtggcttccctcccgggaacccacactgctcctctgggtccctaaagcaacgtcccctccttgccactgcacatctaagaagcccaggcctcggtgggcgggatgactgggaattgggaacataacctacgccgcgaccattctgggtggctaggatggaatcctggtggagaagatggacacccccgcccttgacgtctacccgagctacacaaacctactccttctgcactttccctcttccgtttaatcggtgccccgtccttcctgctctccaagtctgtttgtggaggaagggttggaggggagaaagaactggaaagtactcaatgaaatgtggagccagatccagggattccactgttttgtgcagcattttgtgcacgaaaaaaaaaaaaattctgattgttttcattccccaccccccacctctgtttattgctctgtgtcatggatgtgatgttgagtcttcttgccaaacattcctaagctttagacaacacttaatctttgcttacttttgttggtcccaagaaagcagttttctcctgcttacacatgtgccgaattaatttgctaagatagatgaaaatgaggtgttccatgtagtttatttcctctgcttttagccttaaattacatttggttgatactagccttccttgttttaaaaaggtgggagagaaaattagggggagaaaggacagagagagcaactaccatccatagccagataggtgagtaaatatatttgcagtaacctatttgctattccttgctgcaactgtgtttaatgttccttccagaatcagagagagtattgccatccaagaaatcgtttttaaatatgacatttgagctatcatcttgaga

SEQ ID NO: 10961 - DNA, 6000 bp, Homo sapiens; identical to SEQ ID NO: 3755

SEQ ID NO: 10962 - DNA, 6000 bp, Homo sapiens
cagtgtgagcataagttatctcacatagaaaaacagtatggggtatatgagatatcttgctacaagcaattatgtagccatataaataaataaataataaatggttataaaaagaaaaacaatatggtatagctgaaagaagttaaatttaggaaattgggcaaacctgtattcattatggctctgccatctacccgatgtgcaactttgaacgagttgctgaaactctctgagcctcaagcttatcatctctctatagagttctcttttaacttggacgagttagttttgttgtctttgctaaagattacttcagaggcgctctagctcttcttctgcaaagttaatcacatgaaaagtgaaaaatcaacttgtctaaagaatacaggggcctcctgggaagattttaactgatattcttcaacatctccctggaattcagagttaacacaattcatagacataaactaatatgtccgtgagaattaccaggggcaagaaatgataggaagcctcctgagactgaataaaaagagaaataaagctgttggccatagttaaaacaggcatttttaacctggagttctataaatataattcagatggtccatatatttaaatagggaaacaacagtgcatttaactgaaatgtaacattttttctattgtgaatgtagaaaataaacaacagcatcattaatagtattgataactgccactaatataaatcacaaataattttctctcttttacttttttcagatatctcaaaatattatttacactcattacttcaacttggaaattatgctcattattagacatgccacaagatttatttcatccattatagagaagcacctatatcagacagttgggtataggtgcttcttttatattacagtattttgatcggtgtatttcaatagaactggtttccttggtaatccaatgtattttattttgtgcatttaaaatctattttgatatgggattcagaggcttgtgccaaaagtgtccatagcacaaaaatgttaagggtccctagcttaaggtaagttccaaagccttgggcagctgctttggaaatgctagtgctgatttctctggtcccgtaaccctgctcaattccagtgttctgtgaaataatgctgagtgccaccaggtagctgaaaagaaagccctaggggagggcacagggccatccaccatagatccgagaagttgcaaagaacctttatgggaagaaagaccttttctttcaccagatcccctatggcagcaagaaatgtttgtgtctgctcctcacttgggaagagaagttggactggccatcctattagactaaataaaacccatggtctctttttggaaggaaaacattaaagaagcacaaaaagagagtcactggacctcataccagtatggcagttgggtgcttaagtagctacacatataaaccaacggaacaagttatgtttgcaaagtataaaaatatatcaaattgcaggccaggcacagtggctcacacctgtaatcccagcactttgggaggccaaggtgggtggattacctgagatcaggagtttgagaccagcctgcccaacatggtgaaaccccgcctctactgaaaatacaaatattagctggatgtggtggtgcacgcctgtaatcccagctactcaggtggctgaggcaggataatcacttgaacctgggaggtggaggttgcagtgagccaagatcgcgccattgcactccagcctgggcaacagagcaagactccgtctcaaaaaaataataataatatatgtgtgtgtgtataaaattgcagtgggactaaacaaggtgggtaaatagccacctaacacagtgtccagaacagaaaatgcttaaggtattttagtaccttcatcttcctaaatacctcccaccctcccaccaccattacaaatacacaaaggtagagagaaagagacagtttaaaacagtggtggtcctgtttcaattattctttgctattaaaaataagcaaactcaaattaaaattccaaataataacaattagctacgttttacatatattcagaaaataaggcaaagaaactgtttctttcctaaagtcacacagcaagttgaggatcaaagatcccttgtagcccactggctcctgcattaacccaggaatacttcgtttgtatctgtgtatttagctgggaagttgaaggttcatttgcttggtgtgtgttttattttgtttggtttggtttgcacaagaacgtggcttacccattcatgattctttccgattttacctcttttactgaaggcactagaagaaagccatcctgtagtttcataggcagacaaggcaacagataaatcatttccactttaggacacccacaccctcagcctattgtctttgtgattcagaactgtcaggaaagagatttctaaaaagctgttgaaatcttcaggttcacactaccatatgttggtctgccaggaatttggccctcccaagcttcatggcttgagcttgatcctcccttttgttctaggcgcagagaacctgatgataagccctcactgattgaaataatgagagagtagacagcagtatgaaagctactgtcaggattctaaatatttataatttaaaatgaaatttattagagtaaagctgttcctctctcccttcctcacaccgctgacctgcctgctgagtgtttctcccttcaagtctgcccttaattcaattcactcaaatgatgtttatcaattatatattgtgctagacatggtattattcattctagataacaaatgaggtgcaaaagagacacagcccctgtcctggagctaacaggccagtaagggaaacggccattcttaaaaattacatataaatacaaacactacataaatacagcacacacagccaactgtactaattgcaaagaaaagaccacaattcaatgagagataatagtggaaacctggttcaagatgggagatcaatgaaggcttttctgaggaagtatcattttatctgaaaactgaagaatgatggatgatgtatataggacagggagcagagaatatgtgggaagatttccagttacaaagagaagcttatgtgaagaactgaacaagagaaataatttcccagatggtagacaatgcagcttatttcaatacaaatgtctacattcagaataaggcaaaaaatctgaattcctcgaagttgaacaggctgaagtcaagtgctggcatagtcccatcacctatatgagtaaaatcctctactccccatgtgttgagtggttgctgagctgctggaaatgtcccagagaaagagagatgccatcggtcttggattgtttaatatactgtgtcactttttattaaagagtttaaaaccgcattggtttatgatattgtttagatgttcttgcaatttattatttgatacttggttttcacaagtttatgcatagtttattaacatatacacttttcatttaggatttgttggagttctcatgaacactctttaggctgctgcaaaaccaaaaattaaagtgtgagatgtacacatgtattttcatagctaagcatgtgaacccactcctcttgtactatgctgtaacgaataatggaaatagtcatttttcaaagtgtctgtatatttataaaatttcaaatatcacttagtcctaacatatcatgttctactgtggaaaatcataccagaaagaccaaaaaatcctgctgctttgttttataaatatttattacaatgtatgtatcctggcagtcagttgcactctctctccaaattctgcatagaatcttttggaaattgggcttcatgaaagaaattgtatttaactggtagctcttagttctcaaaaacaggtttattctgccatgagaacaattccaaagaggagacaagaattcctccacctatatggtagttttgaattgcttagcatcttatttacacttgactatctataaggatgatagattagttatgttcctgtttaagtttactctcttcctatttaagactaaaagatatatcacaactcatttgtgtatttccatattttcacttgcgtaaatcagagtaaggagtcaaaaacttcataagtacataaaactgcttacagtcctatatattccccattgctcatgggataatatttagcatctagcatcctcggtactgaatgtgagggtctttacaacacagccacctccatgacaacattatctctgccacttcctccttttctcttcatctcttttacattccagctttgcttgactgattgccgtttccaaaacatgccatgttcttccaagatttatatcattccctcttatctgttttacttgaaaaaccctatttatgttctagttctcacatccatattgttttatatgctaatgttcttggcctaaggcaaaaagtttcactgccttatttatgttttataatacttttataaccactattatatcacatatttgtttttatataatcattcacttatatttatgttttcccaactagattcttaattttctcaagaagttaacagaccaattatatatattgctttagattcatgccttctacaaagcctaccacaatatttggtatacaataagccctcaagaaatgtctactgaattaagttaaacatgattctagaggcctgtgcaatagattgttggcatcatccaggttctcacaatttcattgcatattcttcagatcaacatttagaacgacaattagattacagagcataattttccccaatgggtggggcattttaatcagtcttgcccattttttttttcttgtgatgtcattggggtgccttgaacatgcagtcaaattccacacacagagcagtcctttgttcttatcaacatctcacagcctgtgaagctctcagtgtgcctctgtcctttgccacaaacatgaggttcacattccctctcatggctatagtcctggaaattgccatgattgttttatttggattatttgttgagtatgaaacggaccagactgttctcgagcagctcaacatcaccaagccaacagacatgggcatattctttgagttatatcctcgtgagtaggcaatttactacttactatacatttttcggttcttcggtttctcagaatgtaaaacaattgaatactataaacccttgagctctttgtagaattatatgatggttatgagtgctaaggatattacatgtttgtgatgtgacatctggtcttcttctctgtgattaaggtgcttggttggaactttttcctattaaaatatcagaacaagaagctgaaaattaaaataattgatgccttttgtattgcttatctactgctaaatgacctttttccttcagttggtcactagttctgcaaagaaaagtatcacgcttcctttgcattccccactgaaagggccaaaggtaactttggaggagagagagttctaagaatggagttataagaagggaaccctagatttcatgtgaggaccctaaggaataagaaggggtatttagtatgatgtaggaagttaatggagttttaatcaaaaaagtgtactcagagttttacaatattctgaaaggaagtcggtttgttactttgagatgaaaagaaatgtgtgaatacttaacatattttaaaaacaaaatccttccttgggaatgatgattgagcaaagagagaaatttaattcaagtttggaagggtaggctgtaaaatagttaatataacaataactaccatttactgcgtccttattataaaccaacacatccattacctcattagccaggaaggaagacagtagtatgtcactattatatagactatttgcttttcttaagtaaggttcaaataatctaaaaaatttaaaaattatttaaaatggtataatgtttatt

SEQ ID NO: 10963 - DNA, 6000 bp, Homo sapiens
gaatcaatatcgtgaaaatggccatactgcccaaggtaatttatagattcaatgcctacccatatcaagctaccaatgacgttcttcacagaattggaaaaaactactttaaagttcacatggaaacaaaaaagagcccgcatcaccaagtcaatcctaagccaaaagaacaaagctggaggcatcaccctacctgacttcaaactatactacaaggctacagtaaccaaaacagcatggtactgctaccaaaacagagatatagatcaatggaacagaacagagccctcagaaataatgctgcatatctacaactatctgatctttgacaaacctgagaaaaacaagcaatggggaaaggattccctatttaataaatggtgctgggaaaactggctagccatatgtagaaagctgaaactggatcccttccttacaccttatacaaaaattaatttaagatggattaaagacttaaacgttagacctaaaaccataaaaaccctagaagaaaacctaggcattaccattcaggacataggcatgggcaaggacttcatgtctaaaacaccaaaagcaatggcaacaaaagccaaaattgacaaatggggtctaattaaactaaagagcttctgtacagcaaaagaaactaccatcagagtgaacagacaacctacaaaatgggagaaagtttttgcaacctactcatctgacaaagggctaatatccagaatctacaatgaactcaaacaaatttacaagaaaaaaacaaacaaccccatcaaaaagtgggcaaaggatatgaacagacacttctcaaaagaagacatttatgcagccaaaaaacacatgaaaaaatgctcaccatcactggccatcagagaaatggaaatcaaaaccacaatgagataccatctcacaccagttagaatggcaatcattaaaaagtcaggaaacaacaggtgctggagaggatgtggagaaataggaacacttttacactgttggtgggactgtatactagttcaaccattatggaagtcagtgtggcgattactcaggcatctagaactagaaataccatttgacccagccatcccattactgggtatatacccaaaggactataaatcatgctggtataaagacatatgcacacgtatgtttgttgcagcactattcacaatagcaaagacttggaaccaacccaaatgtccaacaatgatagactggattaagaaaatgtggcacgtatacaccatggaatactatgcagccataaaaaatgatgagttcatgtcccttgtagggacatggatgagattggaaatcatcattctcagtaaactatcgcaaggacaaaaaaccaaacaccgcatgttctcacttataggcgggaattgaacaatgagaacacatggacacaggaaggggaacatcacactctggggcctgttgtggggtgggggaaggggggtgggatagcattaggagatatacctaatgctaaatgacgagttaatggtgcagcacaccagcatggcacatgtatacatatgtaactaacctgcacattgtgcacatgtaccctaaaacttaaagtataaaaaaaaaaaaaaagaaccataccatcctgtttgggaacgatgtgtataacttcagtgttggctggcatcatcagcctatgcatacacatgggggcatatttatagttgcacccacattttgatggctttgaactctacattgacccatgtgtgaacttagctatctcttagagcttatctattctagttagggtctcattaggacctagagagatggcatgtgtagactgaaaaattaataaagaaattatttctaagaggtgtggccaaggttcaggaagagcaagaagggatggtgcagtgtatgcaagctaggaacagtaggacctgttaccacccttaggcctgaagaaataaagagaggaggggcactagaacctgcagagagagtgagagaatgagagtgagggtgctatatggaaaggcccctctgtcagaagctgagatctagtagggatggaagtgggggaaaatactcttatcacatcttgtctctctgccccttcctctgggttcctggttgtggcctccatttgtgaaacacttgtgggcaataagtgcattggtgcagcccacacaggtcaccttccaagggcacacagcagggtggagaagggtagagagtaggtctggagggttaaatgaaaggtatccagcatgctaatttcagagtttcttagatgatgctcattttgtccttcctcttctattctggcttcctttgtttaatatccatagcctgtgaacccttctaaagactcttcacaattgacaccattcctggggccactaatgcaaagtccaaagtgcctatcaatagtgttctcctaccacagggttcctgtgttagtctgggtcctctgagaagcagatgctgaaacaggatgaaacgtgcaaggattttattaaggtggtgcctgtgagaaaagatgggttggaactggagaacactgggcaagctgccagtctgaccacagtgaaagagagggggtggaagcatcctaggttgccacatactctaggaaggttcagcaaggtcatcaggcaggctttaaggcaaagttgctgttggaggagtcctgtgtctcctctggatggacctgtcttactatccttccacactcagtccttggctgggagcagcatgtagaagcgtggccttggtccaaatgcagtgatgaattttatggcaaagaaactaggcccttgatcttttatgcttcttgtaattggagatctgcaaggtgcattctcatgggcccccacagttttccaggaattcagagcagtgttagaatccaagagaaaggggtcagagattaaccctctctcctgacctccctgagtttgcatcataggcctgagtaacaatttttgtgctgagaattttataagcactcataggaattacttcttgtagagtgttgtcaatgtctgtggtgggcatggctaccctccttggaatagcagagaaatggtgctcagcctgcctcctgagaagcattttcagagacttgagctcaaggctttagaatttctatgtgaaagaggctttggagtgtaaggggcttatattccatggacatatcccaatgacaggaatactggaggctccccaaagcttcatgtggtatagccactttctctagagttctacaacatttccttttaggcctcaaggcaagaaatgattcattgtcctttatttcttttacaatagagcttgattgtccaccacgaaatacctataacacagagcacagaaaccaaagtcctgggtgtcattaggattcttttagtccatagtagagaggtggctgtctcctcataagaaaattggggtgattttaggatgcggccttgatagctaggctgccaaaaatacttataaatatttattataggccttttagccaaggatagatgtggggctaatttatggaaacctcttgttgaaataacaagaaataaaacataagtcttaggaaacttatcaggagactctacaatataataaaataatctgattatatttctgtctcctctgccagatggtaagcagtttgaaggcagaaactgtgtcatactctttaaaaatataactttgaattatctaagtgattcatatcatttttataaaaataaaagttactaataatgttgaaatctcctttacccccaaactagtcttccccctccttcccattacccacatgccaggcacacaaatgtggttcaaatgatgcttgttgacctgcatggaagagatccagagtggaaactgagagaggttcagcaggcaggcagggtggtggggtgactgaccccctacctgccccaatctggccaagcaccctctctctacaccactagcttcagggctacaaaaatttttcagcttgtcacgggttgccaaactgtgatatacagcagagttgatgtaaacttccacactttctagaggatagttttactactgtcatcagagttgtggtcgtatttccatggctttaatctggttttgctggagatgcttctccaggtctactgctggtccttgaaggtggagactcagggctatcaaattttaccaaaatgacttctccctcaaaggaaagggagaggatagaagataaggacgtcttctggtcaggtatcgccagacgtagacaaacatgatcaggaattgggggatgtgaatcagaatgggcagtgggacaggaacagagaagtcagacatggaccaagtaagaaggtgttgttgaccttcctaggcccaccagttcaaccgatgactgaggcccatggtctgggtacgactggagggtgatgagtacaagtcaaggacctcctcttggttaaaaaagcaaggtcaagagggaggatgaggagtagaaaaatgaagagaatcaatcaaccctttctcagcaagacttggaccaagttacttcccttctgtacttctttagacccatacccctacagtgggtatatgaataacagcccataacctggtatttacgagtcactcttcgggatgaagagtgagagactgttcatgaatggggatctgccctctagtggtcctttctcttgagccctctgttcaatcgctgatttgctggcaaattctttcaatgttgaatgcctgtttgtctcactgggtggacttttacttaaaattcttatctggggcacatgcagtaagtggagaaaaatgtaagacacttttcctttggtcattactaacaagccctgaggaaaaagcctgagtggcttatgttaatcattaaacttacccatggtcaggtctgaacttttactctggtacacatttggctgggacacaaacgagttaggtgagttatagtctaacgtgagtgagttacctgcgtggtggctgcaggctgagctctaaccagataacatgtccacggattcttgacagagagaaataagatcacttagaaagaaaggatcatttctcccttgagtcacaaggagacagaaacagaaaaaaaaggtactgtttgatccagaaaagtctctgctctctgttttctaggtgttgtatctcttgttaacgttctggtgaacaaaaggaagaaatgggagatctatagtagtgccttgcaactttgtccctcgatgtcccaaaggagaagctgagagggaagggaggaagaagggaagagggagtgagagcagagagaggagagagagagaggagaacaaaaacatgactaaataaatgcacacagctctcctctgtggttgaaaaattttagttatgagaaataaagagagtctgagtttatttttaggaagaattagtggatagactaataaaaaattacatttataattgacatgaaaaagatgcagttccaaatgtagggttttaagaaaaccagtgtgcgaatgtttatttctattgttctgagcttgggagtaggcattaagaagaaatgttaaaatcacgtagccagattgaaaatagactctcctgtgctgagtatattttgtctgtgtaacaagcaagtcagatctcatgcttttggactaagcagcaaatacgcttgggtacttttccctatgtggtagatgtattctgaaagttgtatatttataagttgaattctatttcaaatagacgtaaaagtttgggaattttgcaacgaaaaggaacacttgctgaatccacttgaaaatactagaattcctttcttaaatccaagtagcctccacacttaccctatctggtaatgactcgggggcaggtacatagattgtttgttttcccaacttttagtatagtgcttagcacgtagtgggcatacaataaatgtttgcagtgttgaattaaatagaaatgattatagatttccagctg

SEQ ID NO: 10964 - DNA, 6000 bp, Homo sapiens
ggtgacagagcaaggctccgtctcaaaaaaaaaaaaaaaaaaaaaaaaaaaagttgatacagccgaattgttggcagccatgactaggcaggcagagagggacacaggtggtgcctgcctgacagtgctgtgctttaggaagcctgagcaagctgaagtatggtccagcaaagggaaccctgtgctgagagcctgactggctggtctgagcccagcttcagctacccactcattatgtggcccttggtcattcatgtctcagaacagctacaagaaagggctggtaataactgtcttgcctccctcacagggtgactggaaagtgcaatataaacgtaaggggttgttatttcctccacatccagatggaactgtattcacccatttttaggtccctgatccatctcaggagagttttcccttttgttcctattgctggagccaccctctagcctcctcctcagtttcatcactgatctcccgtagctcaagtattttcagtatttccctctctcctgggtttttcctctctgtctccaaatatgctccaatctcaaaaattaaatataatttaaaggtccttccttagatcttccatagccctcaaaacaccatccatttctctttttctcacaaaacatttttttacaaacagacgtttttacccacctccttttctcaacttctacctactgttaagcccactctaatgttcaattaagtggtctctaaaagccacgatggctgaatctgggagtttcatctcattcttgttctgcctgattcaacctgtccttaacgaaattcttatgtcgtggcttcctctacgccacgctttccttttcctcatcttcccccattccgagtgtcggggttcactaggattctgctgacctcagactttttctcattctctcagaacacttatataacctgatgacctcaacagtcctactgaagatgaactgaaaatactttagttgtgattttccctccccaagtccaatccaacagtttccaactgagctgtcaaagtgttccatggctcctcaacctcagcttgttcaaagcagaggccatcttcttctcctcccttaaacatgctctttatctgttattccaaataaattttttaatggtcccaccatcatttatgttatcccagatgcaagttctgactcattcaactcccttttattcttactgctactgttctttgaggagtgctagccagacgcagtggatcatgcctataatcctagtactttgggaggtagaggcaggaggatcacttgagcctaggagttcgagaccagtctgggcaacagagggagaccctgtctctacaaaaaatagaaataaattagccaggcatggtggtgtgtgcttgtagtcgcagctactcggaagctgaggcaagaagatcacttaagcccaggaggttggggctgcagtgagctgtgattgcaccattgcattccagcctgggtgacagagaccctgtctcaaaaagaagagagaagtgtccatttctttactggactgttataatagtttccaaagtggtcttcctgtttaaatcaggatggtcttccatactcctgatagttctcctctaaagacagatctggtcatgcttaaaagctttccatttcttgccaggcacagtggctcacgcctgtaatcccagaactttgggaggctgaggtgggtggatcacctgaagttgggagttcaagacaagcctgaccaacatggagaaaccctgtctctactaaaaatacaaaattagttgggcatggtggcacatgcctgtaatcccagctacttgggagactgaggcaggagaatctcttgaacccgggaggtggaggttgcagtgagctgagatggtgccattgcactccagcctgggcaacaagagggaaactccatctcaaaaacaaataaacaaaaaacaccaactttccattccttcccattgtttgcagaataaagtcacaattctttatcacagcatacaaaacctgccacaatccagttctatcttaactctccaaattcatctatcactccttttctgcattctctgtcagtaccatttgtcaggtaaaggcccagcccaaatgacctcctcccttacaccccagagagaattaggttaccttttccttgtactcagagtgtgcatatttcaggttgttcttagagtcaccatcatcacactgaattgtaatgatgtctcagtcaattctaaaagattgtaagctttagcagtgtgtattagctatctcttgctgtataacaaattacaataaaatttagtggtttaaaacagcaaatatttattctctcccaggtgcagtgggtcaggaattcaggagtggcttacctggctagttctggctcagggtctctcatgaggttgtagtcaagagattagcaggggctgatgtcatctgaaggcttaactggggctggaaaatctgcttccaaggtggcacactcatgtctggcaagtcagtgatggttgttcgcaggaggtctcagccatatggaggatatgcctccacaggactatgagtatcctcacaaagtggcagctggtttcctccagagggagtgacctgagagaaagaaagcagaaaccctcaaatgcctcttctggcctagtcttggaagtcacataccatcacttatgctaccttctatttattaggagtgagccactaagtccagcccacactcaaggtgggggaacgaattgcctctttttgaaggaaggaatgttgaaaaactggaggacatatacccatatgccacgtaatgatattcaggtcaaacaacatataaaacagttgtttcataagatcttaatggagctgaaaatttcctatcacatagtgatgtcgtagccactgtaacattgtagcgcaatgcattaaccacgtgtttctggtgatgctggtgtaaacaaacctactgtgctgccccataatatagtttagtataaatgtgtagcaaaaggctgggtgcagtggcctgtaatctcagcactttgggaggccaagacgggtggatcactgaagatcaggagttcaacactagcctggccaacatggtgaaaccctgtctctactaaaaatacaaaaattagcagggggtggagggcacctgtaatctcagctactcaggaggctgaggcaggagaattgcttgaacctggaaggaggaggttccagtgagccgagatggcgtcactgcactccagcttgggcaacagagaatccgtctcaaaaaatggcggatcacttgcggtcaggagttcgagaccagcctggtcaacatggtgaaacccccacctctactaaaaaatacgaaaattagccaggtgtggtggcacatacctgtagttccagctacaggctgaagcatgagaattgcttgaagccaggaggcagaggttgcagtgagtccagatctcgccactgcactcctgcctgggcaacagagttaagactctgtctcaaaataataataatagcagtgggggtaacttaaattcaaccatctaaacctataaagaaaccaattgtataaagttcaacctcataggtgtggccgcacgttgcaaatttgaacacatcttcacaggtggaaagtcgaggtgcttcagagttcttgatctttctgttcctcacaagacgaaggttcaactttgagaaaggtcagccttgaagttaaatgaggtttagtccaatctaggcattactttgtcatttccttgagagtcagataagggaattacagacccaagactgtattttaagtaaggtggagtgcagattgaggaagtaaaatttctctaggaactccatcctgtctcaattacattccaccgcgtgccacttttaaaaaaccatatttatttagaagtgaaataactgtggacctaataaaaaatggaataggaattagttttttttgttcattacgtatttctgcacatctagaaagtaactgactgcttcattactggtaggattaaatccaatatttgcgaatataatttattaagaacaccttttgtccttccaggagtacttttaagacttaatattaaatagaaactttcagtgagaaagttccttccttttttgcttcttctgtgtttattcttccacttcttctgattaatatgtaaggtagactttcggtgaaatgtgtgtagctaattaatggtggcatgagggtcccaaaaattactgggcaaaactgcaatcatccaccctctccccgcattggagcgaaagctcccctagggcagggtctttcggtttgttgatctacctgaactgtgcctagcccactgcaagttctcgataaatacttgagtaatctccattcactgatcgtccgtgcagggcgctgtggccagccagaaggccggttcgcggcttccctgcttccgccgcacccgcgccgccctcagcccccggggccacagcccgcaaccccgggagcatccggctgcccggccacccccggggcgctcgctgcctccggggcctgcccttcccgcggaggaaggagcggagcgaggagtgggaaagctgggcccacttcctgtccgggcaggcctgggcgcccgcctcctccgcggcctgctttctccaccgcgagcggctgagcctcgggccccgagaatgcggccgggcgcggcgctggcgcgggacgaggaggagccgagccccgctcgccgcccccgtacgcctccgccccggtagcccgcgcgtgcccagcggctagagggttaagcccgcggggggcggggccaggcgcgccgagtgcgggccgcgggctgggcgggggctgggcgggggctgcggccgggggcggttacgggcggccgggggcgggcggaggaagggggcgggccccgaagttgttccgcgctgggcgggcgagcggctgtgggagagcgggcggcgggccggcgggcggaccgggccggtgctggagaagtttgcgctgcggttcgtgagcgcagggtgcgggccccgccggccgctgcgcgcccgctgccatggctttccgcaggaggacgaaaagttacccgctcttcagccaggagttcgtcatccacaaccatgcggacatcggcttctgcctggtgctctgcgtcctcatcgggcttatgttcgaggtgagagcctggggaggagggagctggagggacagtgccccctgtcgtgcaccgcccggcacacccctgcaggtcagcgggccctcctctgatcggaggctcctggctgccgtgtacgttatctgcaccccggctttgtgcactgtacccctccggcctgtaccccggccagcccagacagcacccccagctccgcgccgtgccagccatgccatgctctgccgcccccttgggcactcatcgtatcctgcagctctgtctgcagccctgaaaccccagcctggcctcgaaccaaccgccgcgctgccaccatggcttgacgcgtggggttccctttctggcgtccaggagccaagcccagagactcccagacccgcagtcattgcacaaccccctcttgccccaaggggtggccactagctcttctgggcttttccagtgggagagacccagaaccttttccacttcctatgtgattttctgggtgttttgcatctcagctctggaacgtgctcggatgttcacgtgtggccctggccccatcccagcagtggccttctgctctcgtctcgctcccacttttttgctgtgctctagaaggccaatttttggatatcctttaccactccgtgaactgtccctttagatccatctgcggcgacccagagcttcaccccctttacagagacaagaagagagacagggataccctccactttttggggaaagttgattctcttatagtgtaggagtggggggcagaggatggggatcccacccccaacagcaatgtc

SEQ ID NO: 10965 - DNA, 6000 bp, Homo sapiens
gaaatgacagtgatgtagcaaccagcatgaagcaaggatgtaagtcttggagatttctgggttagattattctaggcatgaggtaaagagtaaatgcaaaggccctgacgcagtctagtacttggtgtgctcaagatatttcttggggccattgtgggtggaagacagagtagctgtttaaagtcagagaaatggcaagttgcaaaatcatgaaggatcttataggccattgtaaagattttgacttttactatcagggagatgagaaattgctagatgacattgagcagacatgtgacgtgatttggctttggttttaaaaggatcactctggcacctggtttgggaatagactgtaggcagcaaagacagaagtagaggtctggttagaagaccattacaacattctaggcaatggttgatagtgacttaaaccaggtggtcatgttggagatggtaaaaagcaaacacattctggatatgtttcaaaggtcaagtagtagagtgttgctgatgcactggatgtagtaggtgagaaaaaaagaggagctaaaggtaactccaaggtgtctgatctgagaaacggggtccatagaattgtcatttacaaatctggggactactgtggaagatcaggtttgaaggccagttaagagttcattttttgttatgcttaatttgagatgtcttttggatatctcatttatgaatatatctcatttagagaagtcattaataagtagttaagtacgtaagtctggaaatcagggaaaatgtgtgggctggagaaatacacttggaagtcagccgaccatagatgaaatccaaacacatgaaaggggatgatatcacctgcaaaggaaatgtggatacagaagactgggatgcagatctctttcattgcccagtcacttctggagacagtactaaagagtgtaaaaggaagtggagaagaaaatctagagaatccagaaattgtacaaattgttcattcattaatcgaatatttatgaacatttgtgatttgccagaaattctgctagtcattaagaaaacaatatagcagaccaggcatgggcagtgtcttcaagtagttcatgttcatcaagatgaacactcaaggacaaggacagagataaactgcaggacatattgttgaacagcaatgaagaaaaggaatagcaaagtaacaattgaagtatggaactgactccaaggtctgaggaggacaagaaactgcctttaatctacctctgcctccgacaaagacaagccaggtggcctgtgggaattctgggcagcaagataatagaaaacacaaattagaacagaagaaaaaaggattgtggggggaggcggagaacgtaggaaccaacagagactgcagtgtcatctttagcataaaatagctgctacttgacctatattttagtcaactttgatatgtccagaggcaaacattggcttatatcttttctggaaggatgtgtttcattatgtcatgcaaatacgtcctaatgaaacaagtttcactaatcagaattgtattctaatgaaagttccaattgtattttttaattcaactgcagctgctataacaataaaacaaattgcctaggatgttaagtactttccttttcaaaagcaatactgaagcaaccttctaatacacttagaagtgtgtggtttgaggagatttgagctcaatgatgaaaactaagagcaaaaggaaaaatattaccagaatttaaaaacaaatagaaggccaggcacagtggctcacgcctgtaatcccagcactttagggggccgaggtgggtggatcacctgagttcgggagttcaagaccagcctggccaacatggcgaaactccatctctactaaaaatacaaaaaaattagccaggtgtggtggcgggcgctcccagctacttgggaggctgaggcaggagaattgcttgaacctgggaggtggaggttgcaatgagccaagatcgtgccattgcaccccagcctgagcaacaagagcgaaactccatctcaaaaataaataaataaataaataaataaatacatgaaggagaaagaagaaaatattaatagttagctattgaatgaagataattcaacaatcatttcttgggggactaccatgtggatgctatgaacaaacaggtaatagttacaaggttttgttaactgtaccttacatgggctcacattgttggataggtgggttagaagggcaaggatggcttcagcacagtttccagaacccagctggccaggaatctgattctgatgctacctaaaacaggttccttgagccctgttatttagtaagcctggcattggatcctaggtattcttttgatttatttggaaaaaatcccacagttaagttggggagtcgtttcggctccactgtttttcttacagctttactcatgagtgcaatgatgcagaaatacgaagtaattgttagggtgggaggaagtttcccccagagatatatgacacatgataaacattacattgtaatatgtaaaataatacatttgcatatatatatatgttctgagaactctaagtctctggctggagaactaatgagaacatgaccgtaccaacatgtttgagaggagttaataatctaataatcctgggatgtgactatctgacagaggattggaactctggagctgaaaagtgatggtgatggtgagggggagtaactgttcacagattcactcatctaacacgtatttattgagcccttatatgccagggattgtactaagatctacagatcaataaggagcaaaattcaacatgttttccccttcaacggagtttactacctaaagcggtggtctttaaagtggggtacatataccccaaggattgagtgagatgatgccatcagaaagcaactacaatacagggtggtgatgctataatggaaaccaagatacacacatcaacaaagaactgtgtaaaaacgcagcctttgggggatgggaaaaaacagcaaaacgtcatacttaatcatacaataagaaaaatcacttgatatttaatgcatagcttgacagttatataagcctgaacttaaagatattttggtcaaatgggcttaaaacattttattgataggtaagcacaattcaaacaagtgcggcgtaaaacttaagacttttggaatctcaagttaaattagaaacttttaaaacctggaaaggcaaaacttagatgggatgacagagatgaaccctggccttggactactggcagaagcgtgaagaatgaaggagatatctcaaaaaaatagtctatgccaccagcatatgcttttctcatgtcccttgatgtccatagcagcatttaccactctgcattgtagttgcttcctgactgtatcattttccaggcccaagaagtccttgaaggtttcaaattttgaatacctaacatagtatctagcaaattgaagtcattcagtgtttgtggagctcaatggcaactgacaatctcgattctttgtatatgtttaatttacttaatttgtacatggtttgtatacttgcattcctattgcaatggcccactgcctggaacacagctggcacgtgataagcattacattgtaaatatgtaaaagaataaatttgccggccaggctcggtgactcacgtctgtaatcccagcactttggcaagctgaggcgagcggattacctgaggtcaggagttcgagaccagcctggccaacatggcgaaacctcatctctactaaaaatacaaaaattagtcgggtgtggtggcgcgtgcctgtaattccagctacttgggaggctgaggcaggagaatcgcttgaacccggaaggtggaggttgcagtgagctgagatcgcgccactgcactccagcctgggcaacagagcgagactctgtctcaaaaaagaaaaaaaaagaaaaaaaagaataaatttgcctacattaaatagccgactgttaggtggatgcacatagaggagtaagaatacagcaagaggggcacacgaagaaaggctaaatctctggggtttgaatggggaaacagtaggatacaaagctaatgaaggtctttaattatccaaatatcagtgaaaaacagcaaggatcttccgtttatgccctgaaccccctttgtcttaagtgcttaaatatgcttagctgaaaagacactgattccatctttcctcatttaacaatcctttagaataatttctagagtagaaatggagttgatagtggcttccaaagaaaaatcagaatccctaagaaaaatacacggtaaatcctttgcaagggagttatggttacaacagttttgagtcgttttgttcttgttcctttatcttgttcaactgcagaccttcactccggcggtctccgtgggcatttaaccctttcagctttaacgatgaagtggatccccttcagcatgacataactcatagaggagaccgtaacgagggtgggcttctgccacccaaatgcggccacagactcctgccacgcctggcagtaaaaaaaccagagttcagggcatcgacaacttcaccggggctattgcgcaggctctgcgttccacgcaggcttattaggaagaaaggggaaaaaaatttcccagagacacgtggaaccgaggggccaaccccggcctaggctctccaccgcatcggattctggaatttacgatcacgaaagttctattgtcccgcgattggctcccgggccgcatgacatcatagcgcttgattcatccttcgggtcccgattggctggccgcgccattgtgacgtcacggtcagcccacgttctgattgtagatagccggcgccttcctcttcccatcgcgcgggtcctagccaccggtgtctccttctacatccgcctctgcgccggctgccacccgcgctccctccgccgccgccgccttgctgctgctcaaagctgctgccgccccttgggctaaaaggtaaagccgtcagctccgggaaacttcgtcgggggccgccgctcggccatgacacccgcgcgagcgcgcggccgggaagcggtcagagagaactgccgttaggtctcggacctggtgccgagaaagagctgccggggcaacccgcgctccgcccgcggcctccagctccgccggctccggggtacagcccggctcctcgggcgcggggaaaggggtgcgggtgcgggcgcgggcggctcgccccacgccgaggctgaggcagggcgctcgggagcgttctctgtgctgcggtcccacctgtgcgcgctgacaggcgccgcggggcacgacaccgtgcccacaccagacgcggagggatggatctgtccgcctgggtcctcccgccctgcgggccggagcgcgcggcgggagagccgggggagcgctctcggagggagcgcgctttctttggagtcggcgaaacccgggtgagttcgaagagcctgtgcgagggtctgcgggcaccgggcgccgctggggggactctccggcctttcctttttgtcctgttctctccgcttccgttaaccctgcggaccttccgtccgcccctcggagggaagcctgctagctcgggaccgcttcagtttttattgaaaccagacaacggcagcccttggtactcagggagggatgaggctggtgggaaagcgagagggcggggactcgggggcgaccggggcggccctttctgggagcctgatccctggagaggcgggagcggttggctgcgagggaggcgcgcggcgggggggcggttgtgctctgcgccgggggagctagagtgtgtgttgtcttgcgagttgtaaggaaaagtgcctttttactgtttccacgccggtaagactctcccaccccaccacctcgggtcgacggagcaatgcctagagcaagagttgttcttgctgaactgcgtcttgcaaccgttccgtgttcttgc

SEQ ID NO: 10966 - DNA, 6000 bp, Homo sapiens; identical to SEQ ID NO: 3444

SEQ ID NO: 10967 - DNA, 6000 bp, Homo sapiens
gaccctgtttccaaatacggtcacattctgaggtactgggggttaggactttgatgtatgaattttgaggggatacattcaacccataatattttgcacaaatcaggcacttgatgtagttcttaaaacaagagcagttggaagcagtattatcttggcaaacaagtggtagaacataacctgttttacatattttaattttttatcatgggaatgttgacacatacgcaaaaataggcccaataatataaggaaccccaggtcttcatttcctagtttcaacaattacaacccatggccaatgttgttgcatgcccctcctgtaagatagagggagattctcttacaggtatgaactacagtgtctaaaattacattcatctacattatcttctttgattttcataacaaccagaaaggtaggttatgtagttttacaataaaattcatgtctaacaaattactattttaatgtaaatgccaatttttaagatagtgaggggaaaaagaaagaatgccagtatgtctttatgcatgttttattggtttttttgtgcattctaatccgttaataaaaggaaaggaaggaacactggtatgctatatcgtcagctcttattcacactgaatggaattagttttcaatggaattgttaaggtaaattgccaatttctacttttctagaaaatcacttttactgaaaaaccttgttcctaacccatcctataaaaatgggattttactgaactacctctaatgtcacattttgtacataatggctgcaaatgtctaaaatgttaaggaaacattataatttagaacaattctaggcaaaaagagatatttgtagaggatccggatgcataaaagaacaaatgagccatttaatttgtagtttagatgtcatttttctgacagttatcaatgaaactgtcatgtatccctggaatttggggctgttagaattatttattttgatatcattctttcacataattgtgtctgatattttaacagaaggtatttatgttcgcatgcatgtggacattatcaatactttcacgttacattattactcatacatgcattagttctgattctcttcaaaacctaatttgcataactacaatattatatatttataaatacttaattttgtacaatccttttcctacttgactaagaatatcaaagatgtccccaaatgcttacttgaaggttgatttagtcacactagcagaaccccaggctcaaatgtcaaatgggatcatttctgtacagtgcagtaaccatattgcagtctttctgctgctgaagttacagttgcatattactcatcaaggcaaaatgtaaatgtttagtgattatatgatatggtttttgttaattccccaaatgggattttttttacctttgtttatttgagaacaacaactgaatgctgaaatgcagtggctgatgccagcaatctaaggcttcattagtacagacgaagcaatgctcactttgctacataaataattagagagattaaatgaaaataaacactgagaggatgtgcagacgctccgaagttaggtaattattttaattactctagtgacttccagcaaccttcattatcagccacagatcaagcttaaattgttttatgtaagaatatcataagctatatggaaaagtaccatagcttacttagtgattatgcttcataaaaatgacattttctccaagctcccatttaaaggagttgtttccattccagcccctgatagactcgtgacatatttttaaagtataagtttttgcacttaaaaatgttttgccctggttttgtacttctaatggacatccttaatgataattttcgtatctttatatctttgctcagatttgatcataagagattcggggccacatattgagtggcttaatgtaaaacaatatggcatattcagccatctgaaataaatgtcacttggaatcatgtcatccttattgcatgacaagctataccttgcatttggggtaaatttatttcttctttcttccactccctagaccaacttgggaagactctaacatacactctaggaattatcttcattacaagcagaggtactatttagaagcattatcagtcctgtttagatttcattttatattcatttgataacgatgatccatcaagatctcttgtgttaaggtgttcttttgaggaagggttatctgtattgaaatatcatttattgactgcctgtgtaataatggctcttcttcaaactacccaacatacaccatttaatccttgcaagattcccatggagtatgtattattaaccccattttccagatgaggaaacaggccttgggaggttcactgattttctaaagttgcacagtagaaagtatcccagaggggactcaaacccaggtctgcctgactccaagaaccatgaagctccccaacagatgactgaatgaaataaacctgggtacaaatgctaagggtaatagaaaaaaatgaagtgacagtctgtgatgtgctaattaagtgttgtgttttatgacacccatgaattctgggcatgagctaaagtctcaaactgcaaattcaattgattttgaaagtgctttgggctaggcacaatggcttacatctgtaatcccagcactttgggaggccaaggcataaggactgcttgagcccaggagttcaagaccatcttgggtaataggagaccccagtctacaaaaactaaaatgaaaaaattagcagggtgtagcagcttatatctgtagttcctgctactcaaaaagctgaggcaggaggattgcttgagcccaggacatcgagactgaagtgagctgtgttcaagtcactgcaccccagccttggcattgaagagagaccctgtctgtctgtctttctctctctctctctctctcacacacacagacacacacacacacacacacacacacacacacacacagtgtttcatctctgaatagccctggttcctggagaggatgtaatagcaaataggttttatggcatagttggaccaaccaaaagttccccactaacaaaggttagtgatgtttttagtacaattcagtaacaacatgaattttattccagcaaacacaaggcattttaaccaaatttaaaatttccaacaggatgaaccagacttcagtaacttaggggagaggggtgcactgcttcctaagaaaaaccttttcttaaagggaggccttgacttctttcctcttccccatcctggcatgatgctggtgcagaatacatttccaaggttgtgttatattcagaggcacattaggctattcgagagaatgggaagaggtctaatggcttcgttgttttctatgtttaggatgcactaatctgcagagtttaatgtatgagttgtggatggcacagggaagttgggacagaaggctagctctagggagttgttggggtggctgggtgttagtctgaaatttcactctcacgtttcagaatctgaagaggaagttagggaaattcacagatgagccaatgccttttaacaggtggggggttcaggggtaggactgggagaagaggagctgtcagaaaagctggagagccattcgccccagagctctcagttgcaccagaacgcacagtcggagagagatttatttgtgaacaagcccgagaaaggcagacaacccagacaagatgggctcagaaattatttatcataggctagggcagaacagtctggagctttccttctgctttgcaagcacttccctgggacctgcctgggaagcacagcccttcttcctggtaagttacagaaggtcaggcactcagctagtaggccagctagacagcaaaaagtgtctaaactaagtgccaactgtttacttggggtcttccagaccctatcatggttctattcgtcatggtacactctgtttgatttcaatcgcaccatctttatatgtaggaaggccaaaccggcccggctgtgttgggtgggatttctgcaggccatgcagtgaggacgccactagctatagacacacgcaggagacccacgttctatttccatatgccacttgccactgacctcagagaaatcattttaaaccctgaacctcagcttccttatcctgaaaatgaaggccattctacttcttaggccttcttgacaggagccttgggagagccaaacggagtaattccggtgacagcgaagaactgggagggaccgtgactccaaattactgaagaaaaataagttaaacatgctcggctggagttttaggaattccacccgcccccacccgccatgatcaaactgcagtcaggcagcagccctccgaattgattctttcttatggactgtctcacatgccaaacacctatgtgcagcacccctccatctccgtgggctcctattgatgtctgccttgcagtgaaagcgctttttgttgccgctgttcgatacaccccagcacatcaacgcagcagctgggagcaggaggaggaatcccttcgctttctcccctcctttcactccgaaccctaggcatcagcagcaacgcgcgtagcccggcaaatttccgcacgtgaatggattttcctggctcatctccaaagaccttgcggtatttcacaaagctgaagagaggtgaacgagcatcaccccctccaggaggtcgtgcagccccgcggggacgctcctcccgctcctccacccgcggtgcagcggccgcctcccgagcttgctcgcggggccgttagcgccagacccggcggagagccaaggggtccctccgcgcctccctctcgcagcccctctccaccagtagcagcgctgctgtcttcccacaggaggacttgggaggacgctggattctgcagcgcccccgccccctcgctttttctttctttccttgctttgggatcttgctgctggatccggagaggttctgagaagacaagagcaagggactgagagcaggcttccgctgcggcgcgcgaacacagccgggacacaacccccagcgtctccacccgctcctcgccaccccggcgggaatgtgaggaaggaaagcccccagcgccgccgcccgccctcgaaggcgtcccagagagcgtcctgggggcccgcggctggagcccttgtgcccgcagcaccgccggactggagcggcgaggcgcaccgggtgccgcttctcggcttccactcttcagaaagagcgcggtggggatcagcgcctttcccgcactcggcacaactccgggaccggcggcgcgcggctggaccgagtcccgcttcccgccagctcacctggagtcgggggcagcccctgcccgcccgcctgcaccccttgtcgctctagcttgcgcgaacctgccgctcctccacgcccaggtagtgagccccgcggctccaggtctctgcagcgccctcggccccatggacagcgcacccatcaccactccctaagtgctggcgccgccgctgtccaagctgcgcactggggtccctcggctcgcccctctctggggtgtccgagaggccagggagcgtgcaccatgaagtccgcgcttttcacccgcttctttatcctcctgccctggatcctaattgtcatcatcatgctcgacgtggacacgcgcaggccagtgcccccgctcaccccgcgcccctacttctctccctacgcggtgggccgcgggggcgcccgactcccgctccgcaggggcggcccggctcacgggacccaaaagcgcaaccagtctcggccgcagccacagccggagccgcagctgcccaccatctatgccatcacgcccacctacagccgcccggtgcagaaagcggagctgacccgcctggccaacacgttccgccaggtggcgcagctgcactggatcctggtggaggacgcggcggcgcgcagcgagctggtgagccgcttcctggcgc

SEQ ID NO: 10968 - DNA, 6000 bp, Homo sapiens
aaaaattagccaggtgtggtggtgggtgcctgtgatcccagctactcaggaggctgaggcaggaaaattgtttgaacccgggaggtggaggttgcagtgagccaagatcacaccatttcactccagcctgggtgacagagcgagactccgtctcaaaaaaatagaataaaataaaaaataaaaaaaaaattagtaccaacaaaagagcttatctcattaatcattttatattgattacatgttgaactgatatatcggattaaaaatgcatgtcatacaattaatttccccatttttgttttgctttgttttacttttttaatgtggctactagaaaatttaaaattacatctatggtttgcattatatttctactgaacagtgctagtctaaagtgttgataaaggaaaagtatcaactaaagaataaatatgaggccgggcgcagtggctcatgcctataatcccaccactgtgggaggccaaggcgggcggactacctgaggtcaggagtttgagaccagcctggccaacatggcaaaaccccgtctctactaaaaatacaaaaattagccgggcgtggtggcacatgcctatagtcccagctactcgggaggctgaggcaggagaactgcttgaacctgggaggtggaggttccactgagccaagatcgtgccactgcactccagcctgggcaacaagagcgaaactccataaaaaaaaaaagaaagaaagagagagagagagagagacagaaagaaagagagagagagaaagaaagaaagagagagagagacagaaagaaaaagaaagaaagaaagaaagagaaagaaagaaagaaaagaaaagaaaaaggaagaaattgcaaggagaaaacataaagacatgtgagagatgtctacggtatgtgaggtctgaacatgaatggatccagattcaaacaaaccatgtaagaaaaaaaaaaaaaaaagaccaggaaaggagaaaaaaaaaataggctgggcatggtggctcacgcctgtaatcccaacactttgggaggccgagatggttggatcaccggaggtcaggagttcaagaccagcctggccaacatggtgaaatcctatctctactaaaaatacaaaaaattagccgggcatggtggtgggcgcctgtaatcccagctactccggaggctaaggcaggagaatcgcttgaacccaggaggttgcagtgaactgagattgcaccactgcactccagcctgagcaacaagagtgaaactctgtctcaaaataataataataataaataaataacaccaacaatgatcttttatggtagtgtgcaatcaggaaataaatgccagatataagggggaaaaaatgtgtcatcatacttttttttaatcttcttggggccaggcacagtggttcacacctatcatatcaatactttggaaggtcaaggcaggaggactgcttgagcccagcctgggcgtcacagggaggccctgtctctaacaaaaatgtttttaaattagcagggcgtggtggcacatgcctgtggtctcagctaccagggaggctgaggtaggaggatcacttgagcccaggaggtggagcctacagggagccgtgatcacacctctgcactcaagcttaggtgacagagtaagatcctgtctcaaaatcttcttgggaagattataaaaacaaaaaccaaagtacctcctctgaacctagaatcaatgacactgcaataggaagaagtacacccaatgctcagatgttagtttgtaatatcattctccttatagaaatggcaggggtagagaatacacaagatgagcctggaacatcttgttgtaccagaaagtaagggaatgctcaaaaaacacaacaatggaggcatgcaagacacaagagccaactgaaagagctcttagtcaccaaagctggaacaatttgagcaacaaaataaataacatagtgttgggagtataacccaaagtataaaataataaccatgacatcatactaataaaaataaatgattgaataagtaaataaatgtaggagaataaacaaatctcccaaacaaaagaattcttcccctgaaactggtggagtatagataactccccaccccttaagtgaaggctgcacatactgatttccttccaaagagaaaagtaaggccgggggaaaagagttaacttcacagtgaaaacacctgacaaacacaacctcaggcatgcaatgaggcttaccatcactactgataaacatcagtgataaataagttgacagcacattcccttgacattacatgatgagaatggccctttacctctatgacctttccctcaaaaatccataaccccagtctaattataagaaaaacattcaggccgggggtggtggttcatgcctgtaatcccagcactttgggaggctgaggcaggtggaggctgaggcaggaggtcaggagatggagaccatcctggctaacatggtgaaaccccatctctactaaaaatacaaaaaattagccgggcgtggtggcatgcacctatagtcccagctactcgggacgttgaggcaggagaatcgcttgaacctgggaggtggaggctgcagtgagccgagatcgtgccactgcactctagcctggacgacagagcgtgacctcgtctcaaaaaaaaattcgacaacccaaattaagacactttctacaaaacctaccagtactctacaaaactgtcaaggtcagcaaaagcaatgaaagtcaggaactgtcgatctagaggagcctaaggagacatgtaatgtggcatcctggatgagatcctgggaccgaaaaaggatattaggtaaaaattaaagaaacgcaaattaagtatgaacttcagttaataattatctatactggctcgttagttatgatatatgcatgatactaatgtaagatcttaataataggtcaaactaagcaaagggtatggagaactcactgtactatctttgcaacgtttatgtaaacctaaaatttctaaaataaaaaatattaaaaaaaagaattcctctggtttgaagtctttcaagtctgttgcaactatattccctggcccaagttatctataaccttggtcatctgggagcttgttagcaatacagaatctcaggcacatcccagatgtactgggcttctcagagaaacagccccaattgggtagtttgggtaataaagttttggctttcacaatataggctggccaactcgacccaaaacagatgatggtgcacatgcctggagacccaggaggacctgtggtgcagatgaagtctgaggacactctgctggagaagtctcccttgcttgggcaagagaagtgggggagtcggattttttattctagataggccttcaactgattgaaggaagcccacccagattatggaaggcagccatctttacccagagttcaatgattttagtgttaacctcatccaaagacaaccagcaagttaacacataaaattaaccatcacaccagatctgctgaatctgaatctacattttaaaaggatttgccaggtgactctgcataatccagtttgaaaattgcatttttctacaacccttagagagtgtaaaaatctacatggtaattcagtaactcagaaacaaggcttgatttgctgctttaacttgagaacttttctagcatttactgatctggaggtagggatgcctacagaaatcctcgccctcccttctaggtaaaggaccctcccctttgttctcacgtgaacctcactaagcttctaacctggtttactgaattagtggcttgtgggtcttccctgtctacaccaaactctccgagagcatctacatcttattttctacctccacagagacagcctttattggcggatccagatctgccctgccaaggcaagctgggttttcctagtttcactttcagagtccgcaaatgctagcacaatctatccaaattctatcgtggagataaagcatgcacacatacatcagaggattccataggtcgaaccatatgaaactacctatgttgattacttttacctataaaaccagcaacatcataggactcaacaaatttccattgctgtttttccgcctaaaagctattttaggaccaggagcagtggctcacgcctgtaatcccagcactttgggaggccgaggaggattgcttgagcccaggagttcgaaaccagcttgggcaatataataagaccaagcctctacaaaaataaaaagtagaaacaaaattagccagatgtggtggcatgctcctgtagtcccagctacttgggggagctgaagagaatcgcttgagtccaggagttggaggttgcagtgagctgcgattgcgccactgcattccagcttgggcaacagagcaagaccctgcctgggagaaaaaaaaaaaaaaaaaaaagctattttagggacaatatgccgccacagtcacgaggtaaatatgccgccacagtcacgaggtagatcgtacaaaggttgctaacagtatggcaactgaccgctaacaagcgaatgtcaagttgtgaaatgcacaccacccacttccctagttcggtcgaagccctccccttaattatgtgcaattcaagtccccactgcccgcccgcaagcccccactcatcctcgctgcgggcagggtggcccctgcactttacaagggggtgcaggagcgggagacggtcgtccgaacaccggctccccggcatgcgtagaccggcgggcggagcgggctcactttgcgccaatcctacgagaactcccagaactccgcttccctagtccaacccaagccagagttgcccacacctaagatggcggcgggggcggagtcggcgcggccgcctctgggcgggaccgcggggactagacgtggccgcggggcggtgtcatcgcccccgccccgcccggtccagccagctcggcccgggggcttcgggctgtcgggccggcgctcccttctctgccaggtggcgagtacacctgctcacgtaggcgtcatgaggtctccggttcgagacctggcccggaacgatggcgaggagagcacggaccgcacgcctcttctaccgggcgccccacgggccgaagccggtaagcggcggggtcgtccaggggcttcgagtgggcagcggtaccgggggcggcggtctctgggccggcatggcccgggtacccgcaccctgcgccggcgggaccggagctgctcaggcgcgaggggacattaagaggggagcccgttcagagtgccgctcagtcccgcctgcctcggtgcgcagaagcccctcgggaaccccgggggccgcgaccgtgatcgcggagccgagccggggcctcggcaggtgcagccccaccgggcgggggcgggggcgggggcgggggcgggggagcggcggtgcagccggcgctgagctggtggttattttgggtagtgctgagcaagggacccagtggaagaacgaactgggagagaatcatcaaatgaatgggctaaggtccgagcggaggaccccggtgtaagagcaaactggaggagaaacctgcagatcagtaggcagagggctgtccttccctgtcaccgctaggtttccgccactgcgtatccgccagcatgtgacctggtagcttcttaggcggggagggaagacaaaaaaggactggagttaacatttgtgagtatgcagagggcaactattgtataacccagctgatatcttgacattgtgcagtaagagactaaaaacatcgaggacattttttttccgtctggcagtctatgatttaagttaggaaaaggttcagttatcctcaagatacctatggagttctaaagtaatttgccaaaggtcttggaacaaatcgaaaagcaggtacgtcataaagcatcttccctgaatttgagaaaattaaaatattttgctatttgac

SEQ ID NO: 10969 - DNA, 6000 bp, Homo sapiens
gtgttacattcatagtaggtaaccggtaattattgttcaatggggaatgactcatgttcatgttgatgaaaagagtcaaactctataaaatattttaagagatttattctgagccaaatatgagtgacacagccctcaggagatcctgggaacatgtgcccaaggtggttgggatacagcttggttttatatatttttgggaggcatgagacatcaatcaaatacatttaagaaatacattggtttggttcagaaaggcgggacaactcaaagcgggggacttccaggctataggtaaatttaaacattttctggttgacaactgattgagtttatctgaagatctgggatcaatagaaaagaaatgtttaggttaagataaaggatgtgggccgggcgcggtggctcacgcctgtaatcccagcactttgggaggccgaggcgggcggatcacgaggtcaggagatcgagaccatcctggctaaaacggtgaaaccccgtctctactaaaaatacaaaaaattagccgggcgtagtggcgggcgcctgtagtcccagctacttgggaggctgaggcaggagaatggcgtgaacccgggaggcggagcttgcagtgagccgagatcccgccactgcactccagcctgggcgacagagcgagactccgtctcaaaaaaaaaaaaaaaaaaaaaaaaagataaaggatgtggagactaagttttattgtgcggaggaaactctcagcggactgcagagagagcaggttataaaatgtgtcttatcagacttaaaagagtgcctggctcttagttgattatctcctggatctggaaaggggaaaggagattctctatagaatgcggatttttcccacaagaaactttgtagggcaatttcaagatatggcagagagacatgttttggggtaaaacattttgattttcttcctccttatgccagagtcacatgggaaagtaagtcataatatacagggttaaataaaacccatctgatgagaatttgtggtttgtagggcaggactccccagaccctttagatatgaatttgggcaagataaaaaaaaaaatcagagattagtcctcattcatatgttttatgaaattgtttatcataaggactttagagtcagagaaaaagatcattaggagttagtctaactaaagtttaatgatgaaaagactgaggcttgcaattaaagtatttaataataaactaatacagcaactaagatagcaactgtttcctgatgtccaaaagtgactcagaatatgataaagtatggaattatattgaaatgttatcttttacctaaccagtagtttgtaacattaaagttcacatgaaactgttctatatttttataaaattggaagttggttaagcatggctctagaattaacagatgtgtgtacgcacacacacacaaccaaatcacacaaaactattctggcttccctctgtttttgttacttatcgattctataggcaggatcaaagtcagggttatcttgtctgctaaaaagcagacaaggaaaaaaaggaaaaaaaagattgggtaactgtcctctggtaactttgcatcagtaattatgagatattttcacttagtactttcgcatctgatgtccatcttactgacgagacttaaaccattacctacctcaggtttcccagatatttcccacatattccccctgccaattttgttatactgttacaaaaccctccggagtaagtattttccgaaagaaccattttctaattttctaacattacaaaagagcaaggataaaagaaccccaaactgatgttttggaaagcattctactttgaaagtaacttctggttcagaggatgaattttaaaatgtggtaatgtttctggtgtgcctgggaagatgcaataaagtttgttaggtacgcaggcaaatttcagtcatttgtatgtcaggataatcacaacttacagaaaaggagcaagaagataatgaatgaggaaccctgggactgaaaacatttggagggagcacaagtactaagacagatgttttgaatttttatactcaatagtccattcttttgtgcaggatacagttcattcatttaaccaatgtatattgagcattttctatgtgccaattactattctagatgccagggatacatgagtaaacacaaccgagtttagagcagagtcatatgatccagcttaagttcttaaaagaatcattgctgtgtggaagatagtggaagagtggaaacagggaaacccgttaaaaaggcttttgacataatctgaacaagagatgatgatggcttggccaacagtagtagtactgttggagataatgagaagtggttcaattcagattatattttgaaggtgcagccaatagaaatttttaataaattggtttatagagtatgatagaaaacaaagtttaaggcttgaaataaggaaaattgcagaggagaaagttggggaataaggagtggaaagtagaattcagttttgtttgtaagtttgagatgcgcattagccatctaggtggagatgtctcaagttaatgggaaaggccaggcgagagataagtgagagttgtcagcacatgaatagtttttctttcctaaaacaattctttcttcatacaatctacaggaagtgggagtagtagttcaatgttagatgaaatcacaaaatggatgaatgtagaaaaaaggtgagaaactgaaattttagaggtttaagaggataaggatccaggaaaggaaagtaaaaggagcagccactaaaataggagaaccaccgaaggagtactatggaagccactttaagaccatgcttcaaactatcatattctttcttacatgtatggtttacctccaaattaaaaagtaaaagtatatggtgagggacggattaactatgttaaatgctgctaatagatggagaaggtgaaaattgagattgacagtttatttagcaacctggaagctattggtgattctaaacaagagcagtaaaagcctgcccaaaatgggatcaaaaaaagattaggaggaggagaaggagagacaagtataaagaaatctataggatggtaacggtaatcaaaggagtttgttcgtttgtttttaatttgggaatgtgttaatagatggaatgatccagtaaagggggaaattgtactgaataacatgcatacaagaatctatgtctactttaggatctatttaatgtgaattcatggctttttttttttttttgatatgaagtctcactctgtcgcccaggctggagtgcagtggagcgatcttggctcactgcaagctccaccttctgggttcacgccattctcctgcctcaacctcctgagtagctgggactacaggcgcccgccaccacgcccgccttattttttgtatttttagtagagacagggtttcacggctttagccaagatggtctggatctcctgacctcatgatccgcccgcctcggcctcccaaagtactgggattacaggcgtgagccactgcgcctggcctcatggctctttttggacagggtcataagcttcttagatctgtcacccaatgtaattaattgatgtattggttaatactgtctttagcagtgctaggggattggtaagaaatccacatcatctctgcgcttgggaaatttacaatctagagttggctaagtggagaaaacataagagagcacatacaactaacaaattcagattatggacaatgtacttaaaaaacccccacgccctagctattggcacgtggtaattttgcccagagttttggttatatgcataatccagaggggtgtagaaaaccaggtcctttcagtaccaatctaaggaagacatgaattggggtgtttataaaccttggtgaggaagagaattttaactgggactggtaacttggtgggcccattgacatacagtagattgtgaagaagaaaaccccaaggattataaggaatagttttaatattactaatttttatcctttgctgaaactatgggtttcttatttgaaatggcaatcaaataatttgtaagagtttgtagaaagtggaaagattattgtaatacagggtagatatttgcatttgtacatacttgagggtaagtacaagaaataaacacttgtaatggggattacttaagcaaaatggatgacaccgacagcctttctgtacaacaaataattgctgtgcttctctactccagtaatgaatgtagtgccctgctggatctgggacagcaagacttttgagtccagattcgccatcccatttcttgttccctaacgtttcctcagaagcgagcgagcctcttccacaatttggggacactgtggaagaacttcttgcttggggagttctgcagcagtcgaaggtacaagaatataaaaactggtatctcgacacagctcttacagcatattctcaacacaaggaacagtaatgtgccgcagcaattccttcggtggaaaaaactgactgtatccgcgtaagaggagtaattcttttttgaattttatgaggcttcagagctgtatttcggccaacccagtctttgttcagtttctagcggcttcaaggttgcccagttttacgccttctcgctcaaaacagacactagttttctttgatagcctggtctcacattgacttcatctaagcttattacattcgtctcataaatcgtttgctttttccccagccttagctccagggaccagcctactgaacatcgaaaaggtcaggaacgagatcacgggactgagacggcgagccggctagagcggatagagccgtactgccgctctagtttttcttttgctctctatggttaggagcgcaagcctctcttcggcccggaaagatttaagttcgtgaatgcatacgcaagactcggaggtagttccggttccggcgtggccattttcgttggtggtgttcagttgtggcggttgctggtcagtaacagccaagatgctgcggaatctgctggtgaggagcttctcatcttgcattcatgatgggggcgagggagtggagaggaggctgaggcaccacgacagaaaaccctcacctgggaggggtgccgaaggcggctaatgaagtcaccttgattcgtgtcctttttccctgaccttactttcccttccgtctattcctctcgccccaggccgttactgggtagatgtaaggagtggagaggctggggaagtgaccagagactcgtgggttagacccgtcttgggttcttagtcaccacctctaaccctgtcggtcattgatgaggttagtagctccgatctgagtaaaaccaagacccaggtggggagtgtctgacacccggaagcatcaagcagaaaggtgtttttctggtactgaaaggttttaagtttcaatggttttgagctttgcgagcttgagaaggcagtttaaaaaccaagccattcaattttgggtggaactttaggaatagtcatggctgaagtgcagtgttatttccgtcaggcgattgtgcattgtccttcacccctccatcgactttgagcatgtgaaatatttccccaaattttgataaagaaaaatgcgacaatgattattttattttttaaattatttaatgaagttttgcttcattaaaatcctcaatgtaattttagaaaatcgagagcatatttgtttcattatttaattcaactggatatgtagtgcatgtctcttctttaaaagatgtataccctctttaaaattttttaggaaaaatgtaatgagagaagcattttaattgagaaggaatcatgccagtctatttgctgtcaagtaatagggttttttttgttgttgttgtttttatttattttattttattttattttattttatttttttttttgagacgtagtctcactctgttgcccaggctggagtgcagtg

SEQ ID NO: 10970 - DNA, 6000 bp, Homo sapiens
ccataaaattatggttcatttactggaaagtttttaagcatttattcacatataaccattttccttaagaagcattcctgggtcatcgggatggctggtaggagatagcttctggaatcaactaaatgcttgcctagaaccaagtatttttctgatgtcttgggtttttaaaagtaagtccttgaaatacagctggtttctttcctctatcatggtgagtttatttcccctcaggctctttttatcttctcctaccctgaaaccagattgctcttcagtaataggaatatgagagcagggtgaaaaggcattccccattaacacttggaatttattaccagatttcttggaccaaagtttgttgatatccatgaagacagatatgttagagtagtaagtgaaggaaatcacaactcagacaatactcaattaagagtgacaaaacttttcttggtatagccaagccaggaaaaacgggcagaaccaccatggtttggccctcttatcactatatgcttgaatgtatgactaaaagtgtgggatatggccttgaaacatggctatgtgaagagagactgggctaatggctttgaccggtaaagaatacagattgggtgtacatattgggtcacaccaaaacaatgaatatccaatgtaagtaatttgtagttgtcattcttaggaaaggagtagcatatgtaccttagaaatatgcatcaggggttgcaaagctgagaaggcattctgatatatgattctggtggaggtggtggcgggtgaacctaacttattcccagcattcaatatgcctagttgaaaatcattataataaatttagtaagagacaaatagcaaactgggaaaatatatttgcaacatatgcagacaaactgttaataactttattataagaagatgtcttataaatcaataagaaaaagtagacacaactaatggaaaatgtctaaagaattcaaacaggcaattcctgaaagaaggctaaaattgcaataaacatgataatctgtcaagcaacaatgaaatatcaatctttacctctcagactggtaatgattacaaagcatacattcagtaaagagaatggggtggggaaatgagcaccttttcataaattttggtggaattgtgaattggtacatttctggaggttaagtgggcacgatgtgtcaaaatttgtaaacttaaaaccctttgaccaggtacagtggctcacacctgtactcccagcactttgggaggccaaggcaggcagatcacatgacaccaggagtttgagactagcctacctaacatggtgaaaccctgtctctaataaaaatacaaaaattagctgggtgtgatggcacacacccgtaatcccacctactcgggaggctggggcatgagaatcccttgaacccgagaggcagaggttgcagtgagccgagactgggccactgcactccagcttgggcgagacagtgggatgccgtctcaaaacaaaaacaaccacctctccacccctaaaaaaagtcccaaacctttgacccagaaatttcccttgtaaatatttatgctaagagttattaaacaagtgcacaaaattgcatattgtggatactaatagcccaattgatacagtagttcaaatttgaaacaatctaaatgctaatctatagggtaaatggctacataaatgagtgtgtatccatataatggaatattaagtacttggtattacgttgaaaagtattcctgatgtattaaatttttaaaaaagcagattatagagtagcattattttaaaaaaccatctgtgttaagaaaaaaaggcttatataggcatgtaaaatttatttagaatgggagacaaaattataggggggattttcattttgtttctttttttgttattttatctgtgctaatgtattatcaggataatctatgtccatttaaataaaataaaaataattcatacaagctaacaaaaaggtaaacatctttaaaagtttgaatgaaacatatctcgtggaaaacattgtaattccaagttagtcaagcacctgtgttatatgatggctataacgtgggggaggagtaatgagcagaataaaacaaaagactggaactaatagtagttagtgttatcaacaattttctccattttctctaagtagcatccatgtagcaaaatttacttctagaagattcaaagtctttctctacaactctttaattaggttatttctttttactcctgactcaacaggcttccaggttcacttttctttgaaagcagaggttgctgacaatattaccaacatggaaaggtggactaggaaaaaaaagatggatagcttgatttatgttgctaaccttgtatggactgtaggacatttaaaaatattttgtactgggtgtggtggctcactcctgtaatcccagtggttttgaaggccaaggcaggaggattgcttgcaggcaggaatttgagaccagccggggcaacacagccagtcctccttctctatcagctatttaggaggctgaggcaggaggatgaggcaggaggatagctcgagcccaggaattcgatgttgcactaacctatgattacaccactgcaatccagcctagctgatagagtgagaccctgtttctaaaaagaaaaaaatattgctattttatacaaaaaaatttatgataaaatgtcctctcctttaggttttgtaggtaactgtatcctatttgcatttgatccacatgaaagaactctgttctcaaagtttgcagatgctgttgttgcttgtatttgcttttactctgttatgatgctaccaagattttggttagatggctgttattctaggtggcagacatgcgggtttccctccctttgcacaactaaacaaggtaggctttggttctgggcagtcactggtatttacaaaccacttattcatgccaggtaatagggttccagattgggtaagttttatgttctggttcttggtatatgtttagacagcttataaatgtaaataaacattctactcttacaggtggagtgtggacacggtgatatccgtgtgaccgccattcccagctgaaggttatctcatctatgattttcttatacgtgactggcaccccctagtgaatagggacttaagttgacctccacggtagaagaaataccagggaaatacctgaagctgttttaacaatttctccttgtattaagtattatgctgcagttttgcgtgtgtgaatggaagtatgggtagagatctgttctccctaaaaactccaggattccacaatatagaaatagtaatcaaatttttaggtgaagctcgaactaatccgaactttgttagatcatcactgtaaatgaatgggtatttatccactccctaaatgaagagacttgactggatttcttttttttatatagctactagaatctgttacacataatttaggattgagacttgagaaattgtcattccaatccagaaaactttagatttgcaaatatatttgacaaattaataaattaacattttatttggttaatttcaagaatagggcatttaaagaagtctgtgtttgctttagttcggcaataaagttcctgccactcacaataatccttattattctctgaaagacatgttatatttttgtcatcataaatatttattaattactgtttatagcactgggttaggtactcatcaagcaaccaaaaataattcttaccatctaggatgcttccaatataaaatatagacaatatataaccaggtcaattgggaaatagatcatttcagtatgataaaagatagtattcacattaacagtgtgaaagggcaggaacaataagacacttgactcactggtctttaaaatgtagcatccaaaatgagcaagtggagaaaaggttaaacaagtaggtgacacatttaaaaaacaagtagatgaaaggactattctcaaaaatcttgttttatgtgagaaaccatcaaattatgaattccaagtactgtattttttttacttttcaagggtaggctctcctataccttatctaaacaatttttcaaaatagccacaattactttgttttcctctctacactaaattgccctttgcctcttgagcgattatctttttcagattcacctcaacttcttcaggttcaagcggacttcacctgtaagcccctctcggttctccctcttctctgaactactaatggcctaatttagcacaattatattgctttgttcattccatgtatagtaaaagagtctacaaaacacatgcaagcattcatgcaattatatgttgatttgttcatgggtcgaccccaaagtctattctccatcgctgaagcatggaagacaaatacccttcacttcttcagaggcataacacatgcacttctcttgtcatggtgacaggcatgtgctggtggaggtcaaagaaacaggaacacaagtgaaatcgaggtgagtgtcaggtaaggaccaaagcaccacgcctacctcatctttgcccacagaacacccattcttcccgtgtcctgtttcccaggacgtatccggggcggataagaaatcacccgtggggaggcggtgaactcctccgcaggggccgatgcccgggacaggggcggggaaggctaatgaggcgacttgtgcggggaggggccaaggaggagcccaggtgtcccgctcccgctcgacggcgcgcgcctgcgcgagcccagttggcgtcgcacccttgagcgcagcatccctacgccagcgagtcccaatactagggagggagggagggaggaggggcggccggccccccgcccccgcgcgcggccacgtgacgccggctgaggagattggaggggcggctgcgcgaggctgcagactggtgcagcgcactgtgctggcggctgggcctcctccacctcctcgtctttctcccgggaaccttgacgacgccttccgcttggccctgccttctgccgcatccccgccgccgcggcgccttgaggagcaggagaagacgcagccgggccgccgccgttagaggggttcccggccgccgctcgccccgtcggccgccaccgcctccggggtcagccctctctctgggtctccgctttctcctgccgccagcgcccgctcatcgccgcgatggggctcctggactcggagccgggtagtgtcctaaacgtagtgtccacggcactcaacgacacggtagagttctaccgctggacctggtccatcgcaggtaaagccgctgacttccccatcctcgctcggtcccccgcggggggtcaccggcccctggtctcgcagctcccgggcccggccccacaggcccccgcgccctgcggctttcggatgctgcggatcagcggaggggccggcgcgggcactgcggttgagcactggttaatctgatccgaatgttaaggcctcccctcccccgacactcgcagggttttcttctgagctccctccatctctcatcagctctcggatgcgggagctgacatatcagatggagcctgtgcagccaggagctcctcgcaggagccgccccaccctgtgctcccacatctcccgagctcgcctccctcttccccgtgcacaggattccttttaacatttagtcctattttgtatggagagcgggctggggaggaaggagggcttcaggggcagctgaaggtacaggaggtttcttcagcctcctggtcgctttgacagaaccctgctaatcttttcttctatctagctccttcatctatagtataattcggactgaaaagtaaaataatattgtttggctccttgaaccttgaagaatgttagtttccgaggcattttcaacagcaaatatgtttgaagtgattgtctataatggctttgcgcactgcagtgcagtcagggggagggggaggccaaaacaccggggaagaaa

SEQ ID NO: 10971 - DNA, 6000 bp, Homo sapiens
atcttgtgaatctaatacataaagataatcaaaatttctgataaactagtttccagttggaaagtgtaaagggggagttagttaattgagggaagatggcataaggaatgggaagatgactggaatggctcacaggagctacttggagatggaggctcaaactctggttttcaggctaaatgtctattgcataaattattttttctgtcctctaattttaagaaaaaggcaaatgcaaatcactgttttaaggtaccacctaataaaaattcaactgccattttattaggttcaggtgaacatttctgtgggaactcagctgtctgctctcctgctatcatgctatcaggctggtaaaccacttaagaaaaaaagatgcctctgtgtttggagatctcattctagttatggaaataaatatgtgaactcctgattatacgacgtgatgaggcctgtaatagagggatgtgctggggaactagttatacctagtgggaggggctggtcaggaaggtctcagacatggaagtagcattggcacagacctggaaagataagtttagtaggcagagagcttctatccagataaaagaagggacaaggtgaaggaggaaggtgtgcaggtatgacggtgtattcaaagagcagcaagtcactcagggccagtaagcctggtgtttaagtatgagtgggagtcgaaaggcaaaagttaggtttgtggatgtgcaaggaccatgtaaggaacagctctcacacattgtggctgtcttctgtgtccctttgattatggatgaaaactttccatatgtaaatggagttgttaagcaaacataagtttgcaaggagcaagagttgactcctgagaaatagccgaatgtgggacatatagagcatgttctagaagaggtgaggatatgagaaaagatatgacagacagacagatgaacagggaacctaaggatactaaggatactcgagagttaacattggagccaggctgagggtaggaactcaggagatattttagataaaggagcccagaagcactgggcaactggcttggctgttggtctttggtcttttatttctgcatcctttatttctatagccactagcctttgcccctgagacactgccttgacttgattggcgttagcagactgtaccagcacactgggtgcctctgtgtggcttgtaccttagagctcctgcctctggtccagtaggtgatggctcccatctgctttattctatgacagttgcaggaaaggtgtgcagaactggttcagaagcccagactaaaaaaaaccctcaattttcttagtgatgatagaagttacccatgggagattcggggccctcagtttggcagtgcctcctactgccatcacaggctacagtgatcttgtaaaagggttacacaaccatggaggagctaagggagccttctggcttacctgtcacattagtgctgagggctctttctctgttcaccatttggtatggcattgccaatattcttgtttgcctctctgtagccaaagttgcttattgcatatagctcattccatgagagtttagactagataattatataggcagcttcatttaaaatgctaataaccttacctaaatagagcatatttctagcacaattggattgggcagctctccaggctagatcccttgattcaagttacatgatcattttttttttttaatcagcattgggagaatccttccccttctttgggtagaaaagagcttcttgtttttgttctattttgaaatacgtatatccaatcaaccagcttatttggagccttcttctgtgtgttaggcattctactaaatgctgagtagatactaagataaagtccccagtaagatcttcagtgaacttactgtctagtgggtgggaggaagtagtggaacagatgcaaacacaaagaagtattagaaaatctggtcagtaccatgatagaactctgtttgggtattctgggagcccagaaagggtgttcatcgccatgggaagcagggagctatggcaagaagtgacatcaaagtgatggggaggagttgaccaggcgggagtgtaaggggcaatgggagcaacagcactgaggtgaggagcagtcaatttgctgtgtttatggaactaaaattcatctggtgtagcccaagtggcaaggccagggctggcaagaagaagattggagaggtgggcgggagctagatcacaggaaactttttactggacttcatcctgcaggtgggagatagaaagccatcctgtttagggagacaggttgtggagagtattaaggacaagagcctgagggtcagaattggaaaggagctcagctggatggaaacatagaaggcagacgagagttgcatacatgtctggagggcctgggcctgaaaaggaaactgcgtgaaagtttatatttggtttttagggcaaagagattgaaagaggggagtcacataatcagcatacgtttatgaagattacccccacagctgtgtggcaagtgatcaaaaaggaacaggaccagagaagagcaggaaaactggtcagaaagcaggcgccctaaccctggtgagcagtgatgagatcctggaagtggaggtggcagaatgtgggaaggtgggccacatttaacactttatgcctgttccaaattacttttcttaagaatcatgacactagggtattaaataaaattattttcattgactctgtgtcctgtccccacctacagtgatgctacctattcttagcataaatatcttttccttggggaaacctccttcagccctctagactgggtgtccccagagcatcctgtacgtccccaattgtagctctccccatgctttcttttaatttctgagtcagctgtctgcctcctctgctagatcatatccttcatgcgggcaaggactctttttttcacagaatgttgctctgttgccagactggagtgcagtggcataatctcgcctcactgcaacctccgcctcccgggttcaagcgattctcctgcctcagcctcctgagtagcagggattacaggcgtgccaccatgcccagctaatttttttaaaatttttttaaatttctttttatttttagtagagacggggtttcaccatgttggccaggatggtctcagtctcttgacttcgtgatatgcccacctcagcctcccaaagtgctgggattacaggcatgaactactgtgcccggccaagggcagggactctttcttgatgctgtcaacactagtgtctagtaccgtagctagacataatacaagtgcatagtggatgctccataatttgttaatacatgaataaatgaattattaattcagatattagggtctctgaattaataactcatttattgttagttcaacatttttaaaatttgttctgaaatagtgattgtctctcccccaaccccatacagtgtgatatgtttcaggaacaacaaatgccaattaacaagtaatatattgttttaattcttattttaattgttatagatatcactctatacttctaatttttaaaaataaactaaagaaatgaatagcccacattttaaacaaaaatttataaatagtaagatcagttctctggctgtttattttgaaacaaaaccaaattgcttagcttagaatcgaagaaccttaaagtttgggcctttcctcttagctgttcacatggaaatccttggacactctccagcctgtctcctgtcaccaggcacacttgtgtcaccaacctgctcatgaaggggactatcaggaggcctcctccatatccctgctgtgaaaaagctcagtcttggccgggcacagtggctcacacctgtaatcccagcactttgggaggccgaggcaggtggatcacctgaggtcaagagtttgagaccagcccgaccaatatggtgaaaccctgtctctactaaaaatacaaaaattagccgggcatggtggtgcgcacctgtagtcccagctactcaagaggctgaggcaggagaatcacttgaactggggaggtggaggctgcagtgagcccagatcgtgccactgcactccagcctggtggcagagcaagactctgtatcaaaaagaaagaaagaaagaaagaaaaaaaaaactctgtcttcctatacgcctcattgcaagtttggtctttgtgacatttttcttggttgatgtggacatcctagaagtcatgtcagccatggctccgtccagacctccccttctctgggtgaagaaacttgtcttgaggagcatctctccccacatggcctcaagcttcctcagttctcactagctccctcctcccccgctacaagtaacatacagaccacacaactcatcacttgattctacactgtcttattctttggttgtcttttacatttagtctcatttgtctgacaaggtgaagtctccaagagtaggggtcatgtgacacatcagtgctctcgccggccccaaccagcactgggataccatgtgtgtgtgacaggagaagccaggtgctaaacacttcctaacgtgactatgaaatggacattgtccccaagaaacatttcatttagttcagtcttcttggccctggaggtccttcctggattcacacactgacttcaatacagagggtttaaataatgaaaaggtgatacatttctggcatgtgccacgccatccctgaactttggggagcttttctctgagtgacttactcattttgttgactgaatctgatgagaacttgacctcctactgttcagagacaggaatgagttgccatgacagtacatttgccacatttacagtgtctctttgtttttattcttcctgtttctcaccattcggcttatttgttttccctcctcttaggattgccccctgtgggtcactttctcagtcattttgagctcagcctaatcaaagactgaggttatgaagtcgatcctagatggccttgcagataccaccttccgcaccatcaccactgacctcctgtacgtgggctcaaatgacattcagtacgaagacatcaaaggtgacatggcatccaaattagggtacttcccacagaaattccctttaacttcctttaggggaagtcccttccaagagaagatgactgcgggagacaacccccagctagtcccagcagaccaggtgaacattacagaattttacaacaagtctctctcgtccttcaaggagaatgaggagaacatccagtgtggggagaacttcatggacatagagtgtttcatggtcctgaaccccagccagcagctggccattgcagtcctgtccctcacgctgggcaccttcacggtcctggagaacctcctggtgctgtgcgtcatcctccactcccgcagcctccgctgcaggccttcctaccacttcatcggcagcctggcggtggcagacctcctggggagtgtcatttttgtctacagcttcattgacttccacgtgttccaccgcaaagatagccgcaacgtgtttctgttcaaactgggtggggtcacggcctccttcactgcctccgtgggcagcctgttcctcacagccatcgacaggtacatatccattcacaggcccctggcctataagaggattgtcaccaggcccaaggccgtggtggcgttttgcctgatgtggaccatagccattgtgatcgccgtgctgcctctcctgggctggaactgcgagaaactgcaatctgtttgctcagacattttcccacacattgatgaaacctacctgatgttctggatcggggtcaccagcgtactgcttctgttcatcgtgtatgcgtacatgtatattctctggaaggctcacagccacgccgtccgcatgattcagcgtggcacccagaagagcatcatcatccacacgtctgaggatgggaaggtacaggtgacccggccagaccaag

SEQ ID NO: 10972 - DNA, 6000 bp, Homo sapiens
gtagagacaggacagcactttgaatagctattaggagaggactcagaaggggggaaggagaacacactttcgaaacagttggcagctgtctgccagcacaccgccaagtgcacaccattttctcccccagaaacgacagttttagttgcaggtgtttcctttagagctaaacttagaaaatgaaataactcaaactcattagttcatcagaactaaggagtaaatattgtaattttgttactaatttttaaagcacctttcaattttgagaaaaacaagatgcagtctatgcaaataaagcaaaagcacaatgctaagcagccttccttttcctcatccctaacaccaaaagttgtaattttgagagagatagataattcaaagctatggtagcaaattgggtctcaaagaaaagacaaattaagaaagctacactaaaaattactttaataatgttgcaaacaactctttactattttatttagaaaacacttctttgcttacttatagggaaaccttttaaaatgagaaatggtacacaagtcgtctggtgaaggaacctactaaactagtattctaagcactctactgtatttcaaatatatttgcttgatatccctccataatattttctcctgaaatatattagaaaagtgttaaaatagaatgaacaagcaagacctatcttgaacataggagaaactgagaagaaaaaaaaaaaaacagaagcattttctctcctagatctttcagctggctgccagatggtaagcaaaagcataactattagacctgcaattgcactaaggtgaggcacccaaaaactgagagctccttcctgcctgacatttttgttcaggtaaccagagtttaaacttgtgtccctggtaataacacaactaacatctccattacattaataccagctacatccccatgggaaaatgttccatgtttcttattaaccaatcccaaggggaaatcctgggggtaaaacaagagaaaaaactatagcaggtggtttttttttttttctgaaaaaaaaaaaattataaagtattcaaggtaattaacaaaatgtttacaataaagtctacacttgatcttagccaaaagactgagaagcgatgcaataaaatttatatatggctttctgaggtttttttttttttaaattttactctaggaagacattgatgtaaaataagctgattcacactatcagtttaagtgataataacaatgcaactggcaaaacaagtaatccagttagctaatggcagatattttaagtatagaaaagtatatgtggtataatgggatatcagttcttaaaatatctatgccttataaacaaaacctcaaggtaaatataccaaaatctgtatcatgtccttttctaagcaggaggattatgggagatttggattttgttcatattccacatattgaaccactgtattacttttatgatcaagaagaaaatcatttaaaaaaaagtttctagtgctaaagaataagtaaaatgtgtgaaccaagaatagctcggaggttgtaagaagcatatacttttttcaaatagtggaaaactcaaatgtcacaaaacagcctgattctttttagtgtagcaaaaaaacccaagtttcagagtcagaagacctggacttgaatcagggttctttcattttctagataagtcactgaagttttttttgaataagtcattgaagctttaagaacctttataaaatatatttcaaagtattcaaaccaaatcaagaaatagatgaaaatctagaaaaatttcctctcattaacataaaaaatcatatgccagaaagataataatctgtagttgaaaaaactgagaagtagacacttgatttctctgagacctaaattatcttcatctgtaaaatgggtataaataatcagtgccacttccaaggctgttatgaagaataaatgagttgatgttatgtcaagtgcctgataaacagtagatgctaaaaaactatagtccagaccttgcacaaggatgcaaatggcggtggagaaagggcctgcacttcaaaggacttctggttcctaactaaggaaaagatgaattacacaggtcaaggattgtggttctaagatgttttctaagattctgaaacattttaaacctcatcttttgtcatttttattagttacgaagtcggctttaaggattaaaaaaaaaaatcttaaaatgaaaaaaaaaaggagttttccttaggatcatcaaaagtaaagaaaaaattaccccaaatttgatcttggattaaaactttacctgatataatttgtaaatttttcttgaaagaaataagtgttctagtttaaaaaaataagcaatttttggataagaaattttccaaggaaatgagctcccttcccacccagctgtcagtcaagaatttagtaacctttaaataaaattactcttctctttgtatctgtctttttgagacagggtctcgctctatcacccaggctggagtgcagtggcaccatcatgactcactgcagcctgctcctcctcttccatcccccagagctcaactgatcctcccttctcagcctccagagtagctgggaccacaggtacgtatgcccggctaatttttgagtgtgtgtatatttttagtagagatgggtgtcaccatgttgctcaggctgatctcgaattcctgagctcaagtgatctgcccaccttggccttttttttttttttttttttttgagatggagtctcattctgtctcccaggttgatctcggctcactgcaacctccgccttctgggttcaagtgattctcctacctcagcctcccgagaagctgggattacaggcatgcaccaccacacccagctaatttttgtatttttagtagagacaggtttttgccatgttggccaggctggtctccaactcctgacctcaggtgacctgcccgccttggcctcccaaagtgctgggattacaggcatgagccaccacacctgccagccacttctcttttctctgtaaatgtctctgctgagagaaattttggaattggctttgatcttggagcatgattgtaattaagctttgatatgtgcccataattaaattgttatgggcacatgtccacaataaattgttgttattgttgttaaccaaggaaggagagattgttattcctactgaaccagtcctatgggagaagagccccagggagcagtggaggtggtggtggctaaaggagagccccagaggacaactgcacccagagattgatggaccttggaggctgaatagcaaaaggcttctagtactcagctatcaaataggaacgcattatatacagcacctgctttgcaggccttgctgtggtagggcctactgcacaaattaggggcttttgtagagctgtggcaggagagggtgtcaagtgtcagttaatctgaagattcaacacaatgaatgaatgaagcagcattggagtttggttttgtttgcatatctcagtcagtcagattatcagtttactatacagaaaacaacatcagggaatgatttaaaatataccatctaattttagatatccttcacttttttactcccaatttcatcaagaaactcacagatttagattaactttaacaatagaaaacaaatcaaatttaagagtttatgtctttatataacagaataaaacttgcccaacctgattaaccctttctatcctccccaccttcccaatccctccctcctttcctttagtaaggtccctactccttaagtcttttgaactcagtcctctctcgatcccacacattggacaatgaagcagtaagtgtgtcctttgaagtttaacctttcatatttgtatgctttccctcacattaaatgtaattcctttttttgacagcttttacatctaaacaaaccaaaaaaaacaaaactcctgcaatgcctaaaacatgtcgtgcacctaacacactacccgagaaaaaaattgttatgaatatccaactctggccagagccgtggctcacgcctgtaaccccagcactttggaaggccgaggcgggcggatcgcttgagtccaggagttcgagacgagcctggccaacacggtgaaaccgtgtctctaacaaaaatacaaaaaattaaccgggcatggtggcacacacctgtggtcccagccacgctggaggctgaggtgggaggatcgcttgggcccgggaggtagaggctgcagtgagccaagatcgcgccactgcatcccagcctgggcgacagagcggtgacaccgtcacacacacacacaaaataaaaaataaaaaaaatcctattccatttccttgtcactggctttccccctcctcacttaacccccgcccctcgcaacagcaactgaatctaaaaacaaagcctttcccagaccctgcgggaccgcgcgcgggcagccggctgcggacagctttgcagccggagcccggcgccccctccgagctctcgagggcccgggggtcccggacctcgcctacagcgggcagggccgggacgagaggacgaggacgccgctcgctcctgcacctccccaagccggcttcgccgggcgggcggcggctgggtagtgaccgaccgccacgaagctactgccacgtcagggcaacttcacaaatcccggacgagggcgggtgacgcaagccgggcggccgcggcagggctgggcctgcgactacccgaggaggctgacctccagcccgggcgcccggttcagcgccgccccggccggcgccggtgcctgccaggcactcagggaggcgggggcgcagtggaggaggcggcgccatcgcgaagcgagcgcctcgcccgcactcagccttgccaccccgcccgcagtccaggctggactgggcggcatttgccgaggctcctcggccaggccccgtccgcccgagccgcgctgagacccgggcagcggccgcgtggagaggaggtggcagcggcccgggaggccggagccaagccagcgacccaccatggagacccgctacaacctgaagagtccgggtgagcagggctggggcccctgggcgaggagggcggagtgaccctggaccccggggtggtcgccgcctcggtcccctcgcgtctggcgccactcgcggctcagctcctggtttcgcgctctacgcgagaccgccgcctgcccgggaagtacaggccgcagggcgaggtggccgggtggacgtccgctgccaatcccccggccggccagcgcgccccgcagcacccagcctctcccttttctcatcttcgcctggtcccgtagagctgggtcagaaactcatccctgagaacaggtgtaaaggtgatgtcggtgggcgatagtcatcaaccccctcgctgtacctggtcgctattccctccctgtcgctgccaccggacttctatttacttctatttactgccggctgatttactcacatttgaggagttggtcgtttaaatatcctatttgcagcacttgggcgaatacaattacagacataaaggaaatgttctgtaactaaaccagttaactatagagctaaagcaaaacaaaacaacaacaaaaaaacacctcgttgagccctgttcttgagagctaaccttgatttttgccagactggctaatatgaaatgtatctgtattcagtcgtagcgattcctttcctgcatttaatgatcctgctttatatttacacaagcagtcccagcaatcctagcctctaattactttctggtgcattataaagataagcaactagctttctcagcttaataaaacaggcttgaaatgaatcattggatcctctaaatggtattttttctatctgtaccttgatacattttgtcagggggaagaaactccacagttaactctgcatgataaactctaggatattagtgatgatttcaccaacttttgctgttgc

SEQ ID NO: 10973 - DNA, 6000 bp, Homo sapiens
ccatggagagaatgtccacagctttacaatttcacaactagggggcactactcccgcatttctttctctaaaacagaaattccaaattattaccatacatagaaactcattattttttagacctcttcttagacctttttgagattagtcaggcaagttttgacagaatttcatttttagtattaaccacggcagaagattaggatgaggtgtggtgtctaaaatactcctcagcctagaaagttctctgggaacttcagaggatccttaaaaactctggactgttaagtcccagagcatgctccatcccagcctggccctgttctttgggtaaaagactaagataagtgggaacagactaaggaagagagtatctgaggtcactctggaaactcaaaattcttcgggttagttaaaaaaacaaaaacaaaaactggagcaagcttttccatagtataattcaccttctaatgtgcctttgagcctattcatttaacttggcctctatggactaaaataggtcataggacatctcacaaatttttatgaaggcattttgtagcctggcataggtaccgagagaaaaagaaacttaaaagtaatcaatgagacaaatattatatattcataatatatatgtatatatacatgcacaaatacacacacatacaatttcacaactaactcatctttaccttgtacagggtggacttgattgtccaggacacccagaggtcctgttgccccctggtggtcgctgaattatcacagatcttgatacctaaaaatcctctgggtgaagagcttaaaaattacaacatgagaaaccatggaagcatgtagaagtaatttgaataatttaagccagttcatcctatcaatcctggtgatttatggcaaaatgaactggaagtaatggaagaaaagagcctccccatgcaaaatcaagtttgaaaaaaaaaaaatccactaagagcaccgaacatgtgctacttgatttcaggtataaagtgctacattttcctagctacattttgttattttaatattacttaaaaaaagagtaatttgactgaacactttttaatattttaggtgattagaaaatttcagtggtacctcagcaataatattcaagtggactcataatttagatataaattatatttttatttgttaaactgtctgaaattaacttggaaattgtacttaaagaattataattgtaatcttctgaactttatttatctgacttcacaaaagtgtgtgaaattttacaaaggcacaaaataaattcttgacttatggtttgatttctgacctctgacttcctatactttcagctaaatctgagcttagaaaaattcatgaattaatatgtttttaatgagtttaggttatgcacattttttacattagactgcaaataaatattttatatacactacataaatcatgttaatgtaaatatgtaaatgattttcctacacagtggaaagattgtttatattttgactgaaatcacagaatccaattttctgtaatatctgttaactaagacataatgcttcttttctgcttataatcaatttcttctgcacagtaccttttctaattcagtttaaattaccctttttctgtgatgaacttgcattttcacatttgccagctgtgaatgcattttgatgataagtacaaaagtagtgggttcagaaacagccctttgatttcattgttgttaactatttagtttgacagtcttggatttgtaacatactgaaatctccaattgtccctttgccctcgaatggcctgaatactagacacacacagtataaccttttctttcatttgaaaattcatagaacttattccctgaagtcattataatttactcctatttctctcttaaaatcagagaatatttcccagagttaaacagtgaggtaaatattagtattgtaacaagttaaaacaaaatagcaggtgtaccctcatttagaatgtgtcttgaatttggacatttccctacatgtacagtcatgtgattattggtaattatacaaataaataatacaaaatgcattaaaattgggtatatctccttagtatctgaagagaggcgtttttcatctttccactatacatttattatagatgttgcaacagaggggatataaaattgaaatattaaggtcttagtctctgtttccatttacttaaaattcactaaatatatgtggacgacgctatcaacttagttgtacaatgaatgcataaaaatgtaaaactagttttcagaattattgctttggcgcacaggtgttggtctcatacactatttggtattgctcaggaagacaagttccttttgaattcactttatatacaaacacatcgcattattaaaaataattgattagaaataatatgcttaaatcataaaatgaagctaaaataaattgtaatggtgtgaggaagttcaccattatgttattttaaaatgagaaagttttgtatactgataatttttatgtcagtggcttcatgtacaaataggtctatatgctttatcattagtcaaatacagtcgagtgtaaatttatatattaatcatatactgtatgctgaacactgtcttcttgactgtcatttatttttatttaaatgctccgaattctttgtcaatatatctagatactacaaaagaaagaagagaagtttgaaaaacctaaaaatcagtatcactgtgcagctatgcagggagaactgtcagcagcctggcacatgtgcatttaatgtgaagcttcttgtctctaaaaataagagtaaagttacacatgcccctgtgtctgacagagagaagggacacaaaaagaggactcactataccacctacactcatcagaggagtgaaggatgttacttctttggtttcctggttttaatggaaaagtatttgtattcacatcattgagtattagtcattcaatagatgaaaggaatattttaaactttaaaggccaccttggtgtcattttaagaagtggggatgagaccctggggaaagtgttgaaatcctggagaattcgttttaactattagaagtggtttaatatttgtaagtttgtagttctgtgagttctaaagactaagtgcagggatttatgtttttaactcttatgttttagtttacaagtttcatccttaaatcatctatttgtgtaaataaagcttcatctcctctataacaagtgtgttctccccatatttttttttgtctctttctaaggttaatctattacgcatttacattttctatgcatcctttaagggacactgaagatgctttttgatacactttctaaaatattaaataggcataatggctaggaatatgtaacattgaagaaatgtttcagaaactacagaatcaaagaggtttaaagaataaatttcatatctctcttccatgttattttattaggcaaataaaaactacaggagacaatttaacataaaatacaaataaatatctgggggttgtcatcttagagaactccctactataaaaagcagaaacaactcaatttactttatatttccagatagaaaggttggaaaaagtttggagccttatgtgagatcaaactttggatctatcggaaataaaaggaaatcataaatgactgagaaatatttttaaaggaagaaattataggacaaaaaaagaaattcatcttaaacatgtgatcaagttactctgtgtgacctttgaaattgaagatttggcaattaaaattttaaagttcttcctcttattacctacctcttgaatacaaagtgtccgaaactgcctaatggaaaacagatttctctacgcagccttccttgccgttcgggttgaatgaattcaactggagatattggttatgactttttttattcttagtttctctttgaaagataagcattgaataattcctgaaaatggtaaatacttgcgaagagaaaggtcttgctttatgaatttaatacgtagtggcattctttaaaattcagtgtaatttatgcagcgaaatggaaaactatcaaagtggaggcaatccaaggaaaaccttagaaaatgataaacgcgtaaaaaaacgatacgcaaccatcagaaggttctctcctaatgtctcacttcgctcaacaaactatggtgaaaagacagggcggaggagaaggggcgcttaaaacaaaagacttcctttcccactcccttttcctctgtttcttttgccagagcttgttgcaaactcttggaaacattgtttaaacataatacacttggttactttattctttcagggattgtggtgggtggtacctaaaactgacggctcttggagtaacagaaaaagagaagtagaaacttttcaaaaaggcaaaaaacaaagttacccagcccgcggaggttctaacaacaaaaaagtaaaacacactttacttaaaggcacagctcatttcactgtccgggctccgtgcttggtagctgagagaaggcttgcttcgcctctggtttctaaaagatcgcgcggagtacagctatagaaaagagtgtaagttgggagcgttattctcggatttattctgctacgcgaaagctgcggttgctaaaagcagagcgtccaaagcagcacacacctcggctaccatcctcgttctcctctgaacatccagcgcgagctcagaacctggagggaatcctggaccagcaacctgactccgctcggcaccgattggctcctgcctcggaccccgcccccgtggccggggcggccatttcgccgggacccgccccttggccctgggaatcgcctcctggcaggccggctgtgcctgccactcagcccgagtggcggaggctctcagctcggagccccgccccctccccccctaattgatattattggagtgtggagcaagcggccggtctgcagtcggagacttgcaggcagcaaacacggtgcgagcgaacaggagtgggggggaaattaaaaaaagctaaacgtggagcagccgatcggggaccgagaaggggaatcgatgcaaggagcacaataaaacaaaagctacttcggaacaaacagcatttaaaaatccacgactcaagataactgaaacctaaaataaaacctgctcatgcaccatggtttttcaaactcggtacccttcatggattattttatgctacatctggctgctccgctttgcacacacaggggaggcgcaggctgcgaaggaaggtaaggtgatgggaaagcaaagtttgttctgacttatttatttagatgtctacctgcacaagccagctcgtccgcggcgctgccggccgcgcctccggcgccgggcgaccctcccccgccggctccccgccccctcaccgctgaggccgctcctggcggaccagcgagcgcgaaccagggctgttccgagccgcctacagccctgtgcccggagccgtccatccgacgggtgcgggatttctggcgcgggcagtctggagggcgtgagcagcaacgggggtggggtggggttggaggaactgccggcgagcttatttcttagtacctcaggcgggtcacatctctctctagctcggtcttccttgtctccttattcgccttctgtgggagctgcggccagagttgggttggagactgggaaatgcagcccctaccgtctccgccagcccgccggcgagtggcgggagcccggagccttcccagagggaccgagacttcgatgagctcggaaagctcgggttactaatgaagtgctcactgcgtcggaggcggcggcgcggtcctgcggttggcgctcggccgccagcacggaacaataacgccgcggaggtgaagcgcggcgtgcggcgcgcgacccgagggccggggatgtctccattcagcgcgcgctgcgcgtcgggcccagcggtcatgggggcagcggcagccc

SEQ ID NO: 10974 - DNA, 6000 bp, Homo sapiens
acttatggaatgggagaaaatatttgaaaaccatatctctgataaggggttaatatccaaaatatgtaagaaactcatataactcaacagcaataaataaataaataataggtaaaggacctcaatagacatttttccaaagacatacaaatggctaacagacacacgaaaaggtgttcaccattactatcatcaaggaaatgcaaatcaaaactacaatgagataatcacctcacacctgttagaatggctactatcaaaaagacaagaggtaacaagtattggccagaatatgaagaaaaaggagcccctgtgcattgttggtgggagtgtacactggtatagccattacggaaaacagtatggaggttccctgaaaaattaaaaatataattaccatatgatccagcaagcccaattctaggtatatattgaaggaaataaaatcagtatctcaaagagatgtctgcactcccatgttcattgcagcaatattaacaacagctaagacagggaaacaatgtaagtgtccactgaggaaggaatggataaagaaaatatggcatatgtacacagtgaaatattatccagccataaaagaaggaaattctttcatttgtaacatgaataaaaatgcagggcttacactaagtgaaataagtcagaaagagatagacaaatgttgtatgacctcacttatgcatggaatctaaaaaagttgaactcacagaaacagagaatacagttacccggggctgaagggtgggaaaaccggggaggtggtcaaagggtacaaacttccagttataagatgaataagctctggggatccaatgaatggagtagtgactccagttagctatactttattttataactgaatttgctaagagagtagatcttacatgttctcactacacacataaaaatggtaactatctgaggtgatggatgtgtcaactaatttgattgtggtaatcatttcacaatatatacatacatcacattaaaaaaagaaaaggcatggaagaaacttaatgcatactgcttagtgaaagaagccaatctgaaaaggcaatacattatataatgccaacaataggatattttggaaaaggcaaaactatgaagacagtaaaaagatcagtggttgccaggggtgtgggaggaggatagacagagggatgaagaactgcagcacagtatattgagattgttctgtatgatactgtaatggtggatacatgacattatacatttggcaaaacctgcagaatctacaacatgaagagtgaactgtaaagtaaactacagacctttgttaataatgatggatcagtttgagttctccctttgtgacacacataccacactaatgcaaggtgttaatcatgagggaaactatctgctcagtcatctgtaaacttgaactgctctttaaaaaagtccattaattttttaaaaatcaaaagaaatgtaaaaacaatcagtgaggatggttgtcaaactggtcagtgaaaaagttaatgcaacaattagtgagaggaatgtgggttcagaaaccagtcgtgaccagaactgtctgctatgagaatgtatcagaaactgctatagtctccatgcaattagtaataacagttgaaataaagtctacactgatgtataccatgggcagatttgtagataaggaatataacgctacttactgttatgtgagtacttgtttttttgttttttgtttaagacagagtctcactctattgcccaggctggagtgcagtggtgtgatctcggctgatcgcaacctctgcctcccgggttcaagcaattcctgtcccttagcctccagagtagctgtattacaggcatgtaccaccacaccgggctaatttttgtatttttagtagaaatggggtttcaccatgttggctagaactcctgaccttaggtgatccgcccacttcagcctcccaatatatgtgtacttttaaaacaagtgactccctcagatcttgttttattttcacaaaacttattctatctgaactttgaagtctcattaaggttttatccaactggtaaaagtagactaggatgcctatagagaaataaaggtaaaaataattatgtcaatctaacactagccagagtttttacagaggagacagactgccttgtattttgttattcatgcttcttacccttttcattctacacgtatgtgcaaattagctccttgcttcatattaactttcaaaatagcgctcggaagctttcaatctgacctttctgtggccagcaggaggagaccagggagcttaaggcattcccatatcctgggctatgtgtttagaattcttgctttgaattttataaagctactattcatacatctgggataagaaattaaaatacagtaagatactcattataaataacggtttcaatcctagatgggttatagtgaggggattaggttttttccagtcttcacttcctatagaacacagactcaaagaaaacacagactctgtgaaaggctagaactcaaatcttatgataactaattcagtgctcttttcataaaaatgtgcaatctttataagatctacatgccttacaggtatcctatcctgaaggtaaggagtgggtgtgtaataggtgacaatatatctaagttacttataacactgcctgacacaaagtatactctatgtgaggcatcagtaagcttcttctgtagagccagagagtaaacattttaggctttgtgggccataaggtttctcttgtaactaatcaaagccgcactggcagcatgaaagcagccataaaaatgaacgtgactgggttccaataaaactttatggacactgaatttgaattttatataatgttcacatatcatgaaatattcttcttctgattttttccaaccataaaaaatgtaaaaatgggtatacaaaaacaggcagtgggctggggttttgggggcatagcttgctttatataattagtagacattattatgatgtctataatatctttctagaaattatttttaatggttgtttaaacatagagtctgtttctatgttttttatttttaatggctgtttaaactggtaggagaggggggattcaaacccagcttgtgtgacatcaaggcccatgctctttcataaacaagactgtctggatgttctataatttacttagtcccctgtggttagaatttaggctatttccaatattcattattataactcaccctccagtgaacatctgtgtagttaagtctttacgcacacatgtatacccacaccttaaaatgtatttagtggtagctatcaaaacagctggtagggacgtgggcacacctgtaatcccagctactggggaggctgaggcagaagaatcgcttgaacccggggggcggaggttgcagtgcgcccagatcgcgccattgcactccagcttgggcaacaagagtgaaactctgcctcaaaaaaaaaaggctggcagagcatctagaaagaaacagactctaaagaagtaatctcaaaaagtaatcttttatggttataggaaagttcagacgtattagaaaaggagttttataaatacaatatatatacatagaacttatgtcccaaacaccattttaagacccttatatataattacaccatttagtcctcaaaactatactatgaagtgcaggtacaattatcataattatcatcatcatcatcatcatcatcatcattatccccatgttccaaaaaggaaactgaggcacagaagggctaggtaacttctccaaggtcacacagtaaactggtaggagagggagtattcaaacccggcttgtgtgacatcaaggcccatgctctttcttactaggctgcaccatctcttcaaccagagacttgtccagtgtgcacctccaggtactctttataatgtaccttcacacaatcggtggtggtattttttatattgagatcacatttcacatgcatgaacgatctcataatctaataactgatgccaattttaaccaataatgggacacttttggtggaaactgggtacccatctaaccttcctctattgtcctacaagacaactcccaacaacgccaattctttattaagtttccttgcttttcttacccaaaatagttgtccagtgaacagtaaaagttgatcggagcatactctcatgtcttattttccaacgtatggcccaaatctacattcaggtagtgctttgcctacgatggagggccttgtaccgcctgggattgctagtttcggttaagtacccctgtttgaaaacaaaaacagtggcgcgtgtcagaagtccctcccgcgcggcctcttccccctcttcctccgcagcaggaggcctgacccccgcgtcctgcacccgtgtggaccaaacgttcagcctcccccgccacaatcggacgggaactcgcgcgctttccgggctattccctgtttgtgctgagttatgggcgaatctcccaaaaaggagatatacgagtgggtcgtccaactttgaggggaaacgaggattctctttctcattttctctcctgatttctctccctacccggaccgcacttctcgaattatccccgtaaggaggaacgacgaatgccgccggtcccacgagactgccgccccccactcatgcccaaacaaggatagaatcttgtagcgaggcgacaagaaaataaataagcgggcgtttcaaaccgagtcctcgggtgtgcagacccgcagcggagtcgcgggagcgaggtgggaaatcctggccgcggcgccgggctccgcccgccggggggcgcggggcggcgggcgcatgcgcgtgcgcggtgcggccccagccctggctgccgccgcctgccgccgccgtcgcgatgcctattttagtcaaagcggctgcgggcttggggacccggcccgggcagcggagcttccggacccgccgacccgccgaggagcgcgcgtcgggctcccgtcgagcagctgagcccgtgtgccccgcgtcccgcgccccgaagctgccgctccgaactttggtcggcgctgcccaggctccccgccagggaccagccgggtaaggatgggaggcgcagctgcagccggctttccccccgcgccgggttgtgtgcggcctcgcgctcccctggctaaatcgggaagcgaaagttggatctcagcccctcggggagcaactttgtcggccctggcggcagctgcttgttctacgcgcccgggcagccgggggcgccgccctctgtccctcctcgctggccgcgccctcgaggggctcccggcccttggaggccgcccttctccccgggtctgggcgctgcggccacagagaccctcaacggtcagcggccgccgctcaggtcaggcagccccagcgtccccgggccctcggccccaccgagtgccggctcccgcgctctgcggcggcaagccccttggtgagctccgtctctgctctctccgccgagtctccggggttcctcctcgccccctgtagggccgcctcgagccgcgcagagcctgcgtgcagccgggcgcgcggtgtcgcccactccgtccccgctcggagagtagggtgggccacggcgctcactcctcacccccgcgtcccgagagcgcctggccgaggaggaccgttgccacggaccctcctcctttaaggagcgaggtcagagggccccgggagagcgccgatggctggggacccgaggtccgcgccacccacccgcaacctccttccccgagcctttgggaacgggttgttggccagacaagtcccagaaactgcctgctttgaagcatgaataagtgcgaaaagactcttagcaatgtaatgccatttgccattcgggagatgtgcgaagattcagttagaattacagaatgaattaactcgactagcaagacgctcgtttgcagttatcttttt

SEQ ID NO: 10975 - DNA, 6000 bp, Homo sapiens
gtgttgccaagaatgtggagaaataagaacactcatacattgttagtaggactgcaaaatgatacagttgttatagaaaacagtttggtagttccttaaaaaaataaacatggaattaccatatgacccagcaattcttcccctaggtgtatagccaaaagtattcaaacaaaaacttacacacaaatgttaatagcagcactattcacaatagtcaaatggtggaaatacccaaatgttcatcaacagataatggattaacaaactatggcataataaacaatgtaatattatttagccataaaaaggaagaagtttctacatgctacaatgtggattaacctcaaaaacatgatgccaagtgaaagaaaccagacatacaatgtcatatgttgtatgattccatttatattaaatatctagaataggaaaatccatagagacaaaaagcaggtcagtggttcccaggggagaaaggggaattggaaagtgaaggctttatgtgtatggagttttcctttggggggatgaaatgttttgaagctagatagaggtgtttggtgcacaacactcaatgtgctaaatgtcactgacttgtacattttgagatggttacttttatgttatggttattttacatcaaattttttttttaaaagatggttggccgctaatgtacaacccactgcagtcgttggcagttattttataaatgtatatttgctgacagatattttcataatcgtcattatgaatcaggttataaaataaattataaattaaattttaaagattataaatgttaaattaaaacaaattataaatttttacaaagcaaaagagcaaaccaaagaagagaaaaaactgagaaagagagggaagagaggcaggaaacatgagagaagagagagagaaggaggaggaagaaaaggaaaatgcaaaacaagagaggagaacaggaatatgaaagagagttagagcaaaaattttaaagttgggtaatatcaggtgtcactgggggttgtgaagaaaggagagtgcaggaaggagcactctcctacatacctggtagggatataaatggacacagacactctggagcacgatttgtcagcagcaaataaaatgaaaatgaacatactcagagccctacttctgagcatatattctggagaaatcatcacatatgtgtccaaggagcatgcacacagcatttgtttgctatatcaaatgctagaaataggcccagtgcggtggctcatgcctgtaatctcagcactttgggaggccaaggcgggtggatcacttgaggtcaggagttcaagaccaggctggccaacatggtgaaaccccatctctattaaaaacacaaaaattagccaggtatggtggcaggtgcctataatcccagttacttgggaggctgaagcaggagaatcgcttaaacccagaaggcagaggttgccgtgagccaagattgtaccactacactactccagcctcggtgacacaatgagactctgtctcaaaaaaaaaaaaaaaaaactacaaaaaacctaaatagttaagaggatggatgcactgtgatatgtttgtgaaaacaagtaaaaatctaagctgttggaactttaaaacattttgagccttaagggaatctgattatgggatctgagtcacatgtaaacaggcagctataaagtaggcagctgtgaccttttgtttttctgattaagattagcctttgtctttacctatgttgttttgtaaaatgttataaatgactaaagggtaccagggaagaccccttctctcttaactgttgatcttcattatagagtaacttccctctttcctctctcacacagacttcatgactatcacattgtctaagatggaatgttaaatacactcttttaaataggaaaagaaaacaagctgtatggaaaagaaaacaaattgtaactaattaaattgttgtaagtcataaaccagccttgtatagaaaatgttataatcctactaagtttctttgttttctgctggtatatgcaagatcttaactttggagcactaactccattcctttggagtctgtgttatctgaatggcattctcagcttttcacttggaaaaatgcttttaaactggattctgatcctttccattatttcaggtagacatactaataatataatagtatatagtcatttaaaagaagaattttatatatactatatatgtgaaaagataaatgaacttcaaggtattttgttgtctggaaaagaaagttggcagatacagtataatgccaagcaatatatcttagtatattgaattatattcatgtattacttatacaataaaatgtataataacaaaaaatgagggatacagagaaagagaactctgccatgatcaaggcaagaaaatacatgtgaaggagtaagaaagagaaaaatcagaatgcagcagggcagcagtatttaacacaaaattttcaaagagggatcgcactctgtatatactctcaaaatttgggtcggggggtgcatttaggagtccaggcatggattaagtagatcctctgctcagggtttcacaaaactgcaattaaggtgtcattggtttgtgttctcatgtggatgattgactggggaaagatttacttccaagttcacttaggctgttgacagaattcatttcctggagtttgtaggacttcttgctggctggctatgggccggaagctgcctttcagctcctagaggctgcccatggttcctcaccatgtggactttccaagcatggccactgccttcatcaggccagaccggacagtctctagagagagtctgttcataagagacagtcttttataatgtaatgtggtcatgggagtgatatccatcacctttgttatatttattttcagaagcaagtcacaggtcccaacccctcttaggaggaggggatctaacacaggtatgaacatgaacaggtactgggaatcagaaactattggggccactgaagaatctgtcacacagggatatctttgttgcattgagacaggaaagctattttaagatggtgtggtgaaaaaggataaaagctccttactcaagctctagcttatctaactctcagtcaataggtaacaaaacacccaagaagctgttaactgcaagctcctatttcagagggctagggacttccccagatccccgcctgtacagttagacttaaactccaacctacatttaccccttcctcactttaatgctaaaaattactcctggggtggagatttaaaatgctaatgctacatatgatgtatgaaaaagcatattgggccactgtgcaagcactagaaaaactcctcctataggtgccctgatgtaaccctcccctatagaaagaccctataaaactgacccacacactatcctcagagcagtccgttcctttgcctttcttggtgctgactcccttgcgcacaagctgaatacactttcctttgctgctatgtttggtgatctctgttaatctctatcatgggagatcataagaatccagggcaacagtaacagcttctgagtttttaaattaaaaataacagtaatataatccttaaatttttaaaatgtaggacactaaacaagtaaaatctaaatccagagtacatctgacctcaaagttcatgggcttctcacttccctggccatagtttaaaggtgtgtgtgtgtgtatatatatatatatacatatatatacacacacacacacacacacacacacacacacacacactatggactacatccagttcaaactggatttccaacatttgagtaaatccctgcaatgaagagaaagagcaaaggcctaggagtcaactggtttctagccatttctggggtgtaagaatatgtgtatttcttgatcctcagttccagcatcaattaaagggagttaattttaccatctatattcactgtttttgtggttaccctggggctcaaaaaagacactgattgctcaataaattcttgttcctggagtcgctgttatcaatatggttatataaaatgaaagcgaactagaagacaggagatgacattcttaaattagtggcgtgttttactggtcgtcaccaaccctcacatttgtttcatcacaaaaacaaaacaaaactttgctaattgcaaaggaagaaaaaatgcacctgatcattgctttaaaattgtatgcatttggttattactgatatgagctttttgtcatttgtgtttttaaattttttccttttatgattgtctatgccctttactcatttgcttttagagatgttcattgatttgaatatagatattttatttttcatgcaacagtccgtatttattggttgggtgcggtggctcacatctgcaatcctaagctttaggaggctgagtcaggaggatgcctgggcccaggaggtcgagattgcagtgagccgtgatcaccactgcactccagcctgggtgacagagcgagacaccatctctaaaaaaaaaaaaaatactatatttacctctctctctctctctctctgtccaatacaccctaatattcccgtccccactatggtgatttacctcttcattttgtttacggtgtgtgtggagcgggggtgagagagcaggcgtgcagttgccttggttcagcagccagcccatcgctcctgcctagtgtgactgtgaatactaggtgtatgttacaaccgggagcggtgtacactcggggaaccgcatctttggaaacttcggtccgtagcggccgctaggattctccgcagccccgcaccccggtggccgaaccgcctgccccggcccagacgcagccgccgcgcccgcccacccggctgcgccccggggcgcgcgcccgtgcccggcacccgcccgcgccgccgcgccgctccggagcccgctgcggtcacgctgcgcccggcgccgcagggtgggcggcgaggcactcacgagggggacgctgagggcttccgcgcgggccacccgggtcaagcgcgctccgccgggaaacttctgcgggcgccgggctgaagctccgggcagggctgggaaggaaaggtaagaaggtgagcccgggggcgctgcgtccgccgccttccggtgctgtccgcaccctcgcacctcgcggccgcttcgggcaacttagcgggcgcggcttctgctgggccgccgacccctgcgagcgcttgcgtctcgctgccccgcgctgcccgcgccgctcccttcccggctccggtcaactccgcgccctggggtccggggtctggggtcccggctgtgtcgccgctcacagctcggaggtctaggggatcctttgctgcggttcctatccgcgccgacccctgaagaacgcgagtcgtatgccctagaggcttctgggcgaatattcctcccagatcttttcctgcaggtcctactctggccccaggcaccctggagccgaaataaacaggccagttttgcaagggagaaaagccgttcctaggggcccttgtcagtcctggggaagtcatgccagcgccgggagtttccttcccccctactcccgcccccggtctgtaagcaaagggcctgactggtgtcagtgctctcacactgttctcacagagttgggggtacaaaaaagctgcctcatcaaaggtcgcgcggacctgttttctccatttggggatccccctgccaaaaaagaaatttgccaacccctaaattgtcttatcaccatgtcggttacagtggtatagttttgagggtctgtattttaggcaaagatgaaaggcacaaccaaaatacagtaagaggggcagtgccaaaaatttagccagaagacatttgcagaaagtgaaaaattctgtttgtaaataataaatggaaaagtagaattagaagcccacttttggacgcaatttgatttactaaacttcgttgcttcctg

SEQ ID NO: 10976 - DNA, 6000 bp, Homo sapiens
caaaaaaccccacaacaaacaacaaacaaaacaaacaaaaaccccacaaaattaacaagtccaacatactcataaaaagaaagaagtcaaaatacaaacctgcttccaataccaaaggaaaaccacagccctcaattcctcttttaggattgttttcatggttgaccttaaactagttttgctgtttttccaactcatacctctctttacattctctccagataggagattgtggttttgttgggtctgaagggccttagtgggtcaggaaataaaaggattgcaatgatttaataccttttacctagtcaaagttccaacatagggtcatgatttgaaatttcaattggaataatgttttggaagatttttgtaaatcataagtgttgtacaaacattactttgttgatgttactgttgtcataagcaggattggttactttgtatcagaagagatttagcctcttaatgaaaaaaatctctggtataacattaaagataacattaaaactcgggtttaacattaaagataattttctaggctttggcagtaaaggttatgttctactgtagcatgggggaaagggaagaagactggaagtaactgtgtgcccttatttaatcataatttggttccttccagtttctttgcagctaactccacaagtagataattaaataatgttgattatggctacagaaatatactttggtatgtataaatttaagtcaaaaatgtagtataaggataactggctaggagtgatggctcgtgcctgtaatccaagcactttgggaggctgaggcggatggatcacttgaggtcaggagttcgagaccagcctggccagcatggtgaaaccctttctctgctaaaaatacaaaaaactagctgggcgtggtagcaggcacctgtaatcccagcaacttgggaggctgaggcaggagaattgcttgaacccgggaggtggaggttgcagtgagccaagatcgtgccattgcactccagcctgggcaacaagagcaaaactccgtctcaaaaaaaaaaaaaaaaaaaattagccacgtgtggtggtgcatgcttgtagtcccagctacttgggaggccgaggcagaagaattgcttgaaccggggaggcgaggttgcagtgagccaagattgcgccactgcactccagcctgggctacagagggatactctgtctaaaaaaaaaaggatgacttacaaagaaggaaagattcactctaaggaaaaagcaaagtatgaaaaggaaccccaaaatagtcaggctttctacagggaaaatgtctatctagcaattaaaacaaaattgattaaaatattcaattacagacataaatactaaaatgcccaatgcctttttttttttttttttttttgagacatggtcttgctgtgtcacccaggctggagtgcaatggcacgatcttagctcactgcaaccttcacctcctgggttcaagtgattctcctgtctcagccttctgagtagctgggattacaggcgcctgccaccacacccagctaatttttgtatttttagtagagaccgggtttcaccatgttggtcaggctggtcttttactcctggcctcaagtgatctgcctgccttggcttcccaaagtcctgggattacaggcctaaatgccttttaatatatgctgttagactaaagacaagttttgtctgtagctttgcttcttccatatttttcttttttttgagatggagtcttgctctgttggccaggctagagtgcagtggcatgatctcggctcattgcaacctctgcctcctgggttcaagtgattctcctgcctcagcctcccgagtagctaggcttacaggcaccaccaccatgcccggctaatttttgtatttttagtagagatagggtttcaccatgttggccaggttggtcttcaatgtgatccatggcacccagccatattaatttacttttattaaatatctcactaaaataatttcttgaaacaattttattaggttaaaaatatctgctgggcatggtggctaatgcctgtaatcccagcactttgggaggctgaggtgggcggatcacctgaggtcaggagttcgagaccagcctggccaacttggtgaaaccctgtctctactaaaaatgcaaaacttagccgggtgtggtggtgcacgcctgtagtcccagctactcgggaggctgaggcatgagaatcacttgaacctggaggcagaggctgcagtgagccaagaatgcaccactgcactgcagcctgggcaacagaatgagaccctgtctcaaaaaaaaaaaaaaaagtgaatcagaaattgcgattaaattaattaaaggtatgattaagatttgctttggagaatatttgggtggtctgaggttatctatgttcagtaatattaagttctaggataaattatatgtatacttttgaaaatagaggatacattttcaaatcttgaacatgctttggttaaaaaaataacattttagattgatctggggttttttcaaattgctatttcaatttggttcaagccacttttaggcatgaccccaaagctgcagtgaaaatattattcctgcagaaagaaagaaggggagtatttatcatcaataacttatattgctacaaggttacaaaactgatgtattatctttaaacaaatgcccagcaaaacataataggagtaataaaaaaacagttcaacattattaaaaccgaggaagacttaataacatattcaacaaacaaaaggaacttcatgatcctgctcacttcagctgcaacaagtctgtgactaattttctgtagcaaggcaaattgttcactctgggtatatcagcgttgggagatcacaatgctatgttgatttcatagttcaaccttcccttcatttcttggttttattttttcacctataatatagttttgaactttgtgcagaaaaaaagtgaggagggaaatgcatagaaatgaatttcagaaatttcctttcaaagtgagtagataggaaatttgaagggaagagagaatacatatgaacacaatctattatgaaggaaagcattactgattaagatactagttttgaagacatgaaatgaaagacaatgagcaaccagatttttcctccaacaatggaaggaatattataatgcatttagttaacagagtataaagtattaaaatgagtccttgaaatatagtgtaatatttggtatttgcatattacactttctcctttgaaaagcattttcacaattagtcctttcaatctctgcaaccaggtgggctatccttttaacccagagaggggcaatggactctgggatagaccccagccacagctgccgctggaccgtggggtcgttcaaagatctgggcagaagtccagtttccagctcagcggacaccagcctctagggtcccacagccaggggaaggagaggctcccgagagcgactgctcccgccaccgtccatccctgaaatgcagtttcctgttcacaacccgcagggagaatgccagtcactgtcaggaaattttaaggtcctgggcgatggagggtcaagggcacactggctttgtggcatcaaaatgatatgggtttgaatcctcagacattcttttactgtgagggaccttgggcagtctctctgggcctcaattttctcatttgtagagcagacatactttgctttattccatggggtttactgatgactaaatgacacaaaacaataaaggtctcagcctaccgcctgaagctggtggttataattagcagctctggaatgggtagggaaccatctgtaacggcttggggaaatcttcatctgcaagatgggcacagcgtagattcaaatctgtcgcccagtggagagcgatccggtctcactgcaacctccgcctcccgggttcaagcgattctcctgcctcagcctcctgagtagctgggattacaggcgcgtgccaccacagccggctagtttttgtatttttagtagagacgcggtttcaccatgttggttaggctggtctggaactcctgacctcatgatccacccggtctcccaaagtactgggattacaggcatgagccactgcgcccggccagatagtaaacattgctttgaaaacacaactgcaacccacacctcccgcaacccacacctccccatcccccaattttttttttttttgagatggaggcgcgcgccaccacgtccggctaatttttgtatttttagtagagagtgggtttcaccatgttggtcaggctggtctcgaactcctgatctcatgatccgtccgcctcggcctctcaaagtgctgggattacaggcgtgagccactgtgcccggcctcccaccccctattctaaatgacacttgtttccaaaatatgggggctggaggagcagatccagaacccaaggaaacgtgatcaaccagggcaattaatccagagggcaggacaggctgagcctcagctcttctctgaatatctgggacccctgcgcagccaggtgaaccgcccgcgaccgctgctccggcgggaagccttctctgggatcctgtacgccgacgcccggaatccggcgtggtgcgctgggaaactgagcggtggaggaaggcggagcggttaggggcgggaccctaggggaggggttgggggagggctttgacgttagggcggggctaagggcgagacctcgccgagttccaccgttgcgctcgccacgtctcccttagcgagctcgctggggacacgcagggggagggaaaactgagcggggcgggaactatctcctctcgcgagagctggcgacggcggcggcagcggcagaggtggcggcggcgtgtccgtgagagtggcgtgggggcggggaggagaggcggcggcggcagtgtccaagctacgccactcgggccggggcgttgggagcgggagtgcagagcgtggtcgtggcggcggcggtgagaagagcgaggcggaggagggggtgccatggccgggcagcagttccagtacgatgacagtgggaacaccttcttctacttcctcacctccttcgtggggctcatcgtgatcccggcgacatactacctctggccccgagatcagaatgccggtgagtcccgccggcctttgcccgcgaacccgcgcaggccccgccagcgcccccaggccctgcggcgcccgcttgcccggccccagcccgcggcgtccgggatgacagggacggtgcggcccggcctgtgtccagcgtccgccactggcggggcccgggtcagcagcgtttccctcggcgcttctccacctcccttcattgtcctcaggagtttcgctcgctccatcttctccattgttgtggacgctccttgcagcctcctcctgcctctttgtcttctctgcctttgcttttattggggatttttctttatggaggaagcgggatggggacttgggaggtgagcaaagagttggccaagaagagactgaacgtgcgggcacaactctcagtccgtccagttcgcggccctcatcccccgactccggtttccctgttgcagctgctcttaacagatgttttagggcatctctgagccgggtggcatgcttaggactccaattgagctttccaccgcctacccccgtcacttcctcccgttgctttttcatttgttcactcactgtgggggttggaagcaatgccgttattcctcttagcaaaaataggcttttttctatttccttttcttcggagtttcctgtttgtgacggaaaaagtgcaagtatgaaggattaagtctcgtttaattaatcttgtagggaattttgaggtagtgggtcgatttacttttggttctaagtcttttcacattaaacaacatcgaattaaagcacagaataacagattcttttcatatttcacttgatgtttgggtaatgtttgc

SEQ ID NO: 10977 - DNA, 6000 bp, Homo sapiens
ccaaaccaagaagaaatccctgatttacctgaaaaagaaatcagaaggtcagttattaagctaaaatcaaggaggcaccagagaaaagcaaagtccaatttaaggaaataaaaaatgatacaagaaatgaggggagaaatcgtcagtgaaatagcataaatacaaaacaatcaaaacttcaggaaacaatggatgcaaaaattgtagaaatgcaaaatgttctggaaagtctcagcaatagaattgacaagcagaagaaagaacttcagagctcaaagacaaggttttttaattaatccatatgaaaaagacaaagaaagaataagaaaatatgccccagtatgctgattgttttttactttatttccaaattcgaggtaatttttcttaacaatttctcatgaaaacattttttttgaaagtctcacagagtcttgattaacattttgaatttacatgaggaatgtgaggtagcatcgtaggtcaatttctcatcttcttttctggttttccagacgtttccctttgattgctagtttttgctgttacaatatcgtagacaagagatgcaaaggatctgaatttaggcaatagcattactttttttttttttaaatcaggtttacattcaagacaagacctttccttattcttacactatggggctattgtatcatgatgaatataatcttctctcataatcattaatctcatcagcaatgtacataactaccatctaattctcagaccctattcaaattttgctagttgtcccagtaatgtcctgtcaggtgcagttcctcaatctttccttgacttttgtagctgtaacacttttgaagattatagtcgagatattttatataatgaactttaatttgatttgtctgacacttccctcatgattagaatcagattatgcatctttggcaggaatataacagaactgacactgtattcttctaattgcagcctatcagatgcacacaacttgtatatgttccattatgatgatgttcatgttgatcatttgattaacataggactggacaaggttttccactgtaaatttactcctttttccccatttgtaattaataagtatttggtggggagaatctatgaaaatatgtaaatgtattagtccttatcaatctattatttaaattgatcactatgagcttgtggttttatgtaatgggttatagtttgttaaccatcattatttcaatgctgagagtgactcagatttgaccagcgggagtccattcaagctgtttctgtatgcccttcacatgtttccaacattattctttgagcacttccttactttctggcacaagatgatccagtctcaatttgtgctttttctgaatcagccatttctccaaggatccttggttccttttagtggagaatgatacttcaaatccaagatctgggcattatgcatgctcattatcactggggtacctttgctactaagtgttctaagtggacaaagccagaggaagtacacccacacaagtacatatatatgtatacatataccatatattcatatatgtacatacacatataaaatgtatacacataaatttacatctgtatttatttctatactatatatagttggccctctgtatgcatgggttctgcatcttgggattcgaccaactgcaggtctaaaatatttgagggctgggtacagcggctcatactgctaatcccaggactttgggaggctgaagtgggaggatcactggagcccaggtgtctgagaccagtctgggcaacacaggaagatcccatctctacaaaaaaagagaaaaataaaaccacaataaaaagtaacatgccactgaaagtacattaaaaatggtaacttttatgttatgtatattttaccataatttttaaaaaagtagtatctcctagtagaaaaaaagtaacaataaaaaataatataaattaaaaacccaacatagtataaccactatttacatagcatgtatattgtattaggtactataagtaatctagatatgatttaaaagtataaagaggatgctttaatagcatgtaagaaaaaagaaaaagagtatacggaaggaaatgtgttaggttatatgcaaatactatggtgttttatgtaagggacttgaggatctgaagattttggcatctgtggggggtcctgaaaccattcccctgctggtatcaagggatgactatgtattttaagctatgaatttgcactatttctaattttaatccaacattagagttcatttctctcttttcatatttgtaactttcttctctgacagtctgaaactgaactccaattattcttaatatatttactgattccatcaatccttctgaatgtaagcaacctcccagtcactgctgcccaatcctctgcatggagacccttcttatccactgagaacccaatactctgcatcaggctgatgctgccaccctccctcacaccactgtcctcttcagcttacctatgctctgacacctctctctgggcctctgacaccccattcctaccaagcaccgatgcctatcttgctctacttgacctttaagattgaattgttccgggaatggaaaggaaaggaagagggaaagtgtctgtaatttccttaagtttttttttttttttttgagcaggagcacagtggtgtgatcctggcttactgcaacctctgcctcccaggttcaagagattctcctgcctcagtctcctgagtagctgggattataggcatgcatcaccatgcccggctaatttttgtatttttagtagagacggggtttcaccatgttggccaggctggtgtcgaactcctgacttcaggtgatccgcccgcctcggcctcccaaagtgctgggattacaggcatgagtcaccgtgcccggccccttaacatgctttttgaagccatccttttaccactacaaacaatattgtaatgaataagtgtctatgacaaggttgtgaacttgctgcatcaaagagcttgtgcatttgcaaggttgttggttctgcacattgatttccatagaagttaacaatttacacatccacctgcaacacaggatggtgcttgaaagaatttaaaagaaagataattctaatacatagaaagacctaagagttacatgatgacttttgcaaaacttaagacaacttattttctcttttggaaatacgtttattgttacacaaatcaaatttcctactattcagtttcttagtaacaaaaatgaaacaaaatttagctatcccaagcaaatttaggaacataaaacaataaccaaacagacggggtaaaaagtaactataagaacccccaggctgggcacagcagcctgtgcctgtagtccaattgtttggcaggccgaggcaggaggatcccttgaacctaggagttcgaggccatcctgggcagtctagcgagactatgtctcaaaaccaaaccaaacaaaatacacaacaacaacaaaaaagtttttgaagaaccctcagaaacataaattaggaccctaagctaagtagactttagtgcaacagctctgcaatttacaaggcaaaaattacaaccctgaaaagcaggatgacacaaagcccggaaataattttctaccaacctggttggtcagatacttgtcagaaaactgttttccaggttatgagcttaaattctttttacagactggcaacggtatcaggacgctttttagagtgtcccctgctattgcctcgggcatgtcagaaactggataggagtttcaagttgagcagtttgtccaggatttcctgggctttagcactgaacgcgctgcgtccctggtaccccttcagttccaagcaaacctgcttgttggccactgtaggaccagacttacgtcaagtacagttgccactacacagatgtggctacttacatttaagttaaatactttttacttttgagatggagtctcactttgtcgtgcaggctggggtacagtggcgcgatctcggctcactgcagcctcgacctcctggctcaagccatcctccccgctcaacctaggactacaggcttgcgccaccacgcccagcggctaatttttgtatttttagtagatacggggtttcgccatgttggcgaggctggtctccaactcctggcttcaagcgatctgcctgcctcggcctcccaaagtgctgggattacaggcgtgagccaccgcgccggccctaaattaaattaaaaattcagttcctcagccggctcaacaccacacatgtggccagtggctgccttaataacgcagatgtagaatatttccctcatctcacagagttctgacaacgctgaggcagacagttgagagtttttttaaaaacaaaaacaaaaagcttggaaaccgctagtctccaccacctataataaccaacgggcattattactctctccaaatgggatgaggaaaaaactacgctaaggaacaccatgcagaaaatctgccgaggcacaggccagcggggtttctctgcgaacgcagccgacggccatttccacagcggaggccgtcgtcggtccagcgaggtaagaaacttgtaggacgcccggaactcccagagggttgggcgttcaagggtcaggacccccgagatgcaattgtccaaagcggtgggtgctcgtggtcaccggctggcgagcctcggctacggataccccaatgcaccactccgccccgccccgcgcctaacgccggctggagagcgcgcggccgcagggtaggcgccctcccgcacgcgcgaaggcctgcggcccggaggcagccggcagccaatggggcggggcgccgcgcgcagggggcggggccgtgacgcgccctcctcgtgacccggctctcggcctgcgctcgcggaaaccggaagcggcggctgtccgcggtgccggctgggggcggagaggcggcggtgggctccctggggtgtgtgagcccggtgatggagccgggcccgacagccgcgcagcggaggtgttcgttgccgccgtggctgccgctggggctgctgctgtggtcggggctggccctgggcgcgctccccttcggcagcagtccgcacagggtcttccacgacctcctgtcggagcagcagttgctggaggtggaggacttgtccctgtccctcctgcagggtggagggctggggcctctgtcgctgcccccggacctgccggatctggatcctgagtgccgggagctcctgctggacttcgccaacagcagcgcagagctgacagggtgtctggtgcgcagcgcccggcccgtgcgcctctgtcagacctgctaccccctcttccaacaggtcgtcagcaagatggacaacatcagccgagccgcgggggtgggtacaggaccacgtccgggactgtggctcaggagagttgggaaaggaggagggtgtaatgatggtcagcgctgggggcctcagtttccccaacagtaagaaaaaggggttggactgagtctgtagagttgggtcatcagaaaaagggggtggcattatggggcttgggatttgggtttttgcttccaagaatgctgttggacatctttggttcatataggtgtgattggttttcttgggggtcctgattccccaaccctcttgctcttcctccacccactccaccacggcttcttctcatcttcacctggagttgccaggaaggatccttttctgaaacaagtggggtggagacactggtagtggttagaaatttgagctttgtagccagaaatgttcatgtccaccaacttctaactatgtaaccttggattaattatcttctcagaaccttagtttcctcctctataaagtggaaagaacatctgcctaatgcggctgttggaagaattaaaagagatattgcctgtgacttcatcttagtgatgtgaacagtctggagctagctagcg

SEQ ID NO: 10978 - DNA, 6000 bp, Homo sapiens
ttgagctcaggagttctagaccagcctgagcaacatggtgaaactccgtctcaagcaaaaatacaaaaaattagccaggtgtggtggcgcacccggctattcaggaaactgaggtgggaggatcacttgagcctggggaggcggaggttgcagtgagccgagattgcgccagtttgactgaaataagccagtttatttattcatttttttctcaaaaaagaaaaaaaattgcagcagttcaggatagaatagttctgtgcaagtcatagtgtaaagcagtgttctccaacttttttttttttttttttttttttttttttttatgagatggagtctcactctgtcgcccaggctggagtgcaatggcacgatcttggctcactgcaacccccacctcctgggttcaagcaattctcctgcctcagcctcccaagtagctgggattacaggcacccgccaccacacctggctaatttttgtatttttggcagagatggggtttcgccatgttggccaggctggtctcgaactcctgacctcaggtgatctgccgcctcagcctcccaaagtgctggaattacaggcgtgagccactgcatccggctgttctccaactttaatactttacacatgtacatatcttctgggaatcttgttaaaatgtaggttctgattcaggagatctgagggggaggcctgaggttctgcatttctaggtgatataaatgataatggtttgagaaccacactctggaaagcaagagtaaagcactggttttccacctaagctgcagattagaaacacctgggaagcttttaaaactgctgatgctcagacattactccagaccaattaaatcagtacccaggcactagtatcaatatttttcaacacacaccaccaccactgatgtcactaggtagttccaatgtgcagccagggttaagaacaactgctctaaagtgtaatgctcccctctggcgccctggcacacttttcaaagaaacatccacagtcaaagtggagagcctcctaatgacaatatctccagaattttacccttaatcttaatcacaatattaagactctgaatatacagttttagctaatatttgatttattccaatccttctctttgtcaaaacagattcaaatactactaaatgagctttaatatatgctgttaaaactgtcttacagatgccagcccttgtttcccacccatactcctctagatgaatctaccctgacccacagctgaagagttcagggagttatttgtagcagctgccctcctacgcttttattttatttattttatttatttattttttttttttttgaggcagagtctcactctgttgcccaggctggagggcagtgatgcaatctcggctcactgcaacctctgcctcctgggttcaatagattcttctgcctcaacctcccaagtagctgtgattacaggtgcttgccactacgccgggctcctcctgtgctttttaatgcagctaatttttggcaagggtggacaactgactgaaataagccagtttgttcatttattcatttttttttaattaagtgcagggaataaactggtgagcactatttctgagttaatctagtgagaaagacaactgctatataatgcagtatatgctttgttatgggcaagtccagggtgcacagagcaggaacaccttttgtagtctgggagtggggagaaaggggtagttgaatattttaaggatagcttaagatgggagtgacagcttagctgagagacctcaaacaagtaggagttggtcagatgccagaagggaataagaatgttctaggcagaagaaatagcatggatgaagatccacatgcaaaagaaaacatgaccagttaggagaactggaagttcagggagctctagtgtagactgcatggatggagtcagagcagagagtaggtaacagacaggttgggaaggcatggtactcagtcaagttatctcttccaagagctatataactggaatactgggcaatggagatgattggctgtgggtctatagatctggcaatgtcctgtagggttgaagcctgaaacgaagtcctagcaaaccagctccacgtgctagggattcctccttttaagttcaagtctcccttggccctcacacacttgatttcccacccctgaatgcctataagatttactgtcatattcttacagtgaatggattccctttaacataagctagtacaagggggtttgtacttcttgctatcaagtagtggaggcaaacctctgattattaaggggccactggatgttagttatagctagaaggcagggtcctgtttggagtgttgatctgtttatttggggaaaggtactgacacaaggctgaagcattgtttaaaaatctgctgtttaaaaaacttagagggagcttatactgctagaagattcacaagcgcagaagcactctgtcttgctgctttcaagaaaataaatggttaagaaggtcgctctaacaaccaatcgacaatctaattgcaagcaatgtgtctaagaggaaataacctgagtgatggctgaccttgcacacagaagaacgctctgagggtgcctttcaattgtgattttacccccaggagacatttaacaatatcgggagatatttttggttgtcacaactgagaggtggggtgcttctggtatctagtgtgtagaggctacgaatactgccgaatatccaacaatgcacaggacaagcaagaatgagtcagcctgaaatcttgatagcgccaagattgagaaaccctgctctatgacaacaataaacagaagcttactgtcaggaactgaaaaaaaaaaagctgtctctctgaaatggtgaaaatgactttggaactcccttgatctacctctacagttgccatgcaaaataaaataaaccaatggttttctagtcttaaaacaagagcgtgaaatgtccctttatcaggactgaggaatatctgaggactagagttaaacatccaggtgacaaattgttaaacaatggtctgcacagaggagtgtgtttatcctagggtggaaagaagataacacaccaagctctgagaacagagcttctatttacatttttttttttttttttttttttgagacgagtctggctctgttccccaagctggagtgcagtggtgtgatctcggctcactgcaacctccgcctcccggatacaagcgatcctcctgcctcagccctgctagtagctgggattacaggcacgtgccaccatgcccggctaatttttgtatttttaggagagacggggtttacaccatgttggccaagctggtctcaaactccggacctcaggtgatccacccgccttggcctcccaaagtgctggcattacaggcgtgagccaccgcgtccggcccctatttacattcttaaccttaaaaaaaaattaaagttgccttgcgctttcatttggtctgggtgccagatagtcaagtgttaaatatagagagaggcctcctgagagaagagcagacacttctctgaagggcttatggtgggagctcacttccctgacagcattctcatgcttctgggctggatcagtcaaaactatcagctttttgtttacatccaagcaacactactccaactagcgtagtcattggaacaaatgttcatagtcctgagggtacagaaggacgacactgaaaagatcccaaggggaaataaaatctttctatttgagcaaaaaggtaaaagcactatgtagtcatcttttttggcacatcaaaaaagtcatcgtggcacatcaagacagacctcacgaaagcaattaatattcctatattattaggataactttgcataattaaaattacataagtgtacaacagctgaaaacacagcattaaatacaacttttaaagtctaatttttaccatgtgataaccgtatcaaattttgcgaatattttgtgagacttggcagtagatggcgctcacctttactaaaagtctgagcagcgccttaacactaacaggaacttaagaatccagctctgatgtcaggcaatcccgtgtccaggtcaggtcacttttttaagtctcagtttcctcactggtaatgtgggggtgggggcctccccaatgacctcgcaactcagaccgcttttgattctctgactacagtggtggagttgagacaggtcggctgctgcaaccgccgtctgaaatagcaatccggaaaagtcaggttgggaaagtgacagagtagacgccctgcggctctgatccgggcggcgcctcagctgcccacactatgtgggcggcaacgcacaaactccttaaccacgtggtgcctccattcccctagggagtcccatcacaggataacttctagcaaaatcaatcttcaagaaaaaaagaaggggtcctgccgaagatataaggaagctccctggggatcccgcagcacagcacaaacttagttcttgagagccgcacaaaaccaacttccgccccagtggagttgcgtccggaaggcgcggccccggaggtcacgtgggcccgcggaattacagcctggcggggcgctcaggtggaagcagtaggccacattatgtcgactgttccatgcaagtcagggtgggggccgtccctatcgcaggcatgagacaagtccagctgcgtcgtgtctggtaatctgagggcaagaagaacgatttgcagaagctcccagttttcttggctgtggcacagtcgctttgagggccaggttccttcggcttcctcccgactcccctgcttccccccgtaggattcccgttggtatcgtccgagccccacctccctcctcttcgcccccgcacgccgaaaacaggggcctctcacgtgacccctgcgcgctcccgcgggggagcgtagtctcggaggcggcgccgcaggggattgaggggttgactgagcgttgcgagccttagctttctcccgaacgccagcgctgaggacacgatgtcgcggctctcccgctcactgctttgggccgccacctgcctgggcgtgctctgcgtgctgtccgcggacaagaacacgacccagcacccgaacgtgacgactttagcgcccatctccaacgtaacctcggcgccggtgacgtccctcccgctggtcaccactccggcaccaggtgggcgcgggccctgtgggcttcccgccctcccctgcccagccgagccgcactgcctcctcgccgtgcgggcggggcccgggttcgggccacggtcgggcgggcgggccgcgctcggggtgcggcggcgactccggcaacatggcggccagcctggagtccactcgtggccgggccgggtggggagcgcgctggggggaagcggacgcgcggttcccagtggctgcggggctggggcccccctcgaagtgttgcaagtcgaggtgccttttaaaagtgcatcgtaattcctagcctcacttggggtcggaaatggggacgtggcttccttccgcgggggcagcggtggggttgaggatggggccgggcgtcgcgcctctgaggttggcggtggggccgagctgcctctccctgccactggttgttcaccctcccggcgcctctctccggaggtagccttctccggaagtccgggaaagagaaacttaaagacggtaatgctcgttcgtgtctcagacttgagtctgagaaggtcgcttgagatttaattacattggttttgcagataggaatagaatgtagctgacgtttgagcacgtagttagtgaaaacttcacacttcaaagtatgcgaaaaggaagaaaagtacccatgtatgtaccgggtgttttgcgtacgtatcctaaggctaaactggaaggtaggtagtgaaacctaggaggtagatgcagagacggagatgagtaaactctcctgacattgtatgtttattcttttttcaa

SEQ ID NO: 10979 - DNA, 6000 bp, Homo sapiens; identical to SEQ ID NO: 3449

SEQ ID NO: 10980 - DNA, 6000 bp, Homo sapiens
cccaatccagttgtctttccacttcaccatgagtggttcactcatgttagttgagatcttcaataaaaatattagtttttctcagtgtcacagtagataggaaggtaccttggaatgcgtaccgggcctgccataaccagacggggcagtgtaaggagccaggccagccttgcaaacaaaatgctggagaaatcaggtctcctgaagagagaaaaacctcagtaggcacatttaaggcatctcaggcacagagaagctaggctggcagtagtatctaatcccagggagcaaaacctctatagtaataactgggtttatcataaagcgagagttaggtttaatagcctagtatataccagatgacctgtgcattgcaattggatgctgacagttttttcgtcatagtttcctaaatcttgcactacttcttcagcaggcttcacattctgtcatgtttttcttctttttcctgtctgctaaacttaaacagtttaaccatgaggtcattttataacttcactcacccctacatgcaaaagccttgcaagttttattcccaagcccagctattatcctttggtcctgtaattatttatacaatggacatgacccattcctacccaccagtggaatgcatattgggatttttcccctaaactccacatccaccgagatcaagatcacttcctaggaagacaccagtaggatctggaagtctcgaaggaggagacataggaaagatatcccaggccagcaaggaagctgatgattgcacagagataagagaaaaggcatatggagaacagtgcaggggctgacctgacaggctcagaggctggagtgagtgacttaagagggtgagaagctgactgtccacactgggacctcagaaggaagggcatagactttcaagaggaagtgattgaacttgatccagtgaacaaccaaaaatagatgagggacaaaataacttatattaggaagattaatagtactatacagggccatagaaaatgaacaaggggagcatacccaaatgttaaggaacaagggaggcacaaaatgcctgcacagcacaaagcaagaagaaattaaggagaaatcatttgtactgaccttggtgactgaagatacaaaaggtggtagaaaacgataagctttataactttattctaatttttttgttgttttttttatttttgtttttgtttttgagacggagccttgctctgtcacccaggctggagtgcagtggcacaatcttggttcactacaacctccgcctcccgggttcaagtgattctcccacctcagcctccagagtagctgggattacaggcacctgccatcatgcccggctaatttttgtatttttgtagagatggggtttcaccatgttgtccaagctggtgatccatctgccttggactcccaaactgctgagattacaggcgtgagccaccatgcccagcctgttctagttttataaatacaagattaatgcatacccattgaatcagaatatctgagggtggtagcaagtgtgtgtgttttaaaggctctgcaaacttgccatagagaatcactggcctgtgcagcaaagcagattctgggcttagtacctttctgtaagctttctagtgcttctgagtcagtcagtcggtttagcccattgccccattgctaggagatgatgataatacacaccaaagaagcagctaacacaaatcaaatgcttatgcacaatgaaatgtctaactgtggttttgactgaaagaacaagagttagtggaggtgggtgattggatcctggactggaagctggagaagccttcccagaggaactgtgatatagcccagaccttaaagaatgggtggactggagctaaaaacagacaggtggaccaaggagctggtgaaagtggacgaagcattgtgcagtacagttttaagcaggagggtgtgggcactatgtttaaatagcagaggaggtcgataacttccctagccttcctctgaattggtcccctgtatgaggctggagacccttgcaaaggccatggggcaagaacatttttcctttatttttcccatccattccctttgcagctcagccacagacaagctttattccctcacactactcatctgtgaatgcacactaaattcagtcatgctaagaaacaaatgacacataatcctttgcattagtctggcaagctaataaacctttatatagtaatatcacctgtagaaaactcatttcattcttactacagcactatggaatggggaagccagaagtggtcctcatattgtagataagaaaaggaaaccccagagaatccaacctcaaaaccatagagctactaaggggagtatttaattgggggacttgaacacagttttctttctgccaccctgttctgcaacttgctgcagtatttgcatttcaacaaggatcagagcccaaagcacgcaggtctaactgaggacttcagacatcaacctgtagacaggagattggttctttcagtgaagctctgaatcacattacataggtaactgtctttgtcttcacattatctgtcagttgtgtgatcacaggcaagttggagaaaattgtgagcttcacttgacctatgaaatggaaataactccatctactttatagggtttttgagaatttcctgaaataccacctggacaatgtccttgctacacagtaagcctcaagaaacctcactctctttctcttccccattttatttacacacaaggcaagccctgctatgttaaaaccacaggctcatccagcctacctgtttttgctctctctttgcttatgctcttaatcctttctctctttccctctacctttgtccaaccacacctgcctgccttcacttcttaaacaagccgagccttttccctcctcagtccctcatgtgagctggttcctctgctcgctcatgcctccttgctcctcctcctccaggtgtcaccccaagtgttacttcttcaggaaggactgaagtaggttcctcctattactctttctcactagatcctgtaactttcctttgtcatattgaatacaatttgtaagtatgcattaatcctgtatgtaggcttaatgcctgtcttctccactagactgtggactcccacagggcaagaacatgtctatttaattggccactattctccatagtacccaatacagaatctagcacataagacatgttccataagtatttgtcaactgtgtgttggatgactgctggtcttatctctccctcttaggatgccctcctaccgtctcctcagcaattcacatagtacattccacacacacaaaaaaattttaccatgcccacattctctgaccttttccttaattttcttttcccaacacttattcatacattatcataattgggtaatgttctctggttatttcatgattccctaatcacattatcagttttctaaggaataaaactctttggggatctgttttgaaatctctgataaacctagtataatagttgaaaatgctttgggaattcagtgatttcttgaataatgaatgaatagatcaatcactcaatcctagtatatcccttttgcacaaagaaaaacttcacatagcaatacagagatatcattgcagcaaaacaatttctaaccatgactcattgctatctatatagcttccttcttgggttactattttgagtttcaataagaggcaaacaatcttatcttgaaagagggattggatttatttttaataagaaaggctgaattgggaacttgcatttttccccaaaatttaataacagcactagtaaagccctacgctcctcagctggccttatttcaggtatatgagaacagagcttccaggtaagcttctttcatgatctaagagtgagaccaatatcaccaaacctgtctaaattcattgacagccaggggaggtcacatagcaaaagcatctagtccgaacatgtttcagaacccaggactgagcagaggacatggagggaaacatcaggttccccaaggccattgtcctcaaacatgtgacatcctgatagtcaccactgataacttcagtaagtatcacttcgatttcacccccttcttctactcacaactaaaacaaaacaaaaacatatgtaattaaaatatgtcattgctatgctcaaaatgataacttatgaactgggatttcaaattcaccttgttattctgaagcagagccttcagtttatggttgccctgctgttaagcctcaagttgctctttttttttttttttttctgagacaggtcttctctgtcacccaggccagagtggagtggcatgatcgcagctcactgcaacctccacctcttgggttcaagtgattctcctgactcagcctccctagcagctgggattacaggggcccaccactgtgcccagctaatttttgcatttttagtagagacgaggtttcaccatcttggccagggtggtcttgaactcctgacctcaggtgatccacccgccttggcctcccaaagtaatgggattacaggcttgagccaccgtacccggccaagttgctcattctatccatattctttgaatcattttatatatacacacacacacacaaacacactatatgttacatgcattttaatttactttgacaattatctcacaggttctgtctagttagtactagttagtatccttccccattgagttagtatttgatcttataacatggtccaggaaaagaaaggtaagttttgctaagtacctgttacatcatgacacttgtgagagttggtatgggatctgctctttgtgcagtgtcacttatcacctgtcttccacctctgcttagctctgtgacaaccaacagagcctctaagagatggctgctgatgagtccttctatcgcaggctgcagcagtcctgaaggttgatggagggccatgctattcaaacagcaggcgtggctgagacagaagctcctggtgctgggaagccttgccgttgggagtctcctgtatctagtcgccagagttgggagcttggataggtgggtgcttaaaacacatgcttatacccctgtgacattaaggcttgatttaaacttccttaggacataattttaagtctatccacttgtttttctccttcgaaattcccaggaaacatgcttttctgcagtattgattttgatttactgagcctttaaaagagagagatccaagttcctcaaaccaagatgttttgtcaagatccatttgtattccgtgtgcattgacacttgttttcaggaaagggataaagctgtgtacagtaaaaatgtcatttaatagagctcagttggtccgtgtgcatctggtgttgacctctagctgtagcaaaacagtgatgatgtatctatgtatctttcttttgaaatttatgagtggacacttaatgtgctatcaggagcattaaaattatgtatgagcctctaaaggagctcatcgagtttgcaatccattgctctggaaagatggctgcaggcgtggggagttttaactatgttaattagctctggttttcaggggctgaacgcaccagacaaggaggctgttgctcagaataattgcccagaaagcaatgggaaatccatggagagaaaattacagtgctagggtttagctctaaataggtgtacagttgagaggtattggacttgcagaagtcccagcaacatcagctggcttcacagtaaatgtttctggtgtgttctatgtctagtctaatgggcaaagacagagaagttaatttctgaaatgtgaagcttccctttttgcccttaaaaaaaaattttttttttgagatggagtttcgctcattgcccaagctagagtgcaatggcgtaatctcggctcactgcaacctcctcctcccatgttcaaactattctcctgcctcagc

SEQ ID NO: 10981 - DNA, 6000 bp, Homo sapiens; identical to SEQ ID NO: 3450

SEQ ID NO: 10982 - DNA, 6000 bp, Homo sapiens
gtggtctcgaactcctgacctcaggtgatctgcctgcctcgacctcccaaagtgctgggattacaggcatgagccatggcacccagctgaaatttctaattagataacttatacttttcagtcaaaactcgaaaaaataattattgttgaagggtatttggaatacaactgtttcggaggcccttagtagactaatttataaaaaaaaaaacagaaggtgatgaaggaaagtctatgtttgatccatacagtctgacacttgagaaataaacagtgacttcacagtggacaaaagaagaagaaaacatgagtaggaaactctgatactactgttgataaatggtggtttcagacaaggctgaagcaaacctggagctgtgggaagtggtagatgaagaatgtacatcggggaaaaggggaaaagcagttatagtctgtctttgatagtgtaaaatttattatgttttggttttaggttgaatatactatacaaaacatagtatctagtaaattttaacaatggaataagcaaaagaatccttgaagcctaaattataatggatttattagtcaaataagccagatcattgtaaaataaaactttaggtttggaaaagaaagactaatatgtaatttatagatatcctaatctctgaggcaatataaaaatatattaatatttagctatgctctctagcatgtatcacaagtatgtcttgaaaagtgaagtgactgttagtttcctaggtagaatgatcgaataccttaattattgaagttatcacacaaatagttatagcattcctaccacattctaggtcctgtgttaggacctgggatacaaagataagtaagatacagttattgttgccaaggaactcacagtctaacaagctccaaaataatatgataaatgcggtaaaagatatttacaggaaactaattggggatggagcccatagcatcatatgaggagaaagaaggaaggcttcctggaagaggaggtgtctgagctaattctaaatcactgtaccaaaattctcaagttttaaaaacaagagagcaaacagttgtcctgttttttgtttgtttttgagacatgatctcattatgttgcccaggagggtctcaaactcctagattcaagaaatcctcccacctcagcctctcaagtagttgtgactacaggtgcacaccgccacacccagatccctttgtttatataagggaaataatcaggagaataaggctaataaatccctttggattcctaaacttacttctttagcatatgtatctgaaattttcaaaactgttggtaatatgaataataaattcaataaatataaataatatgtatgaatacaacactccaaacctttcctacattgattaaataaaatgctagtggatttttactttcttcattcaccatacatacaacttgttatagccactaacagcatatacttaaccccttctcttggtagggttactggaaactaaatgaaacacgtgaagttaggtacagggcctggaacacagtagagttcaataagtgataatctccctctccagtccaaggtgggtcttatacacccttttattacagtgcccttgcaatcaatgatgctccataaatatttaaactatacactgaccccgcagttaattaccagtacctatcaaagaaacccttagcatcatctctctttccccaatttcctcagtctccaaccaatttatttttagtaatgccttgtgacaaaactctgtagggataagttcctaaaacaagagtgtcacatttaagttatattttttaaaaatcacataagcatgattcataaaacagttattggaagcttctgccaatccaactgcaaatagaagtatcaagactttaatatctgtggaaaaacaaatcgctcaagtattgacattacatgcaatctccaattccagagtaggtaaggataaggcagtaagtgtagatagagtacaccgacaacagatggcagcacttgaacatcaagccccgatgataagccctccttttcacatccatgttctgctgtgacttgcagatttgcataacctcaatccaggtgggcaaaagattatgtctacatactacagtaatgagaagggacaacatgacatgaaactcgtctgagacacagatgagtctatgacttgttgaagttgtaaaggtaatagatacgaagctgggttctgcaatctcgaaaatgggggtacccacaaaccattagagcactggaaacatataaacacttaaaatgtcactcagctgcacccacacaatgtagctggaagttgattttttaaagaaatgaaatttatactcaagtgtggttcatataaattagagttacaagtaatagaaaatgagttattacaatttttggtaatggttcttatatgttaatagatttgtatatggtttctaactaggaagaaattaaaaagaacttttggaacttacttgctagtttattatactgctaacttttacaagaagaaatagattccttcattcttctgtattacatggttaacagcaacaacttaggagaaaaagacacctagattgatatactacctcaatctctttctagttttgtgaccttaccaagacacttaagctgtctgtgactttagctgttaaaaagtgattactgggtgtggtggctcacacctgtaatcccagcacttttggaggcctaagcaggaggattgtttgagtccaggagttccagaccagcctggtcaacaaagtgaggctgcagtgagctgtgatcgtgccactgcactgcagcatgggcgacagagcaagatcctgtctcaacaacaacaataaaagacgtgatcatacctacctcataggattttgtaaggatcaaagaattaaagaaaatagcataatgcctaacacatagtaaggactcaataattgaaagctattataattgtggttcgatgtattctccccctgccctgctaattttaaattatttacttcgcgttcctgaaaatgcattgctaactgtattatgtgtagataaagtggctgggagcttgatagctgtagcaatgtttttgcaaatattgtagatgaaaataaagctaattttggaagggaatggggaaagatgtaaattttagttttacattatttattgtgtactaaaacctgtatgaaggtccctacttaagtctaaggtcaggatctcatgatccattttgattagctaagtttgctcaagccaaaggactttattgcttcatgctaaccagtctgccatgcagtacaaagactgcaataataaaattgtgatttcttgctcctcagttgccttgcatcagcgaagggcacacaatgcaggctttgggttgtgattaaccgtaagggtctgccccaagaacagataacagcagactgcactcagctaaatatgcttctaggtaatgcaggagtttccaccagcctactctaatcacacaggtttctctttccctttctaggactgtctacccttgaactggaagtaggcagaatgtaaagagaggagttgctggatacttttaaaggcactgaaaaattcaagttaaagttatagttgaggggtagtagcctcactagcctatcttgagtaagggtcatgtctcattcatttttgtgtcttcaatgtcgcaacagagctctgcattcaatatatttgtaaatatatgaattcacaattttgattttctgaaatgtcacgtgtgaggacactaccagttttcaaataaatacaccttttaaagtacagttatgtgccaaataacaaggcttcagcaatgaatggatcgcataaactatggtgatcctataagagtatatgactgtaccttttctatgtttagatatgtttaagtacacaaatagttaccactgtgttataatcgcctaccgtatccagaatggcaacatgctgtacaggtttacagcctaagagcaataggctacatcatatagcctgggtgtgtagtaggctatactatctaggtttgtgtttaaatacactctaggatgttccctaagggatgattaacctaaggacacattcctaagaacatatccccatcttaagtgaagcactactgtagttgcttttgaaatgtgtgacctatggtgtattaagaggaataccgtgtgccaagaagtgacgctaagcgttttaccttacaactgagttaagtaaaatttggaaacttggtttcgaggttaatacatgaaaggcgacacaggtagtatgtgacagagggtaagaattgaatccaggtctacctgactcttaatcacaagacaaaaagtcttctattaattccgcaaaatctggtcagccgcttcaatgcgcagctttaggcagtccacacctggaatttggggtctggtttaccaagaacagccagtgtgtacacccactccatcctatccaggaactggaatcgagaaggtaaaaacgtggctattgcgcatgctcacaccgcccttccttgctctcccctccctgaccctagatgccaccgcagcaactttctgggaggattttggaacggctcccgccaactgttaagtcaaaccggcggaaatccttcctttctgcgacgtggacacctttctcatcctcgggcctttccaaccagggtgcagaaaccacgcgcctccgtttctcagggattcaagccgtagtttgccagttgttaatatggccgctgacaggccgctcccaagctgaggcctttcataggccaagatcgcatcctgtccccgcctattttgtccctcgtggctgcgtccgcccagctcttcgctacgcatgcgcagcgggggcaggctgggaggtgggactgactgagtcttccgtgtgtcgccgccgttgccgcctcagcttcagcctcgttactcctgcggttctgtgactgtgctgctggcgttaacggcgcgaggtgaagggaggtgacggagtgtgcccgcgcgcgcgggggtcccctcagtcccagcagttcccttcgtgcgcggggggcggcgagggtcttcagcagtcgggagaggcccttgacggcgccatgtcggcgggcggtccatgcccagcagcagccggagggggcccagggggcgcctcctgctccgtgggggcccctggcggggtatccatgttccggtggctggaggtgctggagaaggagttcgacaaagcttttgtggatgtggatctgctcctgggagagatcgatccagaccaagcggacatcacttatgaggggcgacagaagatgaccagcctgagctcctgctttgcacagctttgccacaaagcccagtctgtgtctcaaatcaaccacaagctggaggtgagccgtgggtgctggcggctatggcatccaaccccaggctgcccggtggcgtcagatgccatttaacgctccagtgaaacgaccctagaaaactgcccaccggggcttcaaatgtgatgggagagtgcatgtctgaggagtgaggtgagggtgggggacaaaaagggccctagaccgacgtgtgagttcccggggtactgtcgtccaccttcctagtatctctctgaggaggaaactaattacatacaccagcctccattgcacatgttacattaacaaacctaacaaagattctctgtcatgaaaataccgtaggccaccttttgacaactgagttttgcagatctgctttcacattgataaaccgaatttgtatatgttaagacagatacagcactgattattttcattttaattattccaggtcagcgcctatgattgcatacagagacatgcataaactatttaggggaatctgatcaaagctcttaggaaaatttcgtggtgcataacgatagtatcactgtctcggtttacatccatagttggttgttaaattacaggcagatacctccagag

SEQ ID NO: 10983 - DNA, 6000 bp, Homo sapiens
gtcaggcatggaagataccacatgttctcccttatatatagaatctaaaacaactgaactcagaagcagagaacagaatcatcattctaccctgcggaggctggggatggggagataatggtcaaaggatacaaaatctcagatgagaggaatttctgtttctagttctatcatcacacagcatggtgaatatagtttatgatagaatactgtacatttacaactggatgagaaagtaattttcaaatgttcttaccacaaaagatattaagtatttgaggtgatggatatgttaactacctggatttaagtattctgcattatattcagaaatcataacaccactttttaccctacaaatttatacaattataaattgccaattaacaagtagtagtagtagcagtagattagttggtcaactttttgatcctataaagggtgaagaaacattttaagactctccagctaccaaacccaacgctgttcctcccaaccatactttcttctccagtggtattattcaaataagggctgggagttgaaaagtgacaaccatatgaagagccacataatctaaaatatctcttcctgccatcctttcttgggtcttctttataagaatcccacagacactgttatttcctcattcccaacattaattacccttttaagagaggggaaaaatggacttaaatttcttaaatgcctactgtgccagacacattagttacatcatttaacctaagaggaacaacaaagttgcagatgaagaatgagaggcacagaataggtgacttcttggccacggtcacatagtaaagcacatgcgcatgcacgtgctctacaataaattcctctcttattcaaacccttgcccagtgacctcaggaaaacctccccctgttatttctttcagtccctttgttaatgaaatcaaaacaaaaccaaagtaaaaataccttaagggcagtagtcgtgatatttttcaaaccaaaagaaagctacacacactgaaggaaaactatacctaagaacttccatacacctttctgaccttgcaagttgattttagaatatttctgaaactatcattatatctcctctttcaaataaatctgtttgtcctcaggctctaacattcataataaataaaacacttttctaatttaatgttactttgattaccagcattgcaacagtactttttccaacatgttattcttccctagggtgaggtctttgcagtgcaggctagcagcccaaagcaccatttacaaccctgtttctatgaagaaaaatgctctgaaagttccaaagagccaatgcacacaaatacttgcaggacacaatgtttttaagttggggacagttaatatttatgaaatgtgttcaaaacaaaaccatatctttcaacaggagcctgcaggaacagagggctcctgccctcactgcccctggcacccacgccccctcaaaaaaatgtgattggaattctataaaaataatctgccactcaggcagttccaaagtaaattgaggaagagcaaaaacatggaatcagaaatataacagtagactccaatttgcatacaaataacaccgatagtttcctttaaaactctggttaatttccaccttaatatatctcatgtaaaattgagagtgcccattgaagtattgaaacttcaagattaatattcacaatgaatcattttttacgtattacatttggattttttaaaaaataagagcaaagacctattgtgacctagaaaatctcccattaaaagattttatcagaaatctaacttgttggagaatttcagtcattatttactgtacatgtagattaaattcatttctttcactagattaagttttatttaaagtaagagaacaaaaatcctcaaaaggattcttccacaaacttctaactagtactgcctagaaacttcctaagaaatgtttttgcacttcaatttttgagaacttataattttataaaaatataaatttatcagttttataaaaatattgccaatttttcctctgtaagtctgctcataattattactatatttcattttaggcatgttaatgtaaaaattaaatctaccttttggtaatttcttttgaaagtagaaaaatctaagcaacaacatttatttggggatttctttgtagtgttttgtggtatcactgatgatcaggtttttaaaaaattacttgattcaaagatataatcttgaaacacaaaaatttacaaattatcaaagaaatacacaaaaacattaagtattgaaaaaggaaaatgtaagaattaagtttgcaagcaaacctgcaaaaattacaagagagttatacttcaaaaggactggctggccaaataaaaaaacatagcaagtatttttttaaaaatcccacaaaattactaaggttcttaggtttacattagaccatccataatgagaaacagcaatttcagcactatcattgcattcataaagatggtgacattaccttcaggtagatgtggctagggagtcttgacttaggggacaaagtcaaggtttcattacttaaaagacaagaaccaatcacctttatttttatctcagggtacaaagtacttttttcaatggtagaatgtcaagtgctttgtagtactgaaatcagaggaaagtgtccgattttgcttctacaaaatgcacaattttacttgttgactattttctactcctcccttaccatgagcacacagggcttcatgtgattattttaaagaggatgcataattcgattgctatgcctcttcagataccttctttgtgaatttttcaaatttgctctggcccaaatattggtgttcctatatagttcttatcccacctaatgtacacagacaccctttaatatgtacctataatcaaccacccatgttaacttcttgtttaacatattatcaaagccaggctgcaagtataaccctgtcatttaagaaatacggaaaataagaaaaaaatcttaaaataagcttcatgatgaacttaaaaagaatagttactttaaaagatgtagaaacaacatagataaatttaaagtttttaggggaaaaaatccttaaacccacgtactaaatttttaatatttccactacagaagttaaatgcccaaactgatttggtatcaaaattaaagtgtcagaaatagaattaagttataacttttatttatcaccattttaacatatacttaaaagtggaatttattgttttgctggaatacttaataacattaatttgaaataaagcttctaaatatttccggggctataattccattcttacaacataatttttaaaataataaatcattccaaaaaaggatgatcataaagagattagcgtttggggtagttaacccagttcctatttatctatccattcaagaggtaactcagttttaaggatgttgttagaaacattatttcacagtgattcaaacctttcagcctatgcacaacctacaaatgcataatcgtttgaaataaaaattgcctttccatcattaaagaaaaatcatctttgttttctttttcagtccttctgaacttattaccctgcttggatatgctgcactcttctggacatagaatttcatagcaggtatcaaaataaccaagccataaagccagctttatcaaacaataatttcctattaacaagaactttgagtgtattactcattttacacaaaacaagtagacgacaaataatgatggttaaaattaataattaaatgattaaatgaaaactagtaaggatttctgattacttttctactttctcatacagcttaacacctggaaacaactgtactggagccaccttcccgaaaggtgccagctgtttcctttgtcttaagcacaaacagaactaatgtcacatttccagagaagggtaaggatgaaataaggcgactacaaaccagctttcagaaatgcgaagtcagtcaacgttttcctctctgataaccccttatttgtggagcaacaggagaattacaacacattttggaaaataatttctattggaccaactcctcacttcgctggaagtagtcggatccaagacttaatttcaacacagtgttcgacttattgcttgaagctaccgcagcataaaactcgtcttcgaatggaaaatttgaccaacttctatgaggtaaatgaatagtgaaagtacgggtgggcgggagagacatacaagttttttcggttttttgttttttgggggaagaaagggcgcatacgaaaaaagtcctaagcaagcacagaactgtgtctcttaggatgtaaaaggatgttataccagagagctcaaaagctcccagggtcacggctcccctaaccgagggacttggggtttcactgctaccaggcacccggggaaccccggccttggataaaaagagggtaactggagtaaagccgtgcttctgaacgacccagcgcccaggaccccctgccagaccccgcctttcccgggaccccctcgggagcgcccccgaccgccccgcacgggtcggaggaggaggcagagaggtcccgcgcggacccaggcgcctcccgggccagtcgaggatcaaccaccccggggacccctgccgaggccagcgcaggataaactccccgaccccgaactctgcctgccgcttctcggcgctgggcctcagccacgggttcgaccgtcctcctcaccgcggctcccgcctacctcgcgcctcccggccccgcgacctccccgccgccggccgggccccgccgaggctgcgcttcccgtaaactccccgccccgcgcatccccctcctcgcctcggccccgcccccgcgggaccctgggcggcgcgtgattggcccggccgcgccgtcactctccggccgcgtcgcctccctcgctttccaccgccccaagaccggcagtgagattagtgctcgcggggccgcggcggagtgtaccgtgctgctctactcgctgccattcgcccgcaggtcggcgcgctcgcccacctgagccgcgccggggctgcgggaccgtgggacagcgcgctcagcccagcctaggaaagaggcagcagtctcagcgcggagatggggagcgggcgaagttgacgagtctcccgcccacgctgcgcccctcctgcccagaggtgcgctgcccctccccgaggtgctcgcgcgctgccctgaccccttcctgcgcgggacacccctcccctacccacgggacctgataacttcaccccaagtccagagagtgggctgcgagggcggtgcccggactggacaggactctgcttaaggggagcggtcctggaggctcgccaggagtcggagggcggagacccgctggaaactttatcatcgccgtaattactacgttttactgtttctctccccgcaggggctgcagccagcggtctgtcgcgcgtgcctgtgtgcccgaggagccgccccggggagaagacccggcgcggagttgttcccccagggaggatccgcagcccagccgagggggtcgggcggcctggctacgcaggacccagccccgcagccgcggactcccagcggcggcgaagtttggctgctgagcggcgcggcgccggaccactggacagcgggagcgatgcccgtggggggcctgttgccgctcttcagcagccccgcgggcggcgtcctgggcggggggctcggcggcggcggtggcaggaaggggtcgggccccgccgccctccgcctgacggagaagttcgtgctgctgctggtattcagcgccttcatcacgctctgcttcggggcgatcttcttcctgccagactcctccaagctgctcagcggggtcctgttccactccagccccgccttgcagccggccgccgaccacaagcccgggcccggggcgcgcgccgaggacgcggccgaggggcgagcccggcgcc

SEQ ID NO: 10984 - DNA, 6000 bp, Homo sapiens
ggggtaatagttgacataagattggcaagatactgaacatttttaaatctgagaggttcatcattttattctctatacttttgtaaagtttttaaaatgttttttgtaatggaaagaaggaaaatgtatgtgtgtgtattttttaatatatatatataattgttaacatgcattctataaacagttattttctttgtagtaaattctgttttcaacaccgaattattactttcttttctttgcaacaaattactaaacagttaatgaaaacatttgaattctatgatttatgcataggaatgttggcatgaaagtcattttctccaactttgtgttcttttcttagagcaatatggaaaatttcccagcacataagacattttaatgttctttcctaaagatgtaactctatacgtgtaagtggctaattattcaagtttttatttagtaacaaactcaagacaaatcctatttttattgaaaattctattactaaaattgtttgtgataaattaattcatcttataactctattaaggaacaaatatgttttttatattatattttttcttaaagtgaaagaagaaattcacatgcacacacaatgcacatgtagtttagagacttgtttagacatgagagtagattgaatttgactgaatatggtctcaaattaataaaaccaaagaagggggaacgtgtattaaaatcaagtcttaagaagcaaggttcagttacacctgatgtacagaattttgtagaccacataacaaatatcttcaaagttggattcaatgctggaaacatgagagtgaatatattttagccttgctttcagagcagtgagattcttgtcttgctggcatcatactaaaagcaggattaggctaggacattagctcaagaggcttatttggaaaattgcttaggccaataatttaggagggatcagtaagtgatccctgtaaataaggaatgttatgtttcctgtaaataaggaaacatagttatttataccaattcaaattatttctccagacatgcgagcaaattttcaaagccaagaactatgttttgtgtaatggccaaactctatgtcagacttttgaagaaatttttcatctgtaagtgtttggttttccaaccaaatatctccctgggaaaaaacaaaagtcattttaaaatgggagatcccaaaaataaaaagtctttaagtagagatgttagaggtttatagctccctaatttcattctgatttgttacctagagaagaaaaagccaatttcaaaacttggaagatttgaaatactttactctcttatcagtttataaaagttgcatctggctggctaagttctatgaaaatatccaattcaaagttgtagaaatgggcaacgatgataataatattcaatagttattgaacacttttccaaaattcaaggcctttgctagtattttacatgtgttatctcactgcaaatccatgggtatgaaatactatgctcacagcttttcaaaaaagtaaagaaaatacataaaaaaatttagatcattgacattgctactgtggccatatctctttgggacaaaaattagttctttgacaagagtccactgtgtacagaacagacataaggatgacctggcagtctatgacacgatcagaaactcatgttattattgtaagaacaccatgtgttggataatgggataatatctgattgactgaatcagattccctcggaaatagactcaaactcagagattcatatgcagtagacttactggggtgtactcttgggaacaatgtctgggaagagtctgggaggaagaattaggtataaggagaagttcagctgtaatgctcttgcaaaaaagtctccagccaatcttatgaggagctctgaagctgagatggtgcttcagaggtgtcccatggatatcttgggaattcagcttcctaggttgagtgtatcttatttaaggatatataagaacatgtgcagaaatattctctggaaaatattaaaaacttttggagagattaagaactttgtttacttattaaaaattctcaaaatattaaaagttcaacatttttgtatcttcctgttgaattaaactacttttaaaaattatggtgcgacactcagtatccctgacatctttatttttgctgatatgagtatagcttcaacagcttcattttggataatattcacctattttatcttttcccgtcttttaaattcttacttttctaggattttaggattctaataaatagcatacagttggtcattttaaaatccaatctggcagttctggcttttaagtggagtgttgagttcatttaaatttatcagtgtttggggctttttctataatgtttctttgtatatttttatttttcctacttttctaatgcttttttttttaaaaaagtattcattgttctcttatttaatttttctatttttaaattaaaattctctatttctaattttcaagtggttacatttgaaattttaccatgctgactcagtcaagtttaacatcttaaactccctttagaaaagcacaagatgctgggtgcagtggtacatatctgcagtcctagctacttgggagtctgaagttgggggatcatttgagcccaggaatttgagtccagactgagcaacatagtgaaactccatctctaaaaaaagaaaaaaaaacacaaaaatacaaagattgcagaacatttcaacttattctatttcctactttctaattattgtttctagtattttagtactatgtatttttaatcttcacaaattagaatattttataatcattattttatgaaaacaatatttattgaattttaccttaaagcatccctcctgtttttgctctctttccttcttgtatctcaggtattctaagtttattttccttcttcctaaggtataatatctagaacagtagttgttaatctgtccagttctattctcccgtagaaggctttttgaaatatttggggacattttgtcatcacagtggcttcagggcacttactggcatctgtagtgtgagacagggacacttaaacaaattaaaatacacccaggacagtcacctacacaaaaggattgttctggttcttccatgactctcagtggtttcaatggtctttctgggtatttcatgcagaaaaaacactcttgataagtatttgagtctaggatctaattccatgtatataaatagatataatatttataaataggatctaattccatgtatataaatagatataatacttataaacatggaattagaaatatacatattataaatatgaatattatataaacataaatggaatatttggcacagttttaacacactgaatttttcaggaatgcaaaagccatgtaaaccaaggaattttgttctgaatcttaccaataatagcaatatttcagaaaatcacatcactaatggctatctcagtcttcgtgtctgagttgtcaatacaaccatctgttaatttgaatatgcagctgtcacattgctggtaactctatgtatgtgcacacacatacttgtacatatacatattgggttttagccctcacccacaaataaagttgcaaatatgcctactctgctaatatttttttcccctaatgcagtagttagacaattagcagacatttcatggagttacatgccgctagagctggcaaagatgtatcatacttttgcttcagaaaataatagcgtaaacatcaaagaggacgttaattctgtctaacatgtgatgtgtacctgatactaggggagtaaaatataaggctggataaaggagaattcattgacattgaaccactcatcagtgggacggttccttatagcctggacataaccatggtctggggaattgatctagactggaaactggatgagggaccatgaatatccactgcagcttcccgcagaacgatctttatatatgataccatcacatggtgtctctctggaatcccattgcgtcctattacttgcagaaaaatctcgaatcccttaacgtgccaaaagattagacccttccagatgtgaccaatttacttctttagcttcctcatctcctctttctaacccgattacctcaagtgccagtatatcctacactctgaggcccctattctttgcatgtccagtttactctctttgcttctttcctcaactcctctattgggttgaaactaattctgggtctccacagcaccgacttggcatatcttttttttctagcatgacatttaattgcactgtattgtaatcgttaatttatttttctctctgttacttagtgagggagttcttcatagctcctagcagggtgcttggtaaggaaagtgtttggtagggcgtaggagctcaataggtgttagccgttagaggaaaacaacactgcaacttttcaataccattcactcttcaactgaggctcgtcaggctactttcagtttcacttttactatctttcttttattgatcactttctcttcgtactctcttccctcccacctacaacgcggcggcgaaggagagtggctcacccgaacattctctgggcgcccccaggacaccagttgcactccctcccaccaaggaagccacatcagcgagctgacgtcacgcgcatcgtggcgttccgtcgtcgggtcctcccatcagatcattcctgatgtctcttttgttgttagtcgggagagcctgaggtctgctggtactgaaggctagcaactaagagtaccagaggcgagacctcgcggacccctgcttccccaaagtaaggtgactcgttttccgaaatgacgcactggcagctgagggcgcaggcacaggcgctcgccgcggtatccctgggaacgacgccgcacgtagccggggctgggtgggggtgcgcgtgcgcgtgcgcagtgcgcggcttttgctcggacctggagtaatgagagtggacgtttgattccaacaggatggcccatttctccagcgaggaccaggcgatgctgcaggcgatgctgaggcggttgttccagagcgtgaaggagaaaatcacgggtgccccttccctggagtgtgccgaagagattcttttacatctggaggaaactgatgaaaattttcacaagtaaaattgcttttgatgttttaagcctataaaccatcgatccagagagggtccagagaagggtcaacagtgttaatttatttattgtttttaaaatagtgcccaacttggaggtttactttttctcttatttgccaaaacgtcgaatttatttaacatttattcttatttcctaaagcttctgccgcctctttctctctatattttttgagggggagtctcgctctgtcgcccaggccggaatgtaatggctcgatctccgctcactacaacctccgcctcccgggttcaagcgattctccagcctcagcctcccgagtagctgggattgcaggtgcccgccaccgcggccggctaatttttgtgtttttagtagagacggtgtttcaccatgtgggctaggttggtctcgaactccctacctcaagtgatccgcccgtctcggcctcccaaagtgctgggatcacaggcgtgagccaccgcgcccggccgccgcctctatatttttactgccacaaccagcatatcctaataatccattcccccgcgcctcacccgggcagcacagtaatattaattataaattattcatgttctttgaaagaatacttccacgatttcaagggattcctgtcagtatacagtacttaaaagcaatgagttccaacgatctttgttccttgaaaatatctgctgatattttaagtggccgcacgaattactcactctgagcactgcaaagggaataccgaagtgagatcattagtttcctctggaatagtttcttaagtttgtctagaggagt

SEQ ID NO: 10985 - DNA, 6000 bp, Homo sapiens
atctgcccttgaaaagtgaaatgttttagaaatgtcatttacactttttcaagaagtcactcccttctcaatgattataaaatagtacattaaatattagacacatatttgaatttgctatccactttattatttacacagtgaatatttccttttttcctgaatttatgtatgttctgcctgaaataaacttatttttgtagacatctatttcactggtataaacatatctgcttgttatggaattataggcttagatttcagcaaaataagaaaatctgtgtggaaagaatattgttcatttgctgttttaacattaagaccataattgaagagagtttttgtacatttgacactgtatcttagttttgaattattttccaaaactatcaatgtgtgtcttaacagataaaagcatgtctttaatcagaatatggtctcttccaattctaagtttatactgacccctatgggttactgtgtcctaatctatttttggcttatcctttcagaatatctgtgaaatacttaaacatgtttacatttaagatataactaatttaggataaaagccataaaatactttttatatttttgctctccttggattatataacaaactatgcacaaattttattcatcctttaactactgtgggggggccaagatgtttcagtcctcattatatttagtgttgatgtactaaggacaagagaactaagcagtataatttctaatttccagaaaaatatgacctgattattttccttaaaatctgttccactctcacaatatttcagagatatagatcatttattaggataaaaaataaagtttatacagagatttgtgtaaaggcaggaaggattatgggaccaaagatgagtctaattttagtcaaccttgatggagacacactgattctaggttacactgggaatttttaatgtgatatacatgattctaaaccatatccttatggattgattatttatttttacttgttttttttgagacagagtctcactctgtcacccaggctggagtgcagtggcgtgatctcagctcactgcaacctctgcctcccaggttcgagcaattctcctgcctcggcctcttgagtagctgggactacagacgcatgccaccacaccgagctaatttttgtatttttagtagagacagggtttcaccatgttggccaggctgctctcaaactcctgacctcaggtgatccacccaccttaggctcccaaagtgctgggattacaggcgtgagccaccacacccggcctatttttacttttatagagatgaagtctcactatgttgcctaggttggtctctaactcctgtgatcaagctatcctcctgcctcagtctctggagtgttggaaataagatgtgagtcactgcacccagcataaccttatggatttcaacaggaattacaagaggtggcgaagggttattgacatttattttcctttatgctgaagatgtggtttctgaaaataaaattattatttttagtattctctcaaaaattcaatgggccaggcgttttggtacacgcctgtaatcccagctcctcaggaggctgaggttgcagtgagctgagatcaggccactgcactccaggcagcggttgcaggagaatcgctggaatttgggaggtggaggttgcagtgagccgagatcaggccactgaactccagcctgggcaatagagcaagcctacgtctcaaaacaataacaagaacaacaacaaaccaaaatgactgataactgacaaatctatatttgagagtgacttacataaacctaaattttgtacctaaatcattctgaaattacattggttaatattgatttttgtgaatccattattgaaatttttactatggctaggataagcttcgtaatcctgctttacatttttctcagggtacaatagtcacaactatagtttatctgggagaattcatttacctatatgtaagaatgaacctggactatcttctaaggaaaaccttaagcctgtctatagtactccacagatctcccagcccatttctgtgcatgtctattctgacaagtattttggtctttctcctgaatttccctaagagactattaattttacataccatttatttgaatgttaaagtctatgtcttgtccttaattgacaacacagagcattcatgctctgattcttgacaacaaacataaccttcagctctctgatgccacatatggatcaaaagtttaattatgagaaaagatattctaggagggctgccagaaggctatgaagtccatccttccctccatcagtatttcttaaactatatttcatggaacacttacagtgcatattaatacatttcataagaaaaaaagattttttaaggtcaagtttagaaaacattaggagtgaaggaattgaacatgctaatatgcaacatcagtcacaagagaagaatgtaacaggcagtaccatccaagcttatctgaaaacttcttccagcatggctacttagtaacattctcaaaaaaatcaatattccaatttttttgttttttggcatactagcccttaatcaagtcagagaactgagttattagatagcatggcttttttgtttgtttgtttgttttgagacagagttttgctcttatcacctaggccggagtgcagtggcacgatcccagctcactgcaacctctgcctcctgggttcaagcaattctccagcctcagcctcctgagtagctgggattacagaggtgtgccaccatgccctgctaatttttgtatttttagtagagacaggttttcgccatgttggccaggctggtctggaactcctgacctcaggtgatctgcccgcctcagccacctaaagtgctaagataatgggtgtgagccaccatgctcagctagatagaatgttttttactaacgtacttacttagactaatttgaattttggcattgtaagttatacgtgtgctacaggaagtcacctggagaaatgggtgctcctactaatagctggtatatattgagaaaactatgctttgagctgtgtttgggttgaaatttgaaaaagtcatcatttcaattttctttcatagttggcaaagagaaaaatgagactggtgtcgaagactcttctaacgaataaaatagtctatatatactgtcgtgtccaattaatgttgtatatataataacttaagtgagcaaattccactccacatagcctacaggttaaataaaagtaaattttttttaatgtatttcaaggccaagtgttacattccagaaagattaatatgacttttgtatttaactctgaatatctcaggtgaaaaaactctattgaatagtgcaagaacttatgaatatctcagaaaccctcttaaatggagcaagagacaagaatctgtgcaaatttaaattttaagagacccattctccatttggctaataaacatattctttacgaccttaaagttactcacatataagtgttttttgtctccttctctggtactttgaaaagtttaaggacttgagatactaggattctcttctcccataaataacgtattaagtttagcataattaaaaatattgttaggtttgtaatttccatttccactattctttttttttgagacggagtctcgctctgcagcccaggctggagtgcagtggcccaatctcggctcactgcaacctctgcctcccgggttcaagcagttctcctgcctcgcctcccgagtagctgggattacatgcgcgtgccaccatgcccggctaattttttgtatttttagtagagatggggtttcaccatgctggccaggctggtcttgaactcctggccttgtgacccgcctgcctcagcctcccaaagttctgggattacaagcatttccacaattctttaaaccttatggatgctctattataatactttgctttaagagtggtctacaaaaccacagataaggcaaagaagaataaagcaagattgtcccttagtggttacaataactaggagtagggattctgacattcttccagattcttaggtgtttaccccacctcgacccatgcaatttttgtagattttacaacactttcttattattagttatgggaatgactatttcaagtttgagctgtttcccagaatattttcaagaacaaataactctaaaaaaataactggaacttttataggaatgcattccctgcagatgtgcatcatcacctaatatgcaagggttccacatgcctcaacagctcatgacattcgaaatcaatgtttgagtttgataatgtcttatctaactaattaaaaataattttaacgtgcaaatttcttgtaacatcttaatagcataagaaattaaaatataagtcaatagcaaacagaaatgatacagagaaactgaagcacacagatgaatataaatatcccaataaaacttgttccgggcagcgggctgcaggaatacgttgcaaacgcaagagcaaaacaggatgcaaacgtgggaaaaatgggaaataagtggagttaggacggacaaagactgagaaagaggaagcaatcccctaaaaagcagagaggttcctcagatgaaggagggcaaaacgtcaaccaccacctcagctctgttctctactaatgcccaaatgcaagtgcatggtaggtaaaggtgggttttgctcacaccgttttcttaatttggcaaactacggtcagatccacattagccgttaagtttccagccagcagtccttgagaaattctccaggaaagaagacagccgtgtcgtctagtgacgcgcatgcgcagtctcagcgctgcgcgctccgtgttttatcctacccaggcctggaaggaagtgacgcgaggctgaggggcgggttgcgctgtgcgtccggaagtgtctcgcagatagtaaataatctcggaaaggcgagaaagaagctgtctccatcttgtctgtatccgctgctcttgtgacgttgtggagatggggagcgtcctggggctgtgctccatggcgagctgggtaaggtgctttttgcggcctctggggtgctagtgtgagagaccaaagagaaggcgatccgagccggggctgggtgagcccggcgggaatgtggtgccccacccaacagggagtgccctctctgtccccgttttcttcccgtctcctctcgtcactcagactcagcttcagagctttgggtcttgcgaagaactgatcactggccgtaaggtttagtggcgatgggaagatgactcaaattgaggaagagaactagaatagggcccctcccccacccctgcttcgtgaacgctgtctcccattctttgaggtcccttttcgtggttttgtttgtatctgcgcaggccatctctacaaaggtctttgcccctttccttcggtggggtacccactctgttgtcatctctttcctggcgacctcagactgccgcactgtcgttcctggattcatgtcgccctctttgttcagtggcgcagattatgattaaaaagtgcctgtcgtcatttggaaccgcctggcagtaatgctaatgtagtaatattgtttttgaaacaaatagtcatagctctgccgtaactgtttgaagtgtcaatttcagatttcaacttaaaattgaaatttcagatgacacacgcatgccttgtgcctaatgacaattttgtctttaggcacaaaacatgcgtgtgtcatctgaaatttcatgcttaattagctgtacattgcattttcattaaagagttgttagagtaaaactattttcagtatagtggcaagactttggtccgtgtggcacaaatttcagtttatttaagataatctctgccccctccaaaatagtaggcaaaacattggcagtgcagttaataaagatatttgtaattttaggcgaggtatttggac

SEQ ID NO: 10986 - DNA, 6000 bp, Homo sapiens
tttccttatctgtagtttccttacaagtaccttgtgaccaaatgttactgaactatttaaagttcatgatgcttaggtctctctaatttttcctgagttgtttcctctacttagaaattacgtcctcaatcaaccatgtgtttaagtagcttcttacacttcaagactcaactccagtatttcctttctcttaaagtttttcctggactgttacaacttcttttctgccccaaaaatgcatagagtttattctagaatttaacacactgcattataatgtttaactctcttactagactataaactccttgaagaaaaaaaaaatccctgtcttaatttttgtttcactagaacctagcctagtgcccagagcaaatagctaatatagatttattgaagaaggggactaataagttgcatcattattaataagtaagctcacaaaattggtgactcttggaggtatttagtaatgatacaccagatgcagcagatcacattgttgataatgtgaaatagcaaaatgccaagaacaagatgacattataatttttttcaaaattagaaatagaaatatccatttaaattatttaaaagaaaaaaatttgtatctaagaattggttatcagatattttattttttataagaaaagcatttgtgattttataagaaatagaaaaagtataaatgataaattgcttctgaacagcaaccaggaacacagactgaaggtcatatgtgatcgactgcagaatagaaagcagtaatctgaattatggactccacagggaccaactactgcaggatactgcagatcttcttaaacaggataatggtagtggacagacgccagctcttcagagaatggaatctctaagaaggaaggggcaacaaaggcgatggcctttgttaactaaaaaccagattgacagaaaaatttctaagagaatgtttgacaatgtcaaatgtgtgtgaggaaagaagcctgatattggagactcagctactcatgagtcagagttaaagagaggaaggtttttaattgcactggaatgccttctgtcatttgaaacgatctggattacacagtttctaaataatcagatggtaagccaaacctatggaatgactttcaaccttgattaaagaaatgagcacaggccatttagagatagtaatgagggcagaacgatattttccgtgacacaaatagaatacaaaacaatttaaaacgaagtgaacaacagtgctgagatgaagtaagattaatgaaataatagttcaatagaggctttgcttgtgattctgaattctaagtttattaaatgtaagcgtcagagaaatttctaggttatttaatgttatctcaaggtcaaatgaaggcaaatagtctcacattcacttccactattcctagtttcttccatatttcttcatttcaagggttaaaaagccaacatttattctttacaaatttaaattgtgtttgccagtttttctttacctacaaagctgaaagtaaacttctgtctattttcccttgtgagctacttcaactgaggcactaaaacagtagcttatattttgtttgctcttaattatggaagttttttgcatcatgatactctgccctctccttctctttgttgaaatcattccagttggttatttttgtctcctattaaaatgaacctgaaaccttaggtttatgtggaagttatggcaattattattttaaaatccaagtaaatagctctttctctcccaattgtacatcctacacatttatttgcactctgtttagacatgctatattgtacaaagtgtgtttccattatttccacttaccaccaatttgtgggtaggttagcaaagtgtataagccacttgtgtctgtaaattaagaaacagaaagccttgacaataaactctaaaatttactttctctcaaatatccccagtctctgagaaaataagtgagtaatggtaaataccaatctacacccaactatgtctctttttgcacatcatagagaaaacaaatcagcactgaaagaggtaatgcagtatggtttgactttttttaaaaaattaattttattttattatggtggaaacaaatcaacaaaacttctctgattgcctcccaaatattttgccattttgaaacttggtgtggatgacagtattttgctcatagctaaatagaatacatgtcttattgagtgtttatgataatagcagacacaggagcaaggtttaaaaatttctctaagggagaatatttttatctactaacttgagtatttagaataactagtgaatattacaaggggtaatgatcagtataatcaggttggagatgccccttgacctaaatgcgacattaataggagaacaaattttcacagtttatcatttacttatatagactagctcagttattaatgtcctaattttataaatatccctgtatgcaaaactatgacaagtctacctgtgctgattgtgcagaagtgggatgtgagagttattccaggagctattgctgagaagagagaaatatcacttttgggtccttttgaaagagctcaatgaactggtaacatctctttaaaaatgaagaccctttaaaaataaagaagggcaaatgaatcgtttgtaatgttttattctttgagttccctgaagagtaggtgtacacacttgtaagaatgtcagttgcttggtttcagaaagcttggcagggttccatttggaattcaaagacatacctcatgaatggagtttcagataaattgaaagagtcctaataacttttcaaaatgagaaccatgccaatttctcactgcctaatgacattcatcaactcatctcacagaaaggtttgaaaaagctattatcttcaaaacatgtttattgtctagaatatgttttcttttatttttccttccagtatgtttaacatgaaaatagtgattgggaacttaagactaacatcaatactaggaatttagtatttcttttctagagtcttattttaactttttattgagtaaaactagtttgaaaagttgagttttttcctgttccagagcctaattttatttaggatctgacccatgaaaattcttaatgagttacataagatgtcattccttcagttaactacaatgaaagattatgaaagtaactgatgaatggagatatgaagtgctacgtttttcaaaacaattggaactgctgtggcactattgactggagattctttgtggggggcaatgtaaggagggcttttctcttaggatacctccttagaccaacccagagctctgggaagctgctcttgaggattttgtatcttttcatcccgctagtgggcctaatttgcagtgaccccctttaccttaagtcatagtatctgcaacaaggcctcatttcttggggaagatagcaaacttgtagttaaaaggctctaggcccagtcctagatataggaattgaataaaatcatgaatgtaatcatgtaatcatttcctccttgtaaattaagatttgttactaatttatgtattcagctggtaaatgagcaactttctattgtgtcaggaatgggggcagtagattaagacagaaccactaacagggaggaggtcattgcctatggaaatagctgttgcagcactcttctgagcctgaattttaaaaataacaaacatggctttgcttcatgatctatgaagtaccataggaattcgggaggtctgaaaacgaaaagtatcaagttcaagctaaaagattaaactacaagcatttattaggttgaatatgagaataaaataaaagtgtagtcaacccttgattattcacagattggctagagtttatgattatcaatgcccttcgattctccttttgcttccaactaccaactattgaatatttttttgctcattaacacctgtctaggagtgggaaggtgaaatgctaatcagccaatttggttaattgttagtggctgctataatccttttttttttaagttgagataaggaaatactttacttaaatattggctgtggactactaaactttatgtcaccttcccttcctttttactgcatggataaatgcaggtatttagttcttagtaaggtagtagagagaattaaaaagatagtaattcatcaatccaatgtttttcaagtatcacactataaattcacattacataattcttattggccagtgttcagaaaatattaatcttctacaatatgactactttaaaagaaagcttcaagatttaatagttgcaattttaagtgtagccctatataaataactgcacttgctaagtggatttgtatcaacaggaacataacttctagaaaattactcaagactaccctcccttttgcctgtgatagacatttgggaccctccccaaaccaaataagggaaagaagaatgttctgagcattaagagcactaagaataaatctgagctctcacggataagattactttcaactctttatttcatgttttctgacatagaccccaggatctgtaattatcttagagaaactgcgggggcttagatggtactttgtagttcatttggttttttttgtttgtttgtttgttttttgcctttctctctttggggctgaagagctggtgtgtctgtgtgtgtgttcctctagagtgccaaaaaagaaaaaaaaaagtgctgaagagtcctagggagatgaggctatttttgtttgaagctgatacttctagctgagccacaagtgctgcttggaaagggcttaggttgtttccagggggagaactctgcagaggagaggcaaagttcaacaggacaacaaagaagcagcagaaacagccaggaaaacgaagagcccccaggttttgacacagaaccctccaccagagttctcaaatccccaaatactctgcaaagtgcaacttgacgggaacttttcaactgacttttacttttgacgaccaccatgactgagatcactgctgaaggtattgctaccattttccgatagtatcaagtaaggaaaaaaaatatgcaaatcgacagccacattaactgtcgatgtgtccatttaaaatgttgctttaaggtaattgccttggtcaatgattctatacaggatctgagaagtggatttaggagctgagaggctgccagatctgtatattgggggagcaaaaagagatttctcttaaattttgcatgtggaaactgttctctgctataccaaaggccccactagttaacagttgttactcacacctctataaatagctatggtcatgtaacatgatggccgatatcttatccagcaaaaattacaaagttttcaaggatggagaccatgatgaacttaaaatattacactaatgcttacttaaaatattacactaatgcttacttaaacttaaaaagtaatttgaagcatttctgctttatgatatttttaaatggagaccttaaatttgtttttcctttcctactagggtatgtaaaacacacatacatatatatgatttatatacaatttaagacataagtgttcccataaaatttgtatttatttgaccattaatggaaattcagagataaagactggaattccacaaacttactgtgaatcagtatgatttttaaaataaagcaattaagtgttagaattctggttctttttgtaaattcattcttcattttcctctaaatggtaaattctatctttatgttacaataaatattttctgtttcaatgctttactgaaagctacatactataatacatatcttctatttgatggttgctagttatatatatttatatttcatatatacttcatatatatatgtacgtatttcttagaatgaaggaaaccttcaaaactaaattactttgaatacagacacagtctggttctagttgaggtaaaacttttggaggtggatctaa

SEQ ID NO: 10987 - DNA, 6000 bp, Homo sapiens
gcaatactgagctctcaagctgctcacattttctgcttcccttgataaaacctttggagcatgcattttcttgactagtgtttctgaactaatcctcagttatggatgttttaagggttcaagggacttacaaaataactctggttgtgaatacagtgtatgtctttccatctgatcagaaattgcctaagaccatatagagagaatttcctgagaaatgcaggcaagtggcatcactatttctcttattcctgaatactctattgttaaggtctaagagccaagctaactggacaggtcacagtgcaactccagggaggagttaggctttgttctacaatccaaggccccagtgcccatccagggtgatagcttttaagggtatgacaagcacatttttccactctggaagtccctgctctattcatgggctttattgtcagaaattccctgtccctcttgtccccagggattctcttgacaacacacgtacccatgcaagaagtttcctgtaagaaagtgcttataggtgtgtttttctttcaaagagaaaatagaagcttatttccacctaccaggtcaagaggctctgcaagaattggcttgaggattttgacacctgactcaaataaaaatttttagagataagaattaggtacataggaattggaaaaaaatcagatttagaatccgaagaccccaggtcagagttacaatcctgctattagctagcagcataaccttgggcaggtattttaattgctctaagctttgattttcctcctcagttaagtgaaattaatcatacctgccttgcctccttcacagagttggagtgaggatagatcatgatccatcatattcatgtgggtgaatatgctttacaaactaaaaagcgtaatataagcagttagttattattaacaagctgagaatattatctaattgcttataaatacatgctgtgtgtacactcatgatctgccactgggtaaataaaaccttgcttccgctcagtacaagtttgtgcatagtcctttagtgaacaagacaaggaaaataacatttagcagctgttatcaaccaggccctttcatgtctatgctttttttttttttttttttgagatggagtctcgctctgttgccagactggagtgcagtggcacaatcttggctcactgcaacttccacctcctgggttcaagtgattctcctgcctcagcctcccgagtagctgggacaacaggtacatgccaccatgcccagttaatttttgtatttttagtagagacagggtttcaccatgttggtcaggatggttttgatctcctgacctcgtgatccgcccgcctcagcctcccaaagtgctgggattacaggcgtgagccaccgtgcctggcctcatgtctatacttacaagcaaatctgcagctctacaagaaaagaaaatgtatatatatatatatatctatctatctatatatatagatagatatatatatatagatagatagatatataatttaatcctataaaaatattattacttcattttcacaaaaaggaaattaagatacggtggtattaaatgttgtttaatgcaatgttcccaaattctgttccctggaaccctggtcctgagacctactcctctattaaagcgttctatggtccaaaactttgagaaacaatgaattctttttccttctccaatagacttatagcacatgataccatatcggaaaccatgggaaagattctataataaagaagcttgctatattgaagaaatctgttaaactttgctcagtccagagttctccgagctaatttaatcttgaggctgtatttttgaattatacttatttaaatctgatagaactgggattctacagaaaacacttgccaaatgcagatctaagattatgattggagttagtgtgtggtagatctgcaatcagaacacaaagctgtcctcttttaaaagaaataatgtaaccataggccaaaacaataggaaaatagagaagagctcccataaaattttagtatactacatctattgctaactatattaatactatgttttgtaatttttttcagccttctttttttcttggttatagtacaaagacctttgtcttctgtttttgtttattgttgtaaaatatacatagcataaactttatcattttaacaattattgagtatgtaatttggtggcattgagtccattcatgttgttaggcaactattaccaccatccctctccagaacagttttatctttctaaactgaaactctgtattgtcttctgatgattttacccaacatttgatcataagcatttttccatcttgcaatttacttttttcataactttcatttctagtggctatgagatattctaccatataatgcttatgaatctgcctattgtagaatatttatattctttctcttttgaaatgataaacatattaaataacatttttcatattttggattatttacttgcaatagcttctagactaaagaataggaagattttagtgatttttaatgcaggctgatgatttcttttcctaaaagtttaaccaaatttatacttctattgattcatgtattcatttattctttcaaacaaacaaaaatctactaattcctaatatttgccacgcacttagctatgtagaagacccaccagatttctactcaagtgatttcaatccatactggtcgcattagttatgcacaaaaggaataatgtacttacctaaaagttttattgcatgcttttgatttttagtgagaaaccatctgtgttggtttgctgatttcttttgagaatttcctttcttctctttgcatcgcctcccccacttctcacttaagtatgtgtctttgggtaagttacttaatctataaccttgttttcttatttgtcaaatgggaataattgtaccaaagtcttcacggaattgttgactgaactcaatgaaacactgaaaatcttgatgtctcagtgtgacattgtatactctaagacagtgcctagaacatttgaagaactttctaaacattacctgctattattattacttccatgatagagaaattaataaagtttcatgaaatgaatcttctatcagctgtcccccaaaatgggcaaggtaagaattgtgtgcactttgtcctggcactgtgtgaaaatatttaaagaagttttttgtttgtgtgtttaaacaaacaaattaccacgtcatgaacttcttttacatttcttacaagagtagaacagatgaattagtatacagacagtagggttttgtttgtttttactgggaaaaattgctgctaaattttaggaagttctgctgtcctcaaaaagaaaaatatgtccctcagttttttgttacctgggatctaggaatgttctctaattaaagaaatggaatggtgatggtgtgttgaaaggtataggttaatgagttaaaaaaaaaaaatctacattgcaccctaaggaaggatgaacttaactatgctgaactgaattgacaagggttgagctagtcagtgtgctaatgagcaggctactattctcatagaatttttaaaagtcttttctgcctgatatgtatgtgtgtataatatgtatttatatatgtatatatttgtgtgtatatttattacatttttgtttccacaggctctgtcataagtctggtcattaatagcatatatttgattaaaagaatatgtggcttggtaaattatgtgaatgttatattaaaatgaatttcacattgtcttgatttacaaaggctaagatgtctgagaaactgagagatgtcaatcaacagactattgttttagcaattgtacataacacataaaaattctgaatcaaagttattatgttattcaattgtgaccatacctattttttgtgacattttacaaaaatgaataaagtatgcaccatacagtcttaccacagaagtaaggcagggtggcatatggcgaaaccacttcaagctgctgaagtagttaactgtgaaatattttactgtcataatatagcattattttctgccagatgaatcattccgaagaagctgttttcatggtcagtgtaaaagtccttttgttaaatacttatgtcttaactacctactagatattaaaaaaaacaaaaccacacacacaccagacctaggtgcaaggaagggataataagccctgatgcagttcttaggtgagaactggaaaggggccggagggtttcagagcaacaagcaaagtcagtgaagcagagtaaatccaaatacttggccaatgacaaataaaccagaaaggagacacgccagctgttcacgctggaaagttactgatcgtttattctggttcaagttttatttattctatgaataagggacaagttttcgatgggggtggggtgtcttattccttattacaagaataaggaacggggagttttcaaggcaggcgggtgtttcctcagggcgcttccacactcccctttcaatcagcaaccgctcggggggacctccaccttgggacggaaccccaggacgcctctcctcggacggcgggggtttctctgcgcgcgtcctcggtcgtctggtcgcacggcttaccgaactctcgcctctcaaattctgagttctggaacagggcagcgagctgcgccggctcccctttctcgctcgctccctccgagcagcggctggcggcggggcccaggctgcgaacaaaggcggcgcggggcgcgcggccggggctggcgcgcgtctctccggcaggaggcggtggcggcgccgcgcccgagcccgcattcctcagaagcgcccggagcccgcggggcgacgtcacccccggctccgcccccgtccctccccgagcaaagtaactcttgactaacaggagcagcctccgccgagcatggagagctgccgccgcggccggccggcgacgctggcgacgctttcgcccctgaggtagtttggcgaccgcgaagaaggaaaaagggcgggcgggcggctgtcctctcaccgtcctcaccccgcgaggcccggcccgctcctccgtcgtggatttcgcggcgatccccccggcagctctttgcaaagctgcttgaaacttctcccaaactcggcatggatacgactgcggcggcggcgctgcctgcttttgtggcgctcttgctcctctctccttggcctctcctgggatcggcccaaggccagttctccgcaggtgagtggccggggggcgtccccgacgaacgcctggagtcctgggctcacgaggggtgagccaggtccccgctagggctggggacaaggatcgtggggagctctctctgtccgggggtggggaacacagggtagagggagggctgtccccagagttcgtgccaggtgggacgcggggcacccattgttcctctccgaagcttgctcggggctcaggctggcacggtctagccggagagtgtggggacctgctggcttcggcgtctcgcgtggcctgcgccgggctagtggggaagagagaaagaaaaagtagttacgactcccgtgacggcactctgttgcttgtggtgcgggtttgttgctgtctgccacttgggtgtttaaacaaattccctgggaagccattgtcagaaatgtggagattcgaagggactgacctcggcgcgctttgccaggtgctttttgtcccgggaataacctcccctgactattgtctaactacttccccgtccctcccggagtccccttttctcctcccccagctctgggttgctcccgggcttgccctgtgcgctcgggcactgcttggagcatgttctgtgtgtgtgttggcggagccctgtaagatgtgttgaaatgcggttctaaggacccactctgagcgttcatgggcatcgaggtctgggcgcctggtggaggaagcctgactcgcgcgtggg

SEQ ID NO: 10988 - DNA, 6000 bp, Homo sapiens
attgttttgactcaatattataaggctaaagacaaaaagaattgtacataaacactgcactaaagatttttttctcacacagagtaggagttagcaattctgaagctattaggttggtgcaaaggtaattgcggtttaatggcaaaaaccacaattacctttgcaccaacctaattttttacattatagaaataagaacataaatggtagataatggaagctaggtttctcacttctagcgaaagaagctaaaaattaggacaagggaaggctagaatgacccctataatgttggattagaattgggaatgcctagatgaactcgtgtttatatatatagataaaatctgatatagctatggatatgtaaaacaactggaaaacaacttggcagtttcttgtaaaattaaatttatagacatactttatacaaggcttatactgcatataatgtatactgtatacatttctctatggatcaattccctgattccttaccccaactcacacaaaccccacctctgcccagtccaagcacttttatttttaccaaatatattttggggcatgcagccaacatggggatggcatgaagcctggagtaaatatcctacatacatgaattagtatatataaatttatttcctagctctgtccattgaggggagcgtagaagcactgacaccctagtaacaatgagaaggttagtgccttgatcttgatttcttttcttttcttctttttggtagggtgggggacagggtctcactctgttgtccacactgcagtgcagtggcatgatcttggctcactgcagccttgacctcttgggctcaggcaatcctcccacctcagcctcctgagtagctgggactatagctactgtgcacatcaccacacccagctaatttttgtagagatgggtgtaatagccaaggttctctagtggaacagaattaatggaatacatatatatatatatatatatatatatatatatatatatatatatatatatgagtttattaagtatgaactcacatgatcacaaggtcccataggctgtctgcaggctaaggagcaaggagagccagtccgagttccaaaactgaagaacttggatgctcaggggcaggaagcgttcagcacgggagaaagatatagggtgggaggctaggctagtctagccttttcacatttttctgcctgctttatatttgctggcagctgattagatggtgcccaccagattaagggtgggcctgtgttctccagcccactgactcaaatgttaatctctgttggcgacatcttcacagacacacccaagatcaatactttgcatccttcaatccaatcaagttgacactcagtattaaccatcacaacagggttttgccccattgcctaggctggcctcgaacttctgggctcaaatgatctgcctgccttcgccttccaaagtgctgggtttacaggtgtgagccatgctactgtgcctggtggtcctggcctttgatttctaaatagctttttccaataaaaagaagaagtgcttaatagtaaaatgactgattctagagctggagcagggagaatacaagctaatttagttggtactgctataccaatgctgatttcttagttttgacaagtggaccatggttatgtaagatgttaacattaaggaaacattaggggaacctgggtgaggtatatacaggagtgctgtactatctttgcagctcttctataaatctaaaattattccaaaataaagaatcgtttaaaacatgggggagaagaaaaaatgttttctagctaatgggaactacgtgagcgaagcacagaaataagaaaacccctggtttgtgactggggagctagctgctgggatggaggggagagcagacagagaaagaggagttatttaagccaacatattccaagcataaattttgatgcttggaaaggcaggatcagaccatgtggtccttatatgtatagggaccatatgatgcatcatctgaactgaagcacgtttgagaatgaaagggcatgctcagaagacaggcggccaggacaacaagcataaactagggctgtcctagcaaactaaatatatggtcaccctgtgtatatgcagggggcttggacttgattttgagagcagtgttttccattatgcatatttaaaagttttacaggcaagttccaccatcaaatacactcataaaatactgggtaaaagaaatttttacttgtttctttcctgaaccacttctcagcgtctttaatttacaaatatgctctgtgaatcttcaagaatgcaatataatatgtttcccaaacatttctttgtagaccaattccctgattccttatttcaacccacacaattccccagctctccccaatctaattattttggttttttttcttaagaaatacagttcagggaatgctgcaatcatggaaatggcatgaagcctggagcaaagttctcagattagagcttcaaatattcagtggtggctttgacaataataaagttgagaagacctggagatagaagatccaacaaggaggctattgcagtggatcaggatgtcaaccgtgagggacagagagaagagggcacatatgaacaacacttaggaggtaaaattagaaacgaaaataccagtcatcaggaggtaaaattagaaacaaatataccggtcatcatgctataatggcccatgtaagatttccacgggatatctgtttattacctccatgttcaaaagctagggcaaaatcaattctgtgcttgatatatgactaggcacttgtgtgatcttaaacagaaaacaagtagactgtagagagacatggaaggtgcttaacaataaggcacaactgaactaactcttgtttattaagtattaatttaagcttccttttaatctagcatagattttttaaaccagttgtggttttcccactgtattataaataaaaacaaaccttcataagtcaacttgtccttctcacttaccaataagtccctgtttgctctatttacctttatgcgtcttttacttctttggctttcccagaagatcacatagtggtcatgtaaaaaatatttttagttcagtaactattaaatgaaccagcaattatctccttctattccctggaattgctatcccagacactggagatacagcagtggacagttctccatcctacatgagagatgttacataggaggtatttatggtatttatattaataaggacaccacaagtgtgcagataacattccccactcaacaacttctggtttccttcaaaatctctccaagaaggcccaaatctcgcaaattactatttctgaaaatccaaattacaagctttcagtcataggtaacttctgcacatggaaatgatttattttgggagatgtgacattatcactcatcaaattaggagacttttaaagccctaccactttcaagacacctggctgaatttaacttggtagcagccagattcacagatggaatactgtgtcaggaactcttagtaattcatttatcttaatacttctaaattttgcaagtttgtctagactataattcttttttttcccatttgaataccaaaggatgaaatcttattctaagttttcaaaagacctggaaggaatccactcataacatattttaaaacaaggaattggaatgagcccaagatgagggctcagacagctaagttttgggcccagcatagtcagtaactatcagggtaacttgaagaggccacttaatctcaggttcttctgtagtgcattgtaccttccctccccggagcccagagttctatcaaaggtaatatgaatgggtatttggaaagtgcactaaacctcacatggatgtaagatcctttcatgtgttccttcaatgattgaaatgtttcttcctacgttcaccagccacttcctaattctcaagtacaatgcactactttcagttctttatttacttgaactttgtgtaacaggtgacatcatggacaattccctccttttttccttcattctctagtttaccttttcctggtttatttcctatcttgtgggttactcgttttcagggttattctttctctgtccatctctcttaagcagacaacattccacacttagtgttggtgagttccaatcagaattctatcctgggttttgtttttttccacctaagtgcgtctggacttttgatatcacctatccgggtaatcattttagaaaatagtgttgccttaatataggcaaaggctaagccaatctatcttctaattaatttggagagggctttctttcatttgtagcaattgatgcttttcatctaacaattacaatatatttgcatatttatcattggaactgtctctgcttgttttaaaccctgtgaaaactacgccctgcttttcaggaatgcttagaatgacttgtatgtactaggaaaacttgtttacaagtgagcacccagagatgactcttcacttattccttcattgttcctgctaggattgtgtactcgcctttgcatttttcgatagagctgtcaacgcgatctactgcagttaaaggttagcaaacaagacaggcaagagctaatggggcggggtgaagacccgcgtgcaagaaggctggcttcaccagataaagaagacaactgtcctccattctgtccttttttgcacgcaggctaagaggcgttcaccatctctacgtcaggcttcaaagaacagctcccttgcaattttgctgatacccccattccttagcttggaaccggaggggcggtgagggccgctgtcactcagccccgcgggccaatagaaaaggggtgaaccccgccttcttcctgagttgtgctgcgggcatgcgcactgggcgtccccacgccaccgcccatcagctgagaattgcagctgagggctccggggtaggtgggtgacggcggtcggaggtgtaggagggagccgtggaggtccaggtaagaggaccctggggagggggctccctggccgggcgacagggaggcgcggtgcccctgcggctgctgcgccttcttgtttgtgcgcgtggtcaggtggccgccgccctgcgctctgcagcaggcactcgggaggctaggaagggcgggactgccccagctcccggagcgcctgcggctccccacgccccccggccgggtgcaagggcgcggcgcgttccgcattccgggtgcgcgcggctgtggtcaggtgggcctacccagccacgcacccgccgcggtcccctgggcagagctccggaggcgcacggctggcggagcgcaccccggggagggcgccagagccggctggggcccagctcaggaatccagacacgaccaaatgacctcttcctcttttcaactcacggattgaaaaacacactaaacttcccgaatatagaggaactgaaaaatgtatggctgtagcaggcgaaccgtgtatgtttatttattcagaggatcgtagtattgtttttttaatttggcttgatgactttaacatactttgacattctttgagtatacacctttaattaatttacataaaaacctttaaacgtacataaaatatttctagtatttcctccaccttgttttctagttactttctttaaattcagacaaagaaaaaaagttgcatttctgatcaaatgctgtgtgttttttcccacaaatttcttacatttgtttggctcttatctgtatacgttaatttttgtttacctcagatcgttgtattctgactataattatatataatatataaaacttgcccagaatctggaagaaaagaaagtaattatgaaatgctgtgctatttaataatgttggaagtggacatttcttctgcaggttctctgagcacacctgggcagaggctgataacggtgttaaactgtgttttgtgttgt

SEQ ID NO: 10989 - DNA, 6000 bp, Homo sapiens
agtttaaaaactagataaatttgatggctttttgaaggatggagtggagaaagaagttctaaaggcagagtggccaggaaggagccagttgcagcagtcccctcagggtagtggagacagtacagggacatgcttgaggaacagcaaagaagtcaatgcaactggagccgagtgaacatgggaaaagtagtaggaattgttagaagtgacagcttatagtggtttttttaggcattgtaagaacttggccttttactctgagtaaaatcgaatgccactgataggtttttttgtttgtttatttgtttgtttgttttttgagatggagtttcactcttgttgcccaggctggagtgcaatggtgcaatcttggctcactgcaacctctgtctcccgggttcaagtgattctcctgcctcagcctcctgagtagctgggattacaggtgcatgccactgtgctcagccaattttgtatttttagtagagacggggtttctccatgttggtcaggctggtctcaaactcctgacctcaggtgatctgaccgccttggcttcccaaagtgctgggattacaggtgtgagtcactgcacccaggccattgataggttttgagcagaggaatgatatgattagtcttatattttgatagaatggctctgattgttgttgtgcaaaagtagaagtagtggtacaaaaaccaggtgcaagggtttgggaataatccagactagtgataatgacggcttggaccacagttggtgtagtaaaagaccacttgcttgaacgtgtgtagagtgagagagacagaaagaagtaagggtgactccaagggttttggccggaacaaaagggagatgagagaagccgttaattgagatctgaaagactgctggtgaaagagcatcaggagcagaaggtcaggagctcagttttgttcatgttgatcagataagccttcatacagtcaagtggagattttgagtagactgttgccagatataagagtctagagttctcaagagaggtttgaggtagatatataaatctgtgagtcactaatattaaatatatagatggtatttaaagagatgaaatggatgtaatcacctaggaagtgagtgtagataggaacagaagacttccaaaggttgggctccagggtgcaccagtgttgccaagtcagggatgatgagtagaaaccagaagaaaaagtccaaagaaacaaaacaaagtaaacaaatacaaaaactaagaagaaagaaagaggaaaactaaaagggtgtgaagaagaaagtacattaagaatgggataatggcagctttgtcaagtactaccaagacattgagtaagatgacattgagaattgaccatcagacttagtaatagggagattaatgggaactggacaaggcagtgaagtcatgggggtaaaatcctgtccattgggaggacaggaattgaggcaaggagtacataccatcgtggaaaggaattttgttataaaataaagctgagaaatggagcaggaattggaaggggatgtcagatcaaaaggcttttttttttaagatagaaaatgttacaggatagttgtagaatatataataggatatttgtgttttctttattgtatccaatagagaaagaaaaattgatgataaacagtaatggggctgggcacggtggctcatgcctataatcccagcactttgggaggccgaggtgggtggatcacttgaggtcaggagttctacactagactggctaacatggtgaaaccctgtttctactgaaaatacaaaaatcagccaggcatggtgatgtgcgcctgaaagcccagctactcgggaggctgagggaggagaattgcttgaacctgggagacggaggttgcagtgagccaagattgggccactgcactccagcctgggtgatggagcaagattccatctcaaaaaaaaaaaaaaaaaggccgagcattggtggttcacgcctataatcccagcactttgagaggccgaggtgagcagatcacttgaggccaggagtttgagaccaccctggccaacatgataaaactccatctctgctaaaaatacaaaaattagccaggtgtggggggcagatgcctgtaatcccagatacttgggaggctgaggcaggaggatcttttgaacctgggaagtggaggttgcagtgagccaagattataccactacactccagcctgggtggcagagtgagaccctgtctcaaaaacaaacaaacaaaaaaataaacaaagtaagagagaagaacttctagagcaatgtccttgggatccagtgctcaaagataggggctagacttaagtagggtcaagaggagtcatttacagtaaggatggggggaggcagaatttacaggtacaaatggctggcaggtgggttgatacttggtgggagcttgtggaaaggagttcttttgagttggataaataggcctgaagttcagaacggaagtttgagctaaagatagagacacagtcattatccttttgtagaagatagttgaaggtatgaagtagaaaaaaacctggggccaggggagagggtagagtaagggactgaaagacagtgaacaacaatgtggctactggccataagtgcattaagagtttagagaagggaatagcaacaagactggagaggcaatggatttgagctcgaaaggcaggatttggtcagaatcattccaggatcagagcaacagtgatcatgttacaataagaagagtacttttagctaagaacacaaaatataaaatggaaccaagagaaagaaggctcttactgtctgctttgattcaatatatgcatgggaagtatcttaattaatgacagcaatggtcaagggaactctaatggattacagtattgagggttagggtgggaggagtgggatcagagaggctgatggagagcctgaaagaattcttatttatggggtcaggaacttgataaggagaatggagaggaggttttacaatgagtttagaaataaagatttggggaaagccagtaaactcttagatattttattacagcacctctcctttaagatgtgtcccttacatatttaaaagaagaattatatttattgtaatacaaaacttctgactctaaacttcttaatcctacaataatgccagactgtcataaggattatgtaccaatacagtgtttcaaataactcatagctgcacgccttatacacctaggaagcaaagacattactaacaacattgggtaatcaaatatttaactcaagtttctattgatttcaacacacaaaaaaagctggtacatttcctggaactaggggctgggagaatgaaggggaattcccatatgtttccttttgattctattcagaaagtcaggtgaaccaagaaaagagttagaatttcaacttgaaatatgaaaattattttcttctcatcccagatcaatccatctgttttacatagtttccctcttctcctcagaaatttttttggaaaagaacttatgtctgatgtctgatgaaaacaatttatgtcagacataaactcagaatttagggctgaatttatgttcatatgtccttatttcctgaaatggtatcagggcataaggacatatggaaacactgtggggtatctgggagcagaaatatttggataatggaaaagtttattgaaaccaagggactttgaattatagaaacaaaccaaacccaaaatagacacaaatctccataacttacaattttccttagatcttagaaagaatctcaagagggagaagcagtgttaattgttctagaatcagagatttaaaccttaaaaaaaattctacattttaaattaactgatattcaaacaaggagattcaatccaaaattgggcgagggaagtgaatttaactaatcaaaaaacatttacagagcttagcacagtataaaattctatagaagcagcagagaattataatgtgaccctgcccttaagggacttataaggatgatatgtttaaaaaataaaagaattaaaggagaacttaacactttttgaattattgattagtcttcatatggaagcgggtttaaactgtagaagacaggtaaagtaaattgcatctcaataacaagaatgttcttaaaattggcaatgttcaaaggtggaatagactggcccatcaggtagtagattccgtcattcaacattcattcatatattgagctttcaccatctgtcacacatgtgctggggtgatgaggttcaacagtgagcaggacacttcccttaccctccaggggccacatcccaggatacatcatctctgtctagatgtttattggacatggatgttctgaaagaaaacagcaagtttctttttaatctctttaagaagacaaaacatacatatataatattaagtattggtataatatttaaattaaaggtcaagacaacagcaaggagtgagagacattcagcagcacagaaaaaaatgctataggagttcagaaatatcacttaggactggagtggatttgggaggactctagggggagctggaacttagacggatggagaacaagggcttttcaaatagaaatggccatacaaatatgtaagtagagtgctcaacaaattgttgctatgatgactaccttccaatattggccctattaatagaaatgttggcttaccaggaaaatttttttttattagaaaagacttcaactgccagtgtgttttggactggggtgaattcatctggttggctcaatcttttagtgttgacttgactctgaacaatgtcaacaactgcactgtacacttgaatcaatccaattacgtcctggctgtcagttttcttgcacaacatcctttctcaatgctgtgttgtgtaatatatgtgcaagaaaatataaacagctgattgccaggagggatttaatgtaaagtttttccagtgaaacaaaacgtaagaatctgagtttgtttttcaaagatcactaaattttagttatgattatatcacattttccaaaatgtgtggcagtttttgccctccttgctctgagtgttggtgcactggacacttttattgctgcagtatatgagcatgcggtgatattaccaaacagaacagaaacacctgtttcaaaagaagaagctttgctcctgatgaacaagaacatagatgttttggagaaagcagttaagctggcagcgaagcaggtattacccttttatacttgtaaaggagacttgcagtttggtcaaagagtatttggaattcatgacaaacttttttgccccacttgtttcgagcagggtgcacatatcattgtgaccccagaagatggaatctatggttggatcttcaccagggagagcatttacccctatctagaggatataccagaccctggagtgaactggattccatgtagagacccctggaggtaatatcatatcattaatttctaaacaaaaagttgtgatttggtaaaacaccaacagtaaactcactgaatttgactggtaattgtgttgataaatagtcaatctgtggcataggatgtagatgcttttttttccctgtaatttcaacttttagcttagattgagggagtacatgtgcaggtttgttacatgggcaaattgcatgacgctgaggattggggtacaatgattgcaccacccagcatagtatacaacaggaaggttttcagcccttgccttcctctctctctctcccctctattagttcccagtgtctattgctgtcatctttatggccatgagttcccaatgcttagctcccacttataagtgagaacatgcagtatttggttttctgttcctgtgttaacttgctgaggataatgtcctttggtgctgcaaaagacatgattttgttccttcttgtgggcacctaggttaattccatatctttgctgt

SEQ ID NO: 10990 - DNA, 6000 bp, Homo sapiens
aagcatttccatctagcagtgctttcagagaatccaaggctgtgatatatcattaccttctcagatttgctctggtttcagctgtgttcattagctatctgaagcattgaacacccatccaactctaaagctggaagattacctcatctgaatgagacctggccccaaaagatggttaaagttcaagctggttcttttcaaggcaaccttgccttttacagggcctgactcagtctcactaaagccatatgtaatactccaatggtgtagagacagaaacgtttttctttgccattaagtactttttttggatacagtattgtacttttttggtatacagtattaagaggaacagttttaacactggagcctggcttttctgcctattgttgcttcttattcttattttgacgtgtcacccttgctgcctgtgagaatgtcattgataataatacatgatatttcccattctttgtttctcagttcacttgtcattttgcattcaggagaagggacagaacaggaagtccagtagccagtgtcagagcctggagcagctcctctccttcctggggttgagttccttggttttcttgtttcacctttgctaccccactgcagtttttctaccacgctgggtttagcacgaatcaggagttgatgcccaggtaccctgtcaaccccatttcattccagcagttcttcagcacggtcatccaaatagactagaatttgaattgaacaacagtagttctgtgggcctaacaatgaaataatattaagcagtcaggatattatattactaaatagtcactcacttttgttaattattgtcatctgcgttgtagtcttacagaggactttcacatatctttaggagatagagcaggtatgattacctaaacttttagatgagaaatagaggtccaaagaagtggtgcaaagcagaaactacacccctatgcttactcttgagaaagtgggaaaaaaatgaggtttttaaaattaaagacctaaaacctagtccaattgaacattattctaacagatgatcagattcacaattagaaacaaatatttgagctattactgtttttcgtttatttgcttgttttttatttttgagacagagtctcactctgtcacgcaggctggagtgcaatggtgctatctcggctcactgcaacctcctcctcctgggttcaagcaattctcccgcctcagcctcctgagtagctgggattacaggcgtctgccaccatgcccagctagtttttgtatttttagtagagactggctttcactatgtcggccaggctgggctcgaactcctgacctcaaataattcgcccgcctcggcctcccaaagtgcagggattacaaccatgagtcactgcgcccaccccaatactgttttttttttttttatggtgactctttgaccaaataatttttaattgattttaactttttacccctttagctaagttcattaatcccaaaatggcaaattaggaagtaggctcttttagcaacgaattacaattaatcaatgttccctgtggcaaaataaccttactttattttataattcagttaaactaaaaattttaatctttacctgatcaatcatctttatgaaaagtcaactattgaaactgtatgtcctgaatttggttttttacttctgaagatttaaaacaatatcaatgacctctacagcaaatattttcttcacatctcagggattttcctatatttaaattgctccttcatttactaacttctaattcttttttgcaattacctttgttactcaaattctcagtttcaatgagacaatttttagatgcttcaaataaaaaaacaaaggagggaatttagtcatcttgattttatatcagaagtgattttccctttccctgttagccaaacaaaaaatccaaaactctgatcaacatcatttctatcttttacagccaaggacagagaaaaacatccagatttgggaacacaataacagatatgattgtccccacttctactgccaaaattataaaactgttaactcctcctcatcagcttacctgactacttaaaagcaaaagagttaattaagtattactaattggtgatactagatcaatgaaggtaggtcatggcccaaattgtacttatggagatggaagagcttaattgtttttattaggcatcaactgcatcagaaatttcattagcacttagcaaatttgcctatggtcttcttaaggtgatcattttgaattgggttctttaaaagacatgaatgactggctgcagtgactgacacctataatctcagcactttcagaagccaaggtgggtggattgcttgagctcgggagtttgaaacaagcctgggcaacatggtgaaacttcctctctacaaaaaataacaaaaattagcctgacatgttggtgcgtacctggtgttccagctactagcgaggctgaggtggaaggatcacttgagcctgggaggtggaggctgaagtgagccatgatcataccactgcactccagcctgagcaatagagcaagactctgtctcaaaacaaaaaaacaaaaaacaaaaaaaccccaaaagacacgagtgttcagacactcagttgcagacattaaaagagagcacagacacatgtgctgttttaggtataaaggaaagactctggaatcaggaatgagaagcgaacatcctgctctgtcgctctagctctctatgcctcagattcctatcctgtaataagtgggcatttgggttacatgatttctaaactctaacagcactcataatctattatataccaatcacctatgctaatttactaattatacactagatagtatggttatatactaacagtctattatacaatctgctaaaaattcataaaaatatctatccctttacattttccacaaaagggcttgaccatttttcctgaattatttttagttttctgctctatagagataagaaaagttattcctttaatagaaacttctattcaaagcagaaaatatgagcagatcttatttatagcccctaggccccattcttaacaaaacatttatctcagtaagaaggaaagcacagaataaactttgtttaatcgtacctactcttctatgctgtctaaaagcatttccgtgacttttaccaaagggctggataaaaataaaacaaatcctttatttggcaggattgggcctggggaagggagaatatgaatgtcctaagaaggcatctgagatcacatcctgtatttgttgttattattgtttttttttttttttttttttttgagacggagtttcgctctgtcgcccagcctggagcgcaatggtgtgatctcagctcactgcagcctctgcctcctgggttccagcgattctcctgcctcagcctcccgagtagctgggattacaggcgcccaccaccacgaccagctactttttgtgtttttggtagagatggggggttccactatgttggccaggctggtcttgaactcctgacctcaggtgatctgcctgcctcggcctcccaaagtgctaggattacaggcatgagccactgcacctggcctgttagcattgtttttaaactcattgttgttatttgctgctaacaaaaatgtaagttacatcttctccttattacaacacagatgatctttatcaccaatcctggactcttccccttccctggcatcttcctccaaagcagggggtggggagggaggaaaaagaaggaggagaaggagtaggaggagaaggagaagtagggggaggatggggagggaagggtgaaagagagaaagaaggaaagaagcggagtatcctgaggcctggggcccctgagctgagattcctcctctggcctaggtgcctcggggtattgttgctgtaggcactaactatacagcagtgaacaaaccagacacaaaatcctgcttttctggagcacatgttttcagtccttaatagcaataagtaagtcagagtgtagatttgggtaaattttgttatcaatattgtcctgtgttacattttcttagtagtaagtatttaatattttcccccccgtctaaaaataaacacaatgtaagtgactcaacagaaccaaaaaaattgttgtcaatttttaaatttaataaatgagatatttgttgggatgtgatttttttacacgagagttagttatgagtttctattaacaaaagctggaattgttctatatttgaattcgggtgtcttttggaaattcaatattaaatcttagtactaatagtacatgctgttcaatccctgtaatactttctgattgtcttaaatggactgcaacttttctttctttaaaagtggtcagatatattgcgttcttaagattataaagtaggccaagtgcagtggctcacgcctgtaatcccagcactttgagaggctgaggtggatggatcacaagatcaggagtttgagaccagcctggccaatattgtgaaaccccatctctactaaaaatacaaaaattagctggacgtggtggcgcgcacctgtagtcctagctgtttcagagactgaagaaggacaatcgcttgaacctgggaggtggaagttgtagtgagctgagcttgcgccactgcattccagcctgggtgacagagcaaactccgcctcaaaaaaaaaaaaaaaaaaaaaaaagaagaagaagaagaagaagaagaagaagaagaagaagaaaaatgatgataaagtaaaaggccagtaactggcagccacatgttatgcaaacattctcccctctgtaaatactacatgaatgttatttttgctttcagaaatcactaaaccttggccatggtcacttcctcttttccaatctctgtggcagtttttgccctaataaccctgcaggttggtactcaggacagttttatagctgcagtgtatgaacatgctgtcattttgccaaataaaacagaaacaccagtttctcaggaggatgccttgaatctcatgaacgagaatatagacattctggagacagcgatcaagcaggcagctgagcaggtattctcttatttctgttaatcataatgtacacgaggggcatgggagctggtggaagacgagagagctgaattgtctgtgttgtacatggaaaaatcatttttattttgcttgttttgaacagggtgctcgaatcattgtgactccagaagatgcactttatggatggaaatttaccagggaaactgttttcccttatctggaggatatcccagaccctcaggtgaactggattccgtgtcaagacccccacaggtattttaactatcttagtcttttgtgcaaaagtaactctctaaaatgcgcacgttcaccaaagcaaaatgattgctcttgaattaccatatatgtggtatatgttatggttatatttatctcaacatttgtcagattttaaaaaattgtacttagatactatttaacaatcttttgtgattgaaaatctttattaaattttgagaaaatgtgtaaatagggtattcctgcaagaaaaactaagggaagagatctcatagatacaagtagtaacttaatttctgaagtagacagtggattgtgttaggaatacattccaaagcctctgctgaagggacaccctttcaatgttatagagtctctccattccagagttgcttcttaggcagaaagacttcaccatgtattttcaagtgaatcataagaccttatgctttgaaactgcattttcctaggctcacaaatctaattttcctgggaaaaggttatctagaaaccttctaatatatattaaaaatctgggtcctactgtcatcctggaggtgtcaacgtggcagttgcatggacaagtctggcatgaaaagacaaaattatatctggagatagaaaatcaaatgtcagcatatagatggt

SEQ ID NO: 10991 - DNA, 6000 bp, Homo sapiens
tgtatcaatattaaaaacttttgctcttgcagacatcattgtaaaaatgaaaaggcaagtgatgaagtgggcaaaaatattcgcaacgcacatatctgacaaagaacttgtacccagaatacataaaggacacctacaactcaataatgaaacaacccaaatgtctatcaaccggagaatgggcaatcaaatggagtatattcaaataatgagacgtcagggaaacatgaatattttcacgtttctggatggtttgtctccctgagcaaagaaaattggcatgccatagactgtctcctcttccacagaatcatttgctcctcacattgcaagggtgttagatctggagccatctggtctcattcagagagtaataaaatttatctccccaccatagccaaatgtttatattccagggtaggtactttcccctttgccttcctgagagaattaatttactttccaagaaatctgttgacattagggagctagggtttttcttcctctctcagaagaagacagtggcaactaagtggtgtgtaacctatataaactcaatattagattgtctttttattttgtttttaatttgtttgaagcaattcattacatatgctgaatattaggcctttagcaattatattcatgctgttttacagttcagacctcaaaaaccagtaagatatctatatggaaaaaaattaatctttactctttcctcatatacaaaaattagctcaatgtattgtagacctaattataaaaggtaaatcataacattttctcaagtgtaagaggcatataaggaaattattaaaagcacaaactttgaaaatagatgaaccagcattcagtttccagtttctgttgcttattaaacgaatgacctgtccaagtctgtctccttgttttgaaacttggggtaatgtaactaactctcagaattgttgtaaggattgaaggaggtagttaggaaatttaaatttcttaggtaggatctgactcaaagaaagaattcagtaacttcgtattattagtatgtattatccttggaaactatttagtaattaaactaggatagaaaaaaattattttttgcctgtggtattagtgtttggggtgggaggtaaggagtagtggtttatggcctttttcatcgggaagcctggaaatcctatacatcaggttccacaaaattaagatctcaatgtggtaaatcatggcaagaggagttgcaaagttgagaagtagaagaaaacctcaattcgaaaacatcatttcaaaagtctctgaagaacacactgaagattatattgcctgggaggcttagatggggaggaaccaagactgctgcttcccaaagttagcagaggggggtaagaggttagatttgaagatactaaggaaactcactaaggtgagttctgggtcacagatgcaaacaaaagaaaaactgactccactctttatttcaatgcatgggaaacatcaactgaatacatggcaagttctcaggtcacactcatcctgtagaaccctagccattctgaggacagagtggtgagtttgtgaacacgtaaaagacaagccttagaggtaaaattttgactgccttctgacaagtgccaaggggaacttgaagaggaaaggagagaggggacgagaggcatgcagaaaactgtttgttctcagacaattgacagcccactcatgggggaagaaactccaagtcgcagttactccatcccctaccccgttcccactttccagctggaggaaaaacttggtgaaataatgaaatgtcactgttcaagttcagaagacttaggagataagggaaggctttgtataggtctgctttagcctcttgaagggtctgaacgattcatatttgaatagaaatgcatacaaaatttagatatccaaaaatgattggccccaaacacttttgtagcaaatatttaccctatttaacccacaagacttaagatgataatgatgaaagtaaactaatacaatttataatcaaaaagtaagaacaacagcaactcaagataatattgataatgtactgatcacacagagtccttcctaaaacgttctgggattacaatggaatcaataagagtccagttgggaaaacagaaaccacactagttatttcaacagaaagaatttgctgtaaggaattggttaaacagatgttggagtactaaaaaagtaaagcaggaatactgagattgaaagagacagagtgactactagaagcaactaccaccgtcagggttaaaggaacacagggcagacgtggggttcagatcccagaagcgaagcctccaggaaactgggactcagacctctgagaatggggcatagcctactcagtgctggtatttctcaggagatgcagtgaagctgattctgggagtacaggaagaagctgggaactagaaacaattgctcctagaactagctgtccctgccagggtaaagaggcactgtggggccttagtgacaagaacagcaaacaaataggaagcaagtcccttctttcctcatccagctttcaggattccttcagggccccttttggtggaaaggaaaagaaccagctaacaaacaagaaaagtggtttgaagaggcctcacgtcagcaccacgaagctaacatcccagcctaaggggccctctgacccagattcctcctctgtttccaagtctttcaggaaggaaaaagtagcatacttaggcgactcagaaaatcctgccccatcttctatctccttactccctcctcaccaaaaaagatcttttttaatactgaagaccccctttaaaaagaaaaagaaaaagaaaaagaaaacaatagttgctctaatttgagtgtcgtttccctttattggagcatttgaaaacagacatttaagggcaaaagagatggaacacatctgaggtaaatcgtgtatctatcttcaggctgtgcccaacctttagaaccacctagaaaggtacaaagctgagagcctctctcagatttttcatatagtatttcaagactcacctcttaattgcacccttcccccctcccattataaagagcatggaacctaggacccaccgccttgtgtggaagtccacacaccactggtcacaggccactcacaggtttgggggacttcatgatgattcctagactttctgagtttcccttgcctcatctgaaaaaagggccaggacctaactgcaggttgtgagagttgaatgaaatcaaataacaacttttcagtcagtgacagactgcatatacaaaggtggtctcatacgattataatagagctgaaaaaattcctattgtctctaaagaccttccaggaggacaggatgtgaggtggcatcagtggcactgacaatcctgaccctgtgcaggcctaggctaatgtgtgtggttgtgccttagtttataacaaaaaagtttaaaaagtaaagaaaaaataaagaaaaagaaaaatttaaaaatagaaaaagcttatagaaagaatacaaagaaaaaatattttcatactgctgcacaatgtgtttgtgttttaagtcaaacgttattacaagtcaaaaagtttaggtcgggtgtcgtggttcacgcctgtaatcccagcactttgggaggccaaggagggtagatcaccggaggtcaggagctcgagaccggcctggccaacatggcgaaacccagtctgtactaaaaatacaaacaaattagccgggcgtgggggcacacacatgtaatcccagctactctggagggtgagacaggacaatcatcaaaaccggaaggcagaggttgcagtgagccgagatcgcaccactgcactccagcctgggctacagagcaatgctccatctcaaaaataaataaataaataaagtttaaaagatttaaaagtagaaagtaaaaaatcatagtaagctaaggttaatttattattattgaagaaataattttttaataaatttagcatagcctaagtgtaatacagtgtttatacagcctatagtagtacacagtgatgtcctaggccttcacattgactcaccactcacagactcagccagagcgacttccagtcctgcaagctccattcatggaaagtgccctatacaggtgtaccatttttaaaatctttcatactgtacttttgctgtaccttttctacgttcagacatgtttagatacacaaatatttaccattgtgttacaattgcttgcagtattcagtatggtcacttgccgtacaggtttgtagcctaggagcaaacaacagcctgtaccatatagcgtaggcgtgtaagaggctataccatataggtgtgagtacactctaagatgttcacacaagaaactcgcctaagacatttctcaggaggtaatcctgtcatcttaaatgatgcatgactgtaagatctacggctgagtgcctaactgtatatcgagaaataacgctctatttcatccgtcttccgatattgaactttaactgaccatcagaccggcctgaataccagaatctctttgcaatgcactcgcctcgctcattaccagaaggaggttttacctgcctagtgacctggttggtctgggcatgaaccccgagaggtggaaactctcagactctcaggactgacagccgagtggctggggactataaatccgcgagaactgccctcgcgctgccatccagctgggtagccgggggagcgcgcgtgggggctccgcgagtcgctcgcccttggtttctggggaagcctgggggacgcggctgtggcggaggcgccctgggactcaggtcgcctggagcgtggcacgcagagccccaggcgcggagctgaggccgcgcggccgcgcttggccccagcgggcgtgggactgagcagtctgctgccccccgacatgtgacccagccccgccgcccatgcgggctcccggccgcccggccctgcggccgctgccgctgccgccgctgctgctgttgctcctggcggcgccttggggacgggcaggtaggtgggtcgcgccgccaggtgcgggtcggggatgcctccaggccggggccccgccaggcagagctcgaggccgagctctcccctcctgcccgccggccaggtttcgctttcgggcgggcagaggacgaggtgcgcggaggccggagcttccagccccggggctgcagggagcccgggggacactcgccgtcgcctcgcgcaccttggctcggggtcaagtttgcaggactccgcgctccgcactttcggtctcgagaattgaggtggggtggggggagttcggtggggggtgcgctctgcgcggtgcccacagcctatgacttgcggtcggggacggttaccatgcggggcccctcgccggccagtcccaggttcccgccaccaccgccgcggccgcgcggaggggcccctgtggatgccgcgtctcggccgccgggccccgcagtcctgcaagccgcgcgtcgcgagatccgcgctttaaaagccaaactccccgaaagggtcagccccgaaggaacatgatccagaaagacgcagcttcttaaagtaagctccccctgtcctgggtacgccgttgtttcctttgcagttatgaccatgtacagatagtgctctttgatttttcagaaataacaaaacttttaactcgtttacgacataaggtaactgaagagctctttcgttttgtttggtttttaagtttaaattctctaccaattggaatccagtaaaccagaatgattcattaacctgattgctttttttccctgtatttctcgtacatgagaaaaagattttttaaaaaaacaaaaaagatatccgggatccctttttaaaaaaattattttaaaaaacaacaacaaagcttctccaaatactgtgctttgtagacacttcgttcaggccccgctgtcttttaacccagaactgaacagtaagagtg

SEQ ID NO: 10992 - DNA, 6000 bp, Homo sapiens
tctacatcctgtacttgagtttgttgtttcttcttttctcctttctcccttccactcagtcatcctcttctccatcatggtttacattccaactctctgaaagccaatctatttaggttggcctgacattgagtaaaaaaaaaaaaaaaaaaaaaaaaaatctgcacgattaacagaaaatcgaactgatggtgacttaaatcaacaggggtttatttttttctcccataggccaaaggcaggtggtcatagacattagttcagaaactcaatgctgacgatgattcaggctttctaacttcctgttcttccactggtagctgttgacttttcatcttcaatcttgttgcctcatggttgcaaactgccaagatctgctgcagatctaggcgtcactggatctacattcaaggcaagaagattggaaaagggccaaggccagcaaactctcccattgcatctgccccttctatgagaaaggaaaagttctcacagaatgctttccaatcctcttccccattatacacctgatgaccaccacacacacacatgcctcacagacttctgcttgtgtttcgctgaccaaaactacatcatatacctacacttagctgccaaaaaggctgggaaagtgagtaatgagcctgtctagcctctgcagtagggaggcagcaagatagaaggggaccgaaaagagctgttagcagtcagctaatgagtagtatctgccacagtcaccacgcagcatgtggcatctaccctaggcagtgctctaagacaagccaactactagaatacttgactgtctatggataaacatcttcaagccaggggttggtctgatacaatcggatgtcagcatgagagctaagaggagggttgagtgcaaggcaagaggatagtgctttgttgagtaccagtatgatatccaaatatctctctaaattcttatcagtgacccaattatagcttagccagccataaattcaactatacctgcttcagtcccacacctctttacaagcttgttttgttcatcatatatttatttaataagtggccacagacattggttcagctgctcaatgctgacagtgatgattcaggattacatacaattgatgattcaggatcatcaatattccataaatattaatggagtaataggcacttggctaggtgctcggggtctgacagtgaagaaaacaaatttattttttagaggaagagggagactactgaaacaaaattttctacgtgtgtatatacatattttatgtatgcacacacacacggatgcatttcattaaatctcagattaagtccctgtttacgcacctataatcgtgttgctctccttggtaacaattactacaatttcagtaattatttgtgaaatatatatatatataaaatgcatatatttaacacatacaatttattcatatttaattcaaatttaatagatatattaaatttccagtagaatctccagatagtagtaagtactatggaataaacaaagttaaataagggccagtgtaaaggcatgggtagagtgtgagagggcaagagtattggctataatttacagactaatcagcggaatttaaactatatgcttcagttacaaatcttcacgctgtctcctttaaagggaagctggcagacatttctgctttggagaaaagaggaaggaaatgcactgtgctcagagccaaaatgcacagtttgttccacacacacaggctctgttctcattggatcatatttctagcttcttaaattgttttatttggcctattaacttgaaaggcaggtgagtatggtcttcaaaatgtagccttgctcctgagcagcagcacttcagtatacacttggctttggaatgatctacgctccaccccaatttgttttcttcattttaaaaactaatctgaggctctagtggggaccaacgtatacttggatattccccagccattaggcattggaaatttatcaaggaaagctggcaccgctcatttgtttctgtgttagctgtatgagatttttatatgggattttaaaatacagtttattgctcttcttcctacctctcttattagccggtggccacccccatcttttaactttattcaggctaattttaccttatccttcaggtcacaacataatggtaacttccttaaaaaagaatttccctaaatccagacacagtggctcacacctgtaatcccagcattttgggagcctgaggcaggagaatcatttgagcccaggagtttgagaccagcctgagcaacacagcaagaccccagctctataaaaaatttaaaaactagccgggcataaggccaggcgaggtggctcactcctgtaatcccagcactttgggaggccaaggtgggcggattgcttgagctcaggagtttgagatcagcctgggcaacatggtgaaaccccatctccacaaaagacacaaaaaaatgcctgtggtcccagctacttgggaggctgaggtggaaggatggcttgcgcccgggaggtggaggttgcagtcagctgagattgtgccactgtacctcagctaggtgatacagtcagaccctgtctcaaaaaaaaaaaaaaaaattagccaggcatggtggtgtacacctgtagtcccagctatttgggaggctggggcaagaggatcatttgggcccaggagtttgaggctgcagtaagctatgatcatgcctctgcactgcagcctagacgacagagtgagaccctgtctcaaaagaaagaaaaaagaaaagaaagactttctttaaaatgtagactaagttaaattcctgtttatactcctttaatctcttcccattgctctccttgggaatgatgatcacgatttcagtacttgtgtaattccttgtttaacagctatctccctcagtagacagtaagctccgtgagggcaggggccatgtctgtcttgctcaggtctttatctctgtgcctggtcatgtcagtcacagacagtatcacttgataatattcacccaattaataaatatatttagtctccaaatgactaactagcaaagtcttcagaaggatacgtagggtggtgggtgctgtgattgtgaaacttgcccagatccctctcaggaacagaagactgggttctgtccccttcctgatgctaggagggctgccagtagacaccctcaaccgtcagcgttcctctggggaatgcctccatgaaagaaatggacagccccaaaatcatgacagttggtattcaatgactaatcagtgctgggctttaagacccagcccctcataccaactcaagacacctttacaaggccatcccaactccagagcgccccttgggagcctttactgggatggcatcacagatcaacttcttcctccgctctgcttcctccacctccccttcacagacgtttattccaagagcactccctaatcaatcaatgccttataccttaatctcgacctcagagtttactgccagggtaacccagcctgtgacaagtaccacaaaaatgtttacaaactggatatcatattttgtcctactccatagacgcctaaacggtaaagatcagttatttatccttgcatccttacaacgactagaaggtgtctttcatatagtggacatcagaaacacatcaaaggaaatattctccctaaacttagtctagattgagctaaattcttctgattcaaagtgtggtcctgttgaaaggggcaccagcatcccctgtgcattttgtccgaaatacaaaatctcaagacccaacctgaattagaactactgaatccaaatctgcattttatcaagatccccagatggttcacatgtatgttgaagtttgagaagtactgagctaagagatttattaatacaagtaaaatgatctggctgataatacctctagtttatatagtgtctttataaggattttccctctttaaaaattttccttaacactagtaatcatgcagtctttcactcaacaaatactaattgagtgccaagtaaagatgtcagctctacggagcttacattttagaaggagaagaaaacaaatatcaaggtgtatattatagtgtacagcaaggtgaaaagtgccatgaaaaaacagtagggcggggtaaggaggaggagaaggtgtgttgcaatttaaaatttttaacaaaagttcatgatactcagagaattgaaacaggtgagatcattagacattcgcatgtttgagcacaagcgctgaaggacttagcaatgtggctgcagtggaataggagagatgcaaaataacagacaaacccagagaggtaagagagcagacctcttcatgagaggctgcctgataaactgatttgacactgaattgctgagaaggtaatgcaaatagtttttttctccaagaacaaagtagttcttggtcaagccgatttgatttgggctgtgggaatctgcacaaaccatttcactagctaagtctcaggttcctcaaatgaaaaagcagggactggaaatggcttttgaagtctcattctcttctaaaaatgtcaggctccaagacaaccaggtgaagtccaagagttagtaaaataaggattgtggctcggctgtggcctaatgcaaacttgcacaaccccaggaaaccgaaaaaaactggaagaagaattgcagaatggggtgccaggttgaaagaccttaacctttgcactcaaattcctcccacacccagaagtccaggtcccgaccgcacgacgccgtgctcactgctgggtgctgcgcctgagtccgcctcctgcggcttcccggacttgaccccgcccacgccctggtcccgcctcctgccgacgccggcacagaccccggtgacggaagtgacgtaaggccggggctggagggcagtgctgggctggtcccgcaggcgctcggggttggagccagcgaccgtcggtagcagcatggctctcctctttctcctaccccttgtcatgcagggtgtgagcagggctgagatgggcaccgcggatctggggccgtcctcaggtaccgtcgttcgcggcagggctgcggccgggtcgggacgagagggagggagggatccgccccagccgggaagccccgccccgcttctccgaggtcgccctagcccgggacccctgcgtcgggccctgagcgggcgacggggacgcgaggtggggtcgcgagactggggctccgtggtttgaactcgtcggttgcctttctcctgcctcttccctggttgccgccacaacaaatcacgccgcttgtttttccgactcttgtaatccacttttaaatacgattatgcgctgcagaaggacgttgctggtcaatgtgggacagcgtggtctcaaagattataatatcgtcttcttactgtacctttttttatggttagatacgcagatactcactagtatgctacggttgcctgcagtgttcagtgcagtgacaggctgtacaggttcatgacctaagagcagtaggctgtgtcatctgggtttgtctgggtttctactgcccgaagaaattgcctaaggggacatttctccatttctcagaacggatctccatcgttaagtgacgcatgactgtgagtgtcctgatcagcatgtggcatcgtggtctcagttcgtggcttaaatacttctttcttagcgggggtggggggggggactcaaagtgcttagggtaggaaagtatgcattatgtcgccagctgagaagtaagtggcagctgagaagtaagtggcagtccgtcttaggtctcagtctggaagtggtggattgccggcactcactagcagatttggcagtaggtctcttcgtacgggtttgttcttcggagcattttatttccacctgcttattgacatttcctagaaaacaaatgttgagggtggcttttctgaagtgcagagtaattgtgattacgag

SEQ ID NO: 10993 - DNA, 6000 bp, Homo sapiens
cccaaaggattataaatcatgctgctataaaaacacatgcacacatatgtttattgtggcactattcacaatggcaaagacttggaaccaacccaaatgtccaacaatgatagactggattaagaaaatgtggcacatatacaccatggaatactatgcagccataaaaaatgatgagttcctgtcctttgtagggacatggatgaagctggaaaccatcattctcagcaaactatcgcaaggacaaaaaaccaaacactgcatgttctcactcataggtgggaattgaacaatgagaacacatggacacaggaaggggaacatcacacaccagggactgttgtggggtggggggaggggggagggatagcattaggagatatacctaatgctaaatgatgagttaatgtgtgcagcacaccaacatggcacatgtatacatttgtaacaaacctgcatgttgtgcacatgtaccctaaaacttaaagaataattaaaaaaaaagaaaaaaaattcttaagttttgttctaagataccatcaggtttcttagaactagttttaccattttaatccttgcttttaagctttgagggcaagaccagagaagcctttggtctatggttaatttttcctaactacaaacacaatacacttctaagtaatgtacctaaaactatgtgtttacaaggttgttatactgtggctggtaggaacttagcttctttaaatcactaatttaccctttttgggtaagtgttttcctgagaattggttaattttcccacatgcagatagaaacacgtatttagctgaaaacccaaggggaaattctgtgaatctccagagttctttctctgtatgactcacttttctctgttctgctgattccaattccatcttctcaagtaagagagacttccaggctcactgtggattccttatccttgtgcatgggctgaaaactctttctctaggcagtaagatagagcgatggtagagctcatctcatctgttaaacctgtcttagggatcactgttttgtgctgcctcttttgtgctgccagtgtctaaaaactactgtttaatatgttttgtctggtttttatgttttcagtgtattctctgttactccatcttgacttgaagtaggaatcacttcccacccccgtggtctcatatatattctttaatattttcttctattatcttccccaaattactttttcatactgtgacctttaatgcactagaattataatactacatatagtattacatagagactctgttttattcttcttgcctgtgcaacagttttcccagtattatctactaagtttttatttgttgcaatacacatttgagtgttgtttccttatctacatgcagctgactttgaactttgtattctcttccattaatgtttttttctgttctttcgccagttccattttaattttaatattatatatttgtattagtatctcctttctctcaaattctatgcttttcatttccatttctgttgcaatagcattgcttggaatctcctccagtgtgttaaataacaatgataatagcgagtatacttgcctttgtcatgatcttaagaaaaacctataaaatgtctccataagtatagtattttatattttttcataatacactgaaggatagatacattgaagcagatgaggattacaaaattggtttaaatttcaaattcttcatattcacttacaacaataatactcatgtcaacgaatttgaaacagcatcaatatggttctgaacagttctgtactagggcaataaaatatacaatgtgtatttataaacatcaaatactcaggattaaaaatgtatacttcatttatatagaaatcacatttttttgacataattgctttctccagaaacaaagagacataacagacactgatttcaaatacaataaatttcaaaatgcagtttcatgaggtctctttcaaattagacaatttatcttgtctctgtgaatcatgttaagactcaagtatttttatccaggaatattgataaacattaagtatatgagtctaagaaacctaatatggtatatgacatattgaatacaataataaagtttgtatggctgggtgctatggctcatgcctataattatagacatttgggaggctgaggcaagaggattgcttgagcccaagaatttgagaccagctggggcaacaaagtgagaccccatgtctacaaaaaattaaaaaagttagccaggcatggtggggcacacttgcggtcccagctacatggggaaggtgaggcaggagaattgtttgaatgaaggaggttgaggctatagtgagccatcttcatgccactgcatatgcctgagtgacagagcaagaccctgtctcaaaacataaataaacaaatagtgtttcattccagtagatgtttacctttgatgtgtgtgcattctattaatatgagacaatactgtgttcttatatgtaattttgtgatgaatctaaataacacattattataactttataacattttaataaaataccaaaaaaattattaaaatattcattatattcttcactacaatgaacacaaatctttaagtaaatacatataaatttacttaaaatgaagaaaattcaatccagatggcttgtttctacaatgcctgtcaattggatatttattaatccagcttttagactaaacatttttttctcttctaaatgattaggaacacacagacacaaggaggagaatataaaaattcatacagtaatttcgatttcaatatatttttatataaaatatgttaaaatggcatagttgcagtttgaattttagacacttcataattagaagattgctttagtaatttattctgtatagtaatattggatgttaaaaagaaaacaaataactttggagataaaattcctagagacatttctcaacttacatgtaatattaatttccttgctctcttttcctctttctcttgctccctctccctctatatatgtgtataatttttataaatataaatagaatatttatatattcaaatatatttatacataaatattctatttaactaatcttaattttataatgaattattttaagtagtgaaattccagaagagtacaataaggacttttgagttagaaaacataaaacttaaaattgattacaatgcaaatgtttaccttgtctaattcaattatgatgtgacagtgctcttggtgggcaatatctggaaaagttgcttaatttataagtgacattgcatatatacacatcttatcagtttatggctagatcatcataggtagtccttggctagttacattgttattattcaattgttcaattttatcctttaataacaaagaactagtcaaatgttttccctaatgaagagtgttatttagctaactccagaactgagccaccatttctgatcagtttacattagactcagatggtggtgatttgggaaactgttttgtgcttagggacaacctatttaaaacagcatatcagatgtttattgaatatatatctacgagtggcattactcaatcataagcatacatatactctgccttaatagatagaattaacaaataaaattgtcgagccaggttccaaaagaaaaaataagttagtaatttattttaaaaaattgtcagtttccagtaaagctgaacatactcaagtactatgacctggcaaatccacacctgggatttattcaaatgtgcacctgaacacatgtaaaagaatgttcatagaaacgttactcaggttgactaaaattgtaaggaacccaaatgttaatcaatatagaatggataaacaaactgtggtatatttataaaatgatgtagtatacagtaatgaaaaatgccacctgagaaaaaacatgagtggatctcacagatatggtgtcgagtgaaagaacctagacacaagagtgtatgctgaatgattccatttatacgatgctcaataggaggcacacttattcaataacaagccaaatggtggttattttgggagatggtggctagattgtgggctctgaatgatggttagattaagcagaacgattaagaaatgtgtacgttatacacgttataattcaataaaatataaatttaaaaataatatgccaacaataggaaataattttcacatttaaggtaagaacagtagatgatcagaagaagagtagcgagaggatttcatttatgagcttcattctttggcactcatttttttcccctaaattctgtgtttcagcattagggacttgccaactcagccctttaatcctcagagattccaaagttcttgcctggagctcctcctgcttggaggcgggtaaggatggatgtatataggggcacacacacatgcatggaggactgacctcccctccagttccacacaatacaacaggaacttcacaaacaagagcaaagctgtgggaaaagcaggttgcaggtggccccgcctagttcccgggatttcagctgcggcccgctggacagcgccaggatgacttctgcttctctgggcgaagagtccggcaggtgcttctactgatccccaagggacagctccttgttcctgaaaggctgttttccgctagataaccgcgagaacaaaccactgaatacggaacaaagacgcaaccgctttgctttttttttttttttaatttaaattcagagttagccggagccatttcccccctctagaagcggagcgcccgagtgtgtggacagacccctccccaggtcctgaactcttagggacgtggtgctgtgaggcttgccccgcggacagtaaacttgcaggggcgagagggagggacatcgattaaacctaaatcgtgggcgttcagtcctcagggcaccggagcgcgtgaaaactccagcggactctgctggaaaggagatcatgccctctaagtctctttccaacctctcggtgaccaccggcgcgaatgagagcggttccgttcccgaggggtgggaaagggatttcctgccggcctcggacgggaccaccacggagttggtgatccgctgtgtgatcccgtccctctacctgctcatcatcaccgtgggcttgctgggcaacatcatgctggtgaagatcttcatcaccaacagcgccatgaggagcgtccccaacatcttcatctctaacctggcggccggggacttgctgctgctgctcacctgcgtcccggtggacgcctcgcgctacttcttcgacgagtggatgtttggcaaggtgggctgcaaactgatccctgtcatccagctcacttccgtgggggtttccgtgttcactctcactgccctcagcgccgacaggtaagagcacaggtagctgtgagtggcttggaaaagtcgtggagaggggcgagtagagaagactcacccggagtgcacctactggcagaaggacgcaaggaaaggttgggtgtggagaggaagagagggagagagtgtgtacctgggaagtagagtaaacagagttaaaacggactgacatgtgaggcttggaaaaatataagaaaattactatgttttaaaaaaaacaattaaaattgcatttaaaattgcatctcctagtcccacctccgacacttagggaatattatttcatagaaaagctatagaataaacatgcaaaagagcgagtatcttgttgaagctttctgtgtgtgcttaaaatcttattagtgttctttcctttatgcagtagagtaagaatctaataggtaagaatgtctgcttaatattaggcaaatatttaatttttatttctttcaagtaagaggagaacttacttaaatttattaactgaattttactatttcttagaagtaaaaccaattagattaataaatgttctttgggcagatgacttttcacattcttcttgttta

SEQ ID NO: 10994 - DNA, 6000 bp, Homo sapiens
ctcaaaaaaaaaaaaaaaaaaaaaaagtaccaaccatgtgccaaacagtactcctaatttctctcaattacctttgtctgtctagcacagatttaggcatataacggacatttaatgggcatttatgaaaaaaagggatgactgttaaattcttagagaaaattcaaaaaaaaattttttttttgaggcggagtttcctcccttgttgcccaggctggagtgcagtggcaagatcttggctcactgcaacctccccgtcccgggttcacgcgattctcctgcctcagcctcacaagtagctgggattacaggcaggcaccaccacgcccggctaatttttgtatttttagtagagatggggtttcaccatgtcggcctggctggtctcgaactcctgaactcaggtaatccacccgcctcggcctcccaaagtgctggcattacaggcgtgagccaatgagcccggccaaaaaaaattttttttaatggtgccagccgttaaggaaattacaaatcgagttgagaaataagacaaacacatgaaaagctaagtaacacaggacaattaaaaataccatgtgacaagatatgattactgcatagtagcgaataatgctataaattctgaccagtgagtttattatagactgcggcccttgtagtctcccaacaaaacggggacgctatatttcgatttaaaaaaagaaagtgacacagcactcatcctatcctaaaattatcatcagaagaaggaatacagtaactaaggagagtgatataaagaaactccacataaggtttttaaagcctatggtagccctgaaaaaagttagaacatcagacacacaaccctctgctgatccaggacctgcaaaggctcctgaaatacaagtctctcaggaacagcatcccctgttctttctccgccccgcacggagctttccactggacagccgcccgagaaatttctcccagcatctgcaatggcaatactctcatcttcctcccctcgcctgtatcagacggtggcatctccctccaggggaaaaaacggagggcgggggaggctgcataagagggaaagcttgcagcgaggttgattatggaggaggaaggtgagaaaaatgcaggggacgagggtggggtctcctgagcgccagcccactctccataaggcctagcccacacgctcccaccccgaaggcacgcccctcacaagccggacccggacgcggacctgagtgacagcagcatcacctgtactgcactccctcccccagggcctgcagggagacgactgcccctgcccccaccagcagcggcccctggctctttctctccccttccagtccacgtcgtcgacgagtgacaggtcccgagggaggcgactgcaagcgcacgccgttcgggactaccggggcaactctgcgccgaagccctccaacaggcgcgcggggacagacagaacgttccggacggcccagggggacccggtccaggcccagcctgccccagctgccctacaacgggcggaggtggcacttactgcggagattgtggattagctccgagtggctggcgccgccggatttccaggccatcgctaagcacactcggagcaggtacagaaccaccttcagcgcgacgacggtgcccagcagttttcccaagagtgagaccacctcccacaccgtcaccgccccgctcgcgtccccgctgtagctgccgctgttactgccgtcgccgccgctgccgccactgcgcgctcccggcatcccccgcggcacgcatgcgctctgtgacgccgcgcggcttagggtgcggccgggtggggccgagggcgggggaggcgtgtggcccagccgcccgcccctgtggctgctaccgctgccaggggactgcagggaggccgggctgagtcagcgccacttccgctgctgcgtgtccctttctgaggcctcggaccgcaccgctttcgccctgcggcccggctcggtagcctgatcagtcgcgttcccggctgtgtctccggtcaccgagcgggacggcgggatggcggggtcgatctgtgcagacgctgctagtggttccgcagtcgtcgctgggtcagctgtttcgagcggcggatctgctcctatagatgtccagattgttagacggtgggcttcatccgtcctacctcgcccaacccagttgactaatatttgggtcggtggagcccgaataatacaataagaataaaacccaacgacaaaggccctctctaacccgagtacaccggcctctggctttgtgacaagcacgtcactgttaggctaagcagagactttggaaccccggttctaaagctctcagagtggaagagtaccaggacatgggggtgggggttggggcaaagctttgctcccttagaataataccaacgtacagagttgcgattggttaaaaaataccactgtgtcctttggtgaacgtgttattctcccgacgtaagtgtgcatttccacctaattaagcctcacaaattccaccgtggctttattgctctcagctctgcaagaccatgagtgagaagctcactgagaacattgcttgtcgcgtccaaatcgctgactcctaattagacctgagactgacagaatccagccatcatctagtccagtaacttttttttttttttttttttttttttttgagacggagtctcgctctgtcgcccagactggagtgcagtggcgcgatctcggctcactgcaagctccgcctcccaggttcaggccattctcctgcctcagcctcccgagtagctgggactacaggcacccgccaccacgcccggctaattttttgtatttttagtagagacagggtttcaccgtgttagccaggatggtctcgatctcctgaccttatgatccgcccgcctcggcctcccaaagtgctgggattacaggcatgagccacagcgcccggcctccagtaatcttttagaaggaaacaaagctaagacatctgtgccactatatcagcacaattttcaaattctagttcttatccgattttgtaaaatgtgacactggcctgcttccaatccaaaatcaacattacctattttctgggattatgtgaccataaatgaaactacaggcaaaactggtttctttttgtttttttgcttttgattgagacggagtctcactctgtagcccaggctggaatgcagtggcatgatcttggctcattgcaacctccacctcccaggtcccggttcaagcaattctgccgcagcctcccgagtagctggaattacaggcacgcaccaccatgcccagctaatatttttgtatttttagtagagacagggtttcaccatgttgaccaggctggtcttgaactcctgacctcgtgatctgcctgccttggcctcccaaagtgctgggattacaggcgtgagccaccgtgcctggccaaaacagtgttctttacttcaatattaaacatgaataaaattgttgatttgggactgtaacccacttaatattttccatttcatctttctacagtttcttgatgatcttccatttggagaaaagaaaaaagtcaaatccttgataggaaactggtaactctaaagctgacccagatggattgcatttacatgcagtgcttccgtaaactgtccctgtgaagtaggactaccaatatcacataaaaacaacagtagcataatggccctttttaaagaaataaccaacatacagttatgaatacctatagtgtaaaagagcttcattttttagttgaataagtcatatctcttgtattcagtaggatttacattctaatgggggaggaatatgcatctaaagaaaactaacataagatatatccaaaatatatgtcattagtggtctagatatcaaatgctagctcacgcctgtaatcccagcactttgggaggacaaggcagttggatcacctgaggtcaagagttcgagaccagcctggccaatatggtgaaatcccgtctctccaaaaaaaaaaaaaaaaaattagccaggcatggtggcgcacacctgtagtcccagctaccctggaagctgaggtgggagaatcacttgaacctgggaggcggaggcagaggttgcagtgagctgagattgtaccactgcactccagcttgggccacagagaccctgtcttaaaaaagaaaaaaaatggtgttgatttagatcaacattggctggggtcgtcaggaaatggtaaaggaaagaacagatccttgaaggataggcaggattctgaggagtaaagaggaagggaagaatattataggtgtaaccaaaagcacagaaggaacctagaaaactgattcctgggccgttgacaataggtatcacaaacttcattcttaatcatgcacgtaattgaattgatcaaagctaggcaattggcatcaaaactaaaactggagtctttcagaattccaactccaggctctgacagtgtgtattaactttgaagcaaagtatttgtttgggagacaagagggagaggtttgggatagtaggttggcactttattcgaggtacttccacgagtatttaaggatttttgaatcgttttctatgcgcagtgacctgcaactgcttaggtgtggtttcaaggtggtttctactgcattgtttttgttctgtttttgcacttaaattttacactgcacaattattgaacacaagaaaatactgacattgcagattaggagcaagtcctactgctcaaaggccaaagcgctcttgcctttgctcagagctgctctgtgagatgggtgggcctctcagtctaggtactgactgtgcccacactggctatcgacgagaattgactctctgcagccaccgtctccgtcctaaagtcccatccaatcagggttccgcgggaagaggcggtgctgagaggcgcgtactgtgcttgctttttgcagtacctgctgcggccgctttcggcatggaggaaatttatgcgaagtttgtgtcccagaaaatcagcaaaacccgctggcgaccgctgcctccgggaagtttacagaccgcggagacgttcgctacaggatcttgggacaatgaggtatcgccgctgatagggacgagcccctacctcctccctctctccggttgagctgacccctggccttccgcgcgccaactcccaccttctggttcttctcgcacttttaggtcccccggacccctgtctcaggcgcggttgctccgtagctcagagccggtgatggcatgcctgagcctcgtatctcgttgtgttttaaactcaccataccatttgagatgttttggagcaacatttccggacgggagcacaacttttattttccgagagttgacgtttatgtcatctcaagacaaaactttctgttttacaggaaaattatatttcactgtggtctattggagattttggaaacttggactctgatggagggtttgaaggagaccatcagttattgtgtgatatcagacaccatggtgatgtaatggatttacaggtaaatctgtgtagcatccaaaagctaactttgaaagtcctgagtaatacatttaaacaagcagagcatcataaaagttgtctggtgtcacccctcgtttacagaaaactgagtgctctgtaagttatgatttgcccaacatcatttagccatttagtggcagaaaaaggactgggaaaggggatgtagatttaatcatacttttttattaattgactgtcgactatgtgctaaataccgtttggggagctttacaaaaattaattattgttgcatgccagtgaatcaagtatcgttactttgttttactaatgagaaaattgagactaatatatcttgagcatgtactatgtgacagatactgtgcagggggataacatcattttgttttttgaattctcataacaactccctaagtagagattagtgctcccgtt

SEQ ID NO: 10995 - DNA, 6000 bp, Homo sapiens
gagtcaacgcagaagacaacttctcaggattttccccagttactaccacgtccttcctctaagaacggcctctctttccatcctcaatgaggagagggaaggccatgtttgtagccctgtttgtgcctcatggtctctgcacactaacctcagtttagggtggacacaggaccaagctagactcatcagagtctctctcttggtactgatggtcactgttctgagtttctgttcattgctgcaggtgaggtgagatagactcaggctctgtgcatggagggcagaaaactccagactctgagagaagcatgaatcagatgtgcagagagaagtggagatctcagactacttggtcccagaagagagaagcagcaactgggagaccagctgcttgactgctgagggttctgccatgtctggtccaggccctcccaaggcctggctgcatttcctccctgcctgtgagtgcatgtgtgtaaacacggtagctattttttctttaaaccaatctaaaatgagtttctgttgtttgcaatccacagagatttaactaggatgaacctagatcactgagctgcaaggcaagaactccatgagaggaattccaggtagaaggccaagtaggtgctcaggggagagatttgagaccagaaagtgtcaggcaactcctgtcttcactccctccctctctcaaggctatgtatgcactgttctctatttcctcttttcacggttccatttgtccccctctgctgaacagcttctctctgctatcatccccttccatgtcccctggagctcacctggcttcccagctacacttccctccctgactcaatttgttgagtcagtttgttgagttgatttgctgagtcagtttgtttctcaattctgtttttacattccttggagagagtatctgattggctgtgcttgggccaggcattcattattgattccatccctagtgaacagggggtgtggccacctgggggttggggctgccccttccagggacgtgagcagagcagattccatgaaaggggtatggagaaggaagaatcttagtgcaacagccactcagctgggatgttgtagaggagattcaggcttcaagtggtttcatgacttctaatcttaggaaaggtccttcatttctgttgtaataacaacaacaactagcatttattgaacttctataatgtgtcagatgcccttctaagcacttcacatgcactgacttaacttattcgatgcctgtaaaagtacttagatgggcagtagaggggaggggagggcaacaaaaaacgatgtcactagggtgttgctgtagattggatgtttgtaaccccccaaaattcctatgttgaaacctaatgtgatgatgtttgcagtggagaatttggaagatgattagggcatgaaggtggagccctcatgaatgggattagtgttcttataaaaaagatcccaggccaggcacggtgcctcatgcctgaaatcatagcactttgggaggctgaggcagccagatcataaggtcatgagttcgagaccagcctgaccaacatggtgaaacccagtctctactaaaaatacaaaaattagccaggcgtggtggtgtgcgcctgtaatcccagccactcaggaggctgaggcagaagaatcgtttgaacccaggaggcagaggttgcagtaagcagagattgtgcctctgaactccagcctgggcaacagagcgagactttgtctcaaaaaagaaaagaaaagaaaagaaaaaaatcccagagagctccctaactcctcccacaaggtgaggactcagtgagaagactgctgtctatgaaccaggaagtgggccctcaccagatatcagcgtctgccagcaccatgatcttgaacttctcagccactagaattgtgaggaataaatttctgttgtttagaagcctcccagtctgtggtattctgttacagcagcccagctaagacacaggttatctcattccaacattcaacaaactgacctacgaagtccaatctcaatttgatccactcttactcttaatgatctatcttataaaacagaaacacatcttcctgacattttcatcctcacataaaaattcttctatccattgataaggttttgatgtttaggcttttaaaacaaagatagtttatttctgaaaaaaactgaaaagagaactagaaaaagaagataaatcacaatgcacagtgcaatgaaacttcgtttttaaaaaatagccttattaacatataattgactatacccacttaaaatacacaatttgatgaactttgatcaatgtattcaccagtgaaaccatcaccacaatcaaggtaatgaacacacctatcacctgcaaaagttttcatgtgcttctctgtaatcccttcccttcctactcaaactcatgcctcttgtcacaaggtttctccactctggctgttgggaacgaactattgcctggccaatgcaagctcagaagtttttctgccagcttttttctagtggttgcctctctgtcttgggaagtttcctcacatgcatgtacctggtcgaacttctgctgaagactcagaggaaccctgcacagatctccagagctccctccttccgttgcactctctcctctctggtactctagccaccctggcctccctgaattctcagctctattttccaactcagagtctcttttggttcgcctgtctgcattgcggcttggaaaccctctccaggcagtaagctggagcaagcagcatgttcacttcctttgtctcccttctcttgggccctgcattgcctgttgcccaatgtctgaaaaccattgttccatacatttttttcacagatttttcatttcaggtcacagagtaagtccagtccttgttgctccctcctggctgaagcagatgtcaacacttatttttaaaaaatagaaaatcatttacaacaagctcattgcaaaaaaaaaattcaacaaagtcttataaattataaaagtcagtatttccccttcagtacttgcaactcacagcccagaaataaccactgctcacggtaaacacaacattaaataatttccacttctcccaaaaagacctattgtaaagttgcagatgcaggaaaatctttgatggtgctggagggatttagaaatgaatgcccctgagaaatgctgtcctctcccctgtccacttccctaccacggaacatgtgagctagggctcactctatactgacttctctttcacggtcccaaaggcaggagtgaggtggtcaaagtctctgtgaaggcacataaaatcatgtatgtgaaagtgtttggcaaactttgaaatcatgtacaattcttagttaatattatatattatcatgttatttttaatattaataacttatataacaactagtccttggagggtttgatgataccctcagtcagcattttcatcactagtgaaagtttctcctcataacaatcctgctcaagctctccaaggtctatggcaaaaaataaaaataaaaaataaaaagcattatgttgcttcaaggtcatcttacaatgactgcagttgtgtgggatgagtatgccatatgaggaagaatctccaggccgaagtggtacagtccagacacagcctttagagctaagaggccatttcttttagcctcaaaaatcactcaaatatacccctgcaaaaactttataatttctccctttgatggaatggcaagtaacattgagcttttttctttcttttctattgctaccttttaattttacctcctactctgatctggatctgcaagcaatgggttcctaaatgtcaactctggagataataaacacatagcagagactgatattttcccaccaattatttattctttcaatcctaaaaaatacagacacttaacagtgttctatttacaatgtgcgcatccaggcaaaaatttccggacaggctaaaaagcaagaaaatgcgatccacaatcaggagaaaaatgaatcaacagaaactgattcagaaacaaacaagatgcagatgctgctcacagaagtctagaacgccaaggtgaagcccccactgggttggacattttcttattccttatgtcatttaaagcacaactcccgagattttacgtgatataaccgctagaggcctctctgtcacaggctgtattactcccaggtccccatgttggctgtgttcagattttttgttatatttgtggaaatctgagtgcatgtgacgactgctatttatgggttttgtttttatttttaaagacagggtcttgttctgtcccccaggctggagtacagtggtgtgatcacagctcattgcagtctcgaactcctgggtccaagccatcctcccaactcagcctcaggacttacaggcgagtaccacctcaccaggcttgatttttgtgtttttaaacagactgaacatctttcagtacttcccatccccacccctcccggccctgactccgccaccccaaccccgccccactttgtactacccaagcacatcttgggaacatgatgcggaaagtcagggacgctggaggtgaaggactgatgacgcgctacggtggtcctaggtgcgcgtgccccctctctggagtagtcccgggggtcacgaggatttgaagacaggccctcccttcccactgcccccattcccccgaatgccaagcccctgtgggcaggcgccctgggcaggtgtggttggttgctaaagcctgctgggcccagacatgaaccctgccctagctgggcagcggcgcgggagcaaagttgttctgaggctgccctccccggggcctgctctcccagccctggaggagccggcgcgagacgcgcgggggcggggccgcgcgggggggcggggctcaccaaggctccaccccgccgcggccactgttcgcacacacctggtgctgatcaacgccgaggccgactcgtcgccacccagcgcgccgcaggccggggcggagaggcgcagggcgctgggcagtctccggcgagggcaaggagcggtgcccggctgggccggctatgtctcccgctactgcggttcccgccggcgcccgcgacctcgggggagcagccgggttcgggggcgccgcgctgtgaggccggggcctagagccagccgcggccgcgcaggaggggcccagggcccgcgctcgcccgcgtccccgccttcctcccgcgctcagccccgcctcggctcgctgcccttggctctcgtcgccatggcctccgtcgcccaggagagcgcgggctcgcagcgccggctaccgccgcgtcacggggcgctgcgcgggctgctactgctctgcctgtggctgccaagcggccgtgcggccttgccgcccgcggcgccgctgtccgaactgcacgcgcagctgtcgggcgtggagcagctgctggaggagttccgccggcaactgcagcaggagcggcctcaggaggagctggagctggagctgcgcgcgggcggcggcccccaggaggactgcccgggcccgggcagcggcggctacagcgcaatgcctgacgccatcatccgcaccaaggactccctggcggcgggtgccagcttcctgcgggcgccggcggccgtgcggggctggcggcaatgcgtggcggcctgctgctccgagccgcgctgctccgtggccgtggtggagctgccccggcgccccgcgcccccggcagccgtgctcggctgctacctcttcaactgcacggcgcgcggccgcaacgtctgcaagttcgcgctgcacagcggctacagcagctacagcctcagccgcgcgccggacggcgccgccctggccaccgcgcgcgcctcgccccggcagggtaagcgcgcgactgaggggccggccttggccagagcgctcgagacccgcagcgccctcgccaagttggaagcgaaacacactcg

SEQ ID NO: 10996 - DNA, 6000 bp, Homo sapiens
cgccagataccggacctgctgacaccttgatcttggacttcccatcttccaggaaggtaagaaataaatgcttggtgtttcagccaccttgtctattctgttgtagcagcctgaactggctaaggtagcagggtctgatgatcaaatgggacagctgtaaaagtgaggtgggaagggggtctacagatactaagttttatgaggaaaacttgtgctttatttgaaaatgacacaaaattttgttctaagaaaaattttcagaattcaaaacttagagccctaagacttttcccaatgatagacttggctttccttgaggtcttggccccagtaggactgctggagtctattacaaaactcatctggaaggacctctgccgttgctgaggcttgaggaaatggttttaaggtcacagtgtaaacaaaactgctgggaagttggaactgggcggagcccactgcagctcagcaaggctgctatggccagactgccagatttctcctctctggtcagggcatgttggtaaacaaggcagcagccccaatcaggggcttatagcagacttaaatgtccccgcctgatggctctgaagagggcagcagacctcccagcacagcattcgagctctgctaagggtcagactgcctcctcaagtgggtgcctgacacccacgtatactgactgggagacacctcccagtaggggccgacagacacctcatacaggagagctctggctggcatctggcaggtgccccactgggtcaaagcttccagaggaaggaacaggcagcaatcttagctgctctgcagcctccgctggtgatacccaggtaaacagggttgggagtggaccaccggcaaactccagcagactggcagcagaggggcctgatggttagaaggaaaagaaacaaacagaaaggattagcacgtcccctcaaagaccccatctgaaggtcaccaacattaaagaccaaaggtggataaatccacaaagataggaaaaaaccagtgcgcaaagcctgaaaattccaaaaacaagaacgcctctcctcctccaaatgatcacaactcctcgccagcaatggaacaaaactggacagaaaatgagtttcacgaactaacagaagtagccttcagaaggtgaataataacaaacaactccaagctaaaggagcatgttctaacaaatgctaggaagataagaaccttgaaaaaaggttagtcgaattgctaattagaataaccaatgtagagaggaacataaatgacctgatggagctaaaaaacagcatgagaactttgtgaagaatactcaagtatcaatagccaaatcaatcaagcggaagaaaggatatcagtgattgaagatcaacttaatgaaataaagagagaagacaagattagagaaaaaagaataaaaaggaatgaacaaagcctccaagaaatgtggtactatgtgaaaagaccaaatctacatttgattggtgtacctgaaagtgacagtgagaatagaaccaagttggaaaacactcttcaggttattatccaggaaaacttccccaacctagcaaggcaggccaacattcaaattcaggaaatacagagaacatcacaaagatactcctcaagaagaggagttctgaaactattccaaacaatagaaaaagagggaatcctccctaactcattttatgaggccagcatcatcctgataccaaaacctggcagagacacaacaaaaaaataaaatttcaggccaatatccctaatgaacattgatgcaaaaatcctggcaaaccgaacccagcattacatcaaaaagcttatccaccacgatcaagttggcttcatacctgggatgcaaggctggttcaacatacacaagtcaataaacgtaatccatcacataaacagaaccgatgacaaaaaccacatgattatctcaatagatgcagaaaagaactttgataaaattcaacaccacttcatgctaaaaactctcaataaactaggtattgatggaacatatccgaaaataatgagagctatttatgacaaacccacagccaatatcatactgaatgggcaaaaactggaagcgttccctttgaaaatcagcacaagacaaggatgccctctctcaccactcctattcaacatagtattggaacttctggccagggcaatcaggcaagagaaagcaataaagtacattcaaacaagagaagaggaagtcaaattgtctctgtttgcagatgacatgattgtatatttagaaaactccatcatctcagcccaaaatctccttaagctgacaagcaacttcagcaaagtctcaggatacaaaatcaatgtgcaaaaatcacaagcattcctatgcaacaataacagacaaacagacagccaaatcatgagtgaagtcccattcacaattgctacaaagagaataaaatacctaggaatacaacttacaagggatgtaaaggacctcttcaaggagatctacaaaccactgctcaaggaaataagagaggacataaacaaatggaaaaacattccatgctcatggataggaagcactaatatcgtgaaaatggccatactgcccaaagtaatttatagattcaatgctatccccattaagctaccactgactttcttcacagaactggaaaaaactactttaaacttcatatggaaccaaaaaggaggctgcatatccaagacaatcctgggcaagaagagcaaagctggaggcaccgtgctacctgacttcaagctatactacaagtctacagtaaccaaaatagcatggtgctggtaccaaatatatagaccaatggaacagaatggaggcctcagaaataacaccacacagctacaaccatctgatctttgacaaacctgacacacacaagcaatggggaaaagatcccctgtttaataaatggtgttgggaaaactggctagccatatgcagaaaactgaaactggaccccttccttacaccttatacaaaaatcaactcaagatggatcaaagacttaaacataagacataggaccataaaaatcctagaagaaaacccgggcaataccattcgggatataggcatgggcaaagacttcctttctaaaacaccaaaagcactggcaacaaaagccaaaattggcaaatgggatctaattaaactaaagagcttctgcacagcaaaagaaactatcatcagagtgaacaggccacctacagaatgggagaagatttttgcaatctatccatctgacaaggggctaatatccagaatctacaaagaacttaaacaaatttactagaaaaaaaacaaccccatcaaaaaatgggcaaagtatatgaacagacccttctccaaagaagatatttatgcagccaacagacatatgaaaaaatgctcatcatcactggtcgttagagaaatgcaaatcaaaaccacaatgagataccatctcacgccagttagaatgacgttcattaaaaagtcaggaaataacagatgttggagaggttgtggaaaaatagaaacacttttacactgttggtgggagtgtagattagttcaaacattgtggaagacagtgtggcaattccttacggatctagaacgagaaataccatttgactcagtgatcccattactgggtatatacccaaaggattataaatcatgctgctataaagacacacgcacacgtatgtttattgtggcactattcacaatagcaaaacttgtccatcaatgatagattaagaaaatgtggcacgtatacaccatggaacactatgcagccataaaaagggatgagtttatgccctttgcagggacgtggataaagctggaaaccaacattctcagcaagctatcacaagatcagaaaaccaaataccacatgttctcactcataggtgagagttgaccaatgagaacacatggacacagggaggggaacatcacacaccagggcctgtcacggggtggggggctaggagaggggtaacattaggagaaatacctaatgtaggtgatgggttgatgggtgcagcaaactaccagggcacgtatatacctatgtaacaaaactacacgttctgcacatgtaacccaaaacttaaagtataataaaaaaaaatttttttttgtagagatggagtcttactatgttgcccaggctggtcttgaactcccggcctcaagtgatcctcctgcctcatcctcccaaagtgctgggattataggcatgagccactgtgagggcctggccatttcagtttcgttaattagcatctatgatagtgcctgatacatgtagtagacactctgtgtttattgagtgactcaatatgttttattacaattacacacacacacacacacacaaaacccatctgtcatggtagaccacttgctgcctgtttgcagctagtttaattaatactggggtgtgcttggtgagagaaaatctcaaccatttaagaggaaagagtttgaacgggttagggacagtgggagaggggagaatggcgatgggagaaaatacaggaatgggcagggggtaccaggaagaaagggaaaagcaaaagaggcagggaggagaagggaagaggaaactggaggaaaggagaaggagctcacataacctccaaccatcctgctcacaccagagggggttttttttgcaggggcagcagggacaggagaggagagagagtttattcaaagttaattttgtttttaaatgtcttcttttatttttcaataaatgattatattctgaatacttggaaaacactctcttcacaaaattgttctttaattgggtctctacaggcctgacctcagttgttccagggtaaagaatttgggcagtgcccacacccacgctgttggataacatttcttcaccataccagtgagggtgaatgtgtacacgcccagcttcctgcctgttactctccacagtatgcgaagaatatccctgacttctagccctgtgcgccttcttttgtttctgctgttgctactaatagccttggagatcatggttggtgagtgtcctgagcacaagaactggctgaggacaaggaggagggagaaaggtagggggtaggcgaatggggcttcatgcaggcttcagacaagtgggtgcctgctcttaaggatgacgtgaggaagaggatccctgggatgttacacccagttcatgggagaccacagcctgaggccctaggcaaggcactggctcacagagggcagttctacaatgctaccccccgccttctactccaggtcactttcctgaacatctgggaccccacaggaattcagcgtgtgtcctgtgataaatgcctctttttcctttctattgaatgtcatgtgtgttcagctagagtttaagtctcaggaggtcatacactggcttgtctgttttgtgcctcagaacttggtagatgttgctaaaagtacttgtgacatgaatcctcctgttaacaccattaacactaagtgcaccccaggggtccctggtaccatcaagtatctcatcccagacagtcagggagagatgggaacagggatccagaaggttgagggagtctgggatggagctgccccgcctctgctagcctggcccagtccagggagtcttgggtcacagaagcgcaggttctaatgggcctcttcccctgtcctggacctcacctgcatctttgtctcacaggtggtcactctctttgcttcaacttcactataaaatcattgtccagacctggacagccctggtgtgaagcgcaggtcttcttgaataaaaatcttttccttcagtacaacagtgacaacaacatggtcaaacctctgggcctcctggggaagaaggtatatgccaccagcacttggggagaattgacccaaacgctgggagaagtggggcgagacctcaggatgctcctttgtgacatcaaacc

SEQ ID NO: 10997 - DNA, 6000 bp, Homo sapiens
aaaaatggtcatcatcactggccatcagagaaatgcatatgaaaaccgcaatgagataccatctcacaccagttagaatggtaatcattaaaaagtcaggaaacaacagatgctggagaggatgtggagaaagaggaacgctttcacactgttggtgggagtgtaaattagttaaaccattgtggaagacagtgtggtgattcctcaaggatctagaattagaaataccatttgacccagcaatcccattactgggtatatacccaaaggattataaatcatgctactgtaaagacacatgcacatatatgtttattgtggcactattcacaatagcaaagagttgtccatcaatgatagactggattaagaaaatgtggcacatatacaacacagactactatgcagccataaaaaaggatgagttcatgtcctttgcagggacatggattaagctggaaacgatcattctaagcaaactatcacaaggacagaaaaccaaacaccacatgttctcactcataggtgggagttgaacaatgagaacacatggacacagggcggggaacatcacacactgggccctattgggaggtgaggggctgggggagggatagcattaggagaaatacctaatgtaaatgacgagttgatgggtgcagcaaccgaacatggcacaagtatacctacgtaacaaacctgcacgttgtgcacatgtaccctagaacttaaagtataatttttaaaaattatttaaaaattaaaaaataaataaataaataaattttaaaaaataaaataaaaatcatatatcaggtaagggactggtattctgaatatataatattgcaacaaaatataattgcaattatatattatatataatatataatgttgcaactcaacattataaagtgaaataacccaatttaaatatatgcaaggaatttgaatagacatttctccaaagtaagacaggtatactacacggtggtctcaaaagaatagaaaattttgggcagcagtttcaggtgactagcaaaaggaatctgttgaaatatgtgcagaggctctgggctgataagatgctgaaaaacagcatgtggaccaagctggctaagaatgactggacccaacaaggccctgcatttgacctaggtttcacctaggacctcattacatgctgattaacatactaaacacacaccagccagctcctgagcagttctgagaacacttatatttagtgtaaaaatgcggggcaccacagttctgagaaatctctaccttcttccaggaattttcatgaatattccactccttggttaaagaaacccagaaaggtggcagccccaaacttgcacctgcttctctctcgagttcccctgcactccctttacttgactgtgtactttgccttttacaataaatctccgtcctttctctatttcctactggtccttgaattaatttccccggcaatatcaagaatctggacactggctggagtcgaggtcccaccggcgtttggggacctccccttgcccgctggcatcagaagaagaatgcaaatcgcagtgagcccaggaaaaggtgttcagtgttcacagccctcagggaaatgccaatcgcacccacaaggggacgcctcaccccgctgaaatggctgatcccaaacacagtgagggtggagggggtggggcctgtgttccttactgggcagagagcaggagacggagagtcggtggagtgtgggggctgtgcgcgtgtccccctctccccattttcgtggtgggggtttctcattgttctccggccctgtttccttcctctccctttctgccgccctccctccaatccttcttttccacccatcccaaggttttctccgcctcacgacgtccatgctagggcctcccagaccagcggagaaaccagcagccctggaccgcaagcggcggggtcagggaggcgacaacgggaagcccctgccggaccctggacactcaggacctagtgctgcccgggcgccctcccgcagcagccccagggcgaggaggatggggggggtcctcgcaggggccacactgtcggagccccacggatccgggcgggacggtgaggcctccacactgagccggtggcaaagtccccgcgaggatgaaggaggaaccccgtgctcctcaccccaccaggccccgcatttcctggctcctcctgtctcaggaaccgcctgtcccttgccgcgaccggcgagtccttccgggtcttcctgaaacagtttcgtcccgaggctctggatctggaagcccaggggcatcgtccgggagcggggcacccactgtgggtctccgccagccagcactcaggcccggagctcggggacagcgggcgccctgggaggagcacacagaaccatatcaaggcttaggtcctgtcgagctctagagggtttagcaaattcaggtctgtttcagactgtgtctctggtcataaggaacccccacggtgcgtggtgtgcagacagcaggagctcaggcatgtgcggtcctcacatttgagtggggcagcagattggtggctccagatgctgtgtgtcaaggagaaggagattccatccactggagaagagcagaggaactgggtgtaaccccaggaaggagaggctgccaaggactgtgtcgacccagaggacaatgctggagttaattcccagggaaggtgcctgggtcacagcctttaaggcagacgctgactgaaaagactgtatacaagtaggaggtcaggtctctgggaaccctcagaatacggctcagtcctggggcaatgcccctgccatccggcctcctgcacactccagattctggccctgcctggagcagagctgactcggagacaggggtactgagctgctcctggagttccaaggtcactgctgagctggaccaggagtggatggggcggggcagggacagtctcattcagagctttgggtacagccctagggtgagaagaggctgagagagaaggggaaaagaggatattgcctgagtggctgggggcagaatgggacccaggggctctgtccagtcctcaccctaagctaagcccttcacagctgccaggaaccactgggaccctcacctgtctctggcttctgccaccacttccagatgccctcatgataattaagacaaggatacaattggggtttccttttgaggatggccgcagggaccgtccagggactgagcagaggtgtgggtgcagccatggatccaggcatcaatggttggccacagatgggtgtactgcaaagtgagctccacgcacgcacagacccctcccttgcctcctgctcccatgggaaacacaattgatcacattccaattgagcaacagtaggccactagggcttttttccctcaaaagctgtacacagatctagtatagtctcaaagacctcatgcttctagtagagaagcaaagaaatgtgtgagcatttgtcacacagggagatccggatacgctccatcactgtggatccaggcctcagggagcaggagggtgttccttcatgtgggaagatgagggacacacatgggagggggtatttgtgcgcggcttggaaggatggctggtccttgcccagggggaacaggcccaaagcaagcgctggcagttagtagctatggggagctttcatttgaacctgctctgctgagtcccctgggccatccccacacctggtggggcactgttctaaggggagctcagggtcaatctctctgatgtgctttctaaatcagcaaggtgcctcacaggttgtgattttagagacaaggttttcaatgctttgcattaaaatgcaaagattttaatgagcagagtctttttgccaatccgaattgggcagatcccagcaagacacatatttttaagataatttttaaagctgtttaattttggtaaaaaagtagaacataaaatttactatcttaaccaattgtttagtgtacaatatcttctttgaagcttctgaagacctggtgcttctgtaataaaatctagccccgggccaggcgtggtggctcacccttgtgatctcagcactttgagaggccgtgtcgggccgatcacttgagcccaggagtccaaagccagcctgggcaacatggtgaaaccccgtccccactgaaatacaaaacttaaccgggcttggtggcgcgcacctgtggtcccagctacttgggaggctgaagcaggagaatcgtttgaattcgcgaggcagaggttgcagcgaacccagatcgcgccgctgcactccagcctgggcggcagagcgagactctgtcacgaagaaaaaaaagaaaagaaagaaaaaccaaccaaccaaacaaacaaacctagcccaggctataaccacgtccactcgggatttgggatgaggccgcggggatgggactgggcttggatctgcgcacaggacggtgggttgggagcactctgcaacgcagggagagggaaggcgggtgtcgcaggtacaggcgaggacagggagaccctgtcgcggctgaacacttctgtgcattttcttcacctttctgtgcatcggtatccacattggattaatacaaaatgaaaaaattgcggtgatgattacatgagggggtcatggaaagaagcctttggcaggactggtcccgggcaggcagccagcaaagtctgactggctgaagcagggggaagtgcgcgagcgctgcagtagaaagtggggtagacttggatgagcaacttggctgagagacacctgattggctagcggctcagcaaagggggtgtgtttcctccgaggggcggggcagaaggagtgctagagtttagggcttactggagtttagggctgcattcagacgggctgcattcagacagcctgcgagccgccaggtgatccacgggctgggcttcgcttctgctgtcccctgcgatccaactccccaatggcagcggccgccagccccgcgttccttctacgcctcccgcttctgctcctgctgtccagctggtgcaggaccgggctggccggtgagttcggggatggagcctaagcggggcggaggccaaccgtggggggctgtggactgtgggcttcagaggaggggaggcttctggaaggacccgtgcgatcaccccggactgcgcccccgctcagtttccctccgcgtctccttcccgccgggtccgttcccagaggctacttatcctccgaggggaggagctggtcagagaggaggctggaaaggaacccccggagagtggaggggccagagggctgcagagggcgacgtggagcggggatccctagtgcagcccggcagtcccacccgccctcgggaaggagaaaccagagcccccagaatccgagctggggtcaggacaggggtgaagtggggttgcacagggacacaatcacagacactcccaccagccaccagcctgctctgttctcacccgctctcaaccacacaaaccttccagcacccccagggctgcgtgcccttgaatttttccctgcactttcctgtagacactcacctgcacccagcggctcagcagacacttcccaccctcccctcaccatccactgccaccacccaggtaacatcctcttactccccacctcagcccagctggtcaccccagaggtctccccatccatgaaggggccctcgcgacctcttacaccacgtgacaccttctgcctcttgcctgaggacacaccccagcaaacacaccccaagctccccacagaacctgtgcaggggggatgggaagcaccatttcctccaggatgaccctgggaactctggtgagtagaggcacccacttctgcccttggggcccagacctgcctgttcttcctactggggcgccagcatcatagagaatagtcagtgtgtagacaggggtcagcaaaccctttctagaaagggaggaagg

SEQ ID NO: 10998 - DNA, 6000 bp, Homo sapiens
gctcaagggatcctcccaccttggcctcccaaagcactggcgtgataggcatgagccccacacctggccctggtcctgcagcacatcccagctgcacacttaacctcatggaagaggaaggagaaaacagcttttccttgcccatggctaggtgcacagctgtggcccctactaacacgagagagattaacaaaagaaaatcatatacatttacccatattttacaagacaccagggccttcagaagagaaggcccaaagaaacagagaaatctgaatatttttaagcttaggttggtgaagagtggacagtgtggggaagtgtgattgcacaaacaggctatgatctaatggcaataaaccaggggaaacttacgaagaggtgtttgttcagatctatctctgaagtcttgtgtcttcagagataaggacgtttctttcctccaggtatcaacagggcacgtctcaaacgcaggtcctatgactgacctgcttcaggggagaagagcagggaacgtgagagatctttctgcctctgcctcttttctcaaatgccagggttctgaattttggggcggcatgtcctaaaccccaccactaacttggaagcccagggccaaaccaaatactttgcacttaattttacatagagtaataatacagcctttaaaaatgaatatctgagaaaaagaaaacttagtacttacttaactgggtcttttacaaaatgattccctagaactcttcaaaattacacccgtgaagtccgctggatcctctctgtggttttgtgttagactcatgctttgccttttaaagaacagggtccagtccttttgtgatttctagagctacaggcttggtgtgaaggccgggagtataagaggaaagtggagtgggaaccacaggaggggtgagttagccaccctcatgccccctcctcccccaacagatgcctcctatcatcaccaggcgaattccaatttcctgcctcaaaggatatcggcacagagctaacattttgtagggaaaatagaaccagtaaagagaaatgaataaaatcagaacgacactgatgaagaaagcccaaggagagttctagtcagccctcccggaagcctcgctcagcaggatggcaatagaagtggtttagagttgccttctgcacactgaactcactgagggatgttagccccagctctgcaggaggagataaccgctggctctacagcgcacccgggggacccacccaagtgatgtgccaggccccagactcctcccctggaggcaagagataaaccaaaacagagttcagggctgtccctggtggtggtgagaagaacatgttcactatgtggggagctgggaacatttactctgaaaagacaagagttggaggtaaacagaagcttcaaatatccaaagttctgtgtaggaaggttttaacttaatctacctgaccccaaaagggagaatagtgtccaaatgtgtggaaagttctggaagatgaatcctgttgtgctatgaggaagatatttccagcaatctgtaaagtccaacaacagcctgggttcagccaatactgaaagcatttccgtgtaactacttgggacaggtgttgaggaattgaagtgtcagatggtgctgcctactgtcctctaagctgccttccctctgggaggctctgcgatcctcccacagatcacctgccactgtgcctggccaggagccctacacccagcccaccctgctgtgatgcaagtgggcagcaggaagttgaggaaggagaacaaggcacgtgacggatggatggggtgcaccgaggaagaaaacaagggaggaatagagagggtgaaagtgtctccgtgaataacttccaactattgaagccactgtgctcagtaatagtcctatgcgatctcatccatcagctctctgacttagggataatggccctgttacaagaggtattagaacttgccctggtgacacggatacattagggccaggctgggctacagtccaggctctgctgctctgctgaccctcccctttgctcccactgcttttccatcttagctgcgtagaggacagatggcacccgtcactgtgagacaacctatttctatcatttttgtctcaggtagacgtcaccttagccaagcaggttgcatagacctcaatagaccagatattgatttctaaaatcatcctgcttaacaaatgacccaaaagcctacgttccattgaagatgggtctcactgcttctgccatgtcatcctctaagtacctgatgtctggcttgccatgggataggtaggattcatccatcctaacttcccaccctaactgcccccgtgtctttttgtgcagggggcccagaaggttagtctgggcacaactggccttcctcagtgccgtagaaagggtggtacactggggcaatatttatttacattgcagagaaacctgataagaggttgagaaatacttctgacattaattataatatattaccaggttatatggattaaatgatcagattacactccagtcatgcttctgaatatgtaagcacccccataaaagaagtgacaatttcccaagatacctggactcaaaccgtagggtgtctacccctcctctctgtggtttctttccctgagttgctcactgcccatgtggcttctctgtagggtctgtcaccttatgggattgattttatggcagctgtgctgtgactcgtgcatccacagaacaatgttgaatgactgtgtaaacgcattgctgtaagcaacctgaggtctgaacttctccttatctgattgttccctctaagtaatttgtagcaaatttcaacattgtttcccattggccagcaaagctcttctggcccttaccttgtgccccttgctcatgacgtgaagatctgatgtcttgacatgttaagtgagtcaaacccaagtgcacgtgtctgcaaatttcttgtaagaggcagtcaggagcatctcttggcccttggggtagagtaaagtttgacaacctctgtcactttttaactctttaactcgccctcctacagctctttgacggggaacaggtgcagacagagcagccttggcttccggctcatgcactcacgatgctggctgcgaatgggaagtccctaaacagaactgagccccctcattcagctcagagcaaacggggctggcagcagcccagggcaccacgaagcagagtgcctctgtgtgcccaacacagccgcagtggaggtcaatggatgtccttgccggcgccctgctttttgcttttttaagaaaataagaagcctgcagctgcggcaaggagaaagaccccgtgggtcgctccttttagactacgctattacacctgctgactatccaatagaaaaaagaaggagaaggaaaatcgggttaactttctggtatttagtttgcagatatgtcagcaggccaccttctctacttggcaggatcacgatgtattaagaatccttttgtccaccaggaaagacaaatttcctgtttgtcttgcatttagatgcaacaacatcatcctaaagagatgcccctgatgtgtgagagcagaaaggggtgatccctttcttccttatcctaaggctcacggccaacacccctataacaaaagacaggttaacaagagaaaagcatgacaaatttatttgatcacgttttacatgacacaggagccttcattcagaatgaagacccacagatacagggaaaactggatggcagtatagaactgtagttggacaaaaagggcagcagcccatgttcgcaggctgaggggaaaacccagcaaggcctgtctgttcagatccgtcttggcccctctgtgcagcactccttcctccaggcaccggggacaagactcctctggaatgcgggtctggatttctttacggcccactgttacacagaaaggcagcggggaagttacagtggtatttctaggctttctggctggctttggggagaaaagagtctggtttccacgagctgctttgaggaagaaggattctcagttctatggcttgccccgggggagaatgatgggtgagagaagagacaggagggcaggagaaggtcagagagagagactttgcttctgaggcctccaccttggggcatggatttctgagccccaacagaccttgacagaaaaatctaggacacaaagatagtggcttggacacacctgcctgcatttacacttgacctgtctgcgacgtaaacactttcctctttccctccagatgggttaaggggaaggacacttcagggttgaaacgcaggaataccagattggagcaaacactttttaaaagcagagttataaaatctggacaacatcaaaacaagcagccccagcatgcatcccgacggctcttgttgttggttggagaatgagcccagcagtcaggcttgcaacccacttcgaatctggaccagggttctgacacggatcctggttcacatcacgctgggccttgtggccaaacacgtgtgttttctccatagggccttgaagaaaagctggcggtgcgcatgagataggagtatattaagttcctggctgctcggggcactacgggaagattactgggctgtgatatgggccagcactcagattccctgcggtgggacacagagggcgggttgtttgtgctgctggcgtggagcaccgacaagcctgtggagaaccagttataataaacacgacaggcatcctgggagtgagctcagggcatttgggaagtgcagaaggacatgcacccccgctggaggggtgcacctttgaagtcagctggaccaaggaaaggccctgccctgaaggctggtcacttgcagaggtaaactcccctctttgacttctggccagggtttgtgctgagctggctgcagccgctctcagcctcgctccgggcacgtcgggcagcctcgggccctcctgcctgcaggatcatgcccaccaccgtggacgatgtcctggagcatggaggggagtttcactttttccagaagcaaatgtttttcctcttggctctgctctcggctaccttcgcgcccatctacgtgggcatcgtcttcctgggcttcacccctgaccaccgctgccggagccccggagtggccgagctgagtctgcgctgcggctggagtcctgcagaggaactgaactacacggtgccgggcccaggacctgcgggcgaagcctccccaagacagtgtaggcgctacgaggtggactggaaccagagcaccttcgactgcgtggaccccctggccagcctggacaccaacaggagccgcctgccactgggcccctgccgggacggctgggtgtacgagacgcctggctcgtccatcgtcaccgaggtaagagagtgagctcagggctcagatggagaagcaaatggtggagattttctcaaggaagcaagcagggaaggcccggctcttataaaccctgcctggacatctctttggcctgcatgtatcttacaaaatcctagtttccaaatgagaacatgcagcttctaatttgtctggagaataactggattagttaaaacgtcctcagatgctgacaataatgattctagtttgtgcatgtcccagcaataaggaacaggccaaagcatattaggactcctggaaatgttgccaagatagggatattgtggatcctcctctttttctggaagccttacctccccctctattcctccatcccgcagatgcccacacacacctgaaagcccgtggaactcaactgaactgtgcctgactgtgtgataggatgtgcttttctctcgatacctattttttctctttaatttcctcaaagtgttcatataaaatcatttggggctggagatcatgctatggcactattattttgttaaaaactacagatgacatcaaaagctatttgtgaagcctgattcca

SEQ ID NO: 10999 - DNA, 6000 bp, Homo sapiens
agcctgggcgacagcgagactccgtctcaaaaaaaaaaaaaaaaaaaaaaaaaatcacataccatgcaatgacagtaaaaatcatcccaagtttcataccacttgaactaatgtgctctattgtcacttggctatgaagaatacaagtgctaggtttcagtattggcatcgtattaccttgtcttttaaaatcaggttgtgaaactggtatctttttcaatttgttgccaatcagttatgcgttaattgatttgaattcagttccttctgttgtggtagatttgcttctgtatcgtatgatttcaagttgctcattgcctgaattcaggacagggtagtgggtggctttctggggccatctcaggcgggctgaattgacctgaagatggcaataagagaaaaaagccaagtaaatatcaagaacaatttttagcataaaattcagtgttaagattcattgagagctaatcaatagaaacgaaggttctgtaaatacatccatcttatgggaataacttaggtcataaccattgttggcaaaggaggaaatttttcttagttcctctgcactttccccaatgatattaatgttacacctctttgatcgtacttgaaatgattgtaataataacgagagccgtaagagtttgttggtcataaaaacatacaacattttaagaactttattgggtttttattgacatatataactattaaatataagattatagaccccaaatatcaaattaactttagcatttacaattttcctttgtctcctctaagcagccacaatttccaatgtagcacataatgaggtcatcatagttgcaaatctatatcttcatattgtataacttgagaacatttttaaactcagtgtataggtttgtgtggatgttgtatcaatgttcacaacacgaggcaagtggaaataaagcaaaaatactgttaatgtgtaataacattgtgctaacagaatgggcaatttgtaacaatgccatcagtgactccactatctagcacaacagttaatacatagtgtgtaagttcacatttcagataagtgatagttatcattttaagtaccaaaacttaggtttaaagaagtttctgagatatgcagaattctacctctcactgggctttgaaaatatgttactcctcaggactcaccgtgtcgtaagcatcactgattattgtttatgtctgttctaaattgcagaaacagtttcagaaacctaggttatttggtttttagtcctaatcttgttactgtaaaagtcacacgtgttcatccattgtagaaagttctccaaagtgcaatcacatataaagaagcaaataaaaatcatcctcaatctcactctccagaagtaatgattattaacagtttcatgatcttcatcacactgcattaagtttcccagagctgccatcacaaattagcacaaactgtgtgacttaaaacaacagaaatttattctcttacagttcacgaggccaggaatctaaaattaaggcatcagcagggttgggtccttctggaggctctcagagagtctgttccatgcgtctctcctggtttctggtgtttgccagcaatctttgattcatagacacatcattcccatctctacctccgccatcacatggccttattctatgtgtgtgtctttctgcatcctctcctctttttataaggacaccaggtattgggtctatagcccatcctaatccagaatgacttcgtctcagctgattaacatctgcaaagactctgtttctaaacaaattcatattgtgaggttctgggtgaacatgaatttgtgggggacactgggggacacttattcaacccactacacacactgtaatatatatttatagaatcacgaaaacgggaccataatttatataaagcttagttccctttacacttaagataccatgaatttccctaggtctttcaaacacagaattttaattttttgtagagtgtttcatcatatgaagattacatcatttccatagctaacctgctacttcaaacactcagatggtttccagactttactattataaatggctctgatgaatatacatgttcccaaatctttgaatttatctctgcttatgtccttggtataaattattctgagtcgaattattggattaaggggtatgaacattttaaaggctcatgaaaaatcttctttaattgaattccagagattgtatcaatttgccatcaccagcagaagagagaacccatggcattgcattctctgcactgcacgttctagctttttgagtgttggacaagtgactaggcaaagaaataacatccttactttgtgacttgtatttttatgtaaggttgcctctttgtttacggaccacttatatatcttttttaggttaccaatttatgatttgtgtctccttttcaatttttttctcctctctccaactgccagtatttatttcttaccatctcacggatgagtatactgtccacctccaccccttttagagtccactgttagctaagaaactatgtagatgtatcctccctctccttttcccattctcgaaccacctctgaatcttgtacaaatgtcaatcattgcctccattgtgtcttaactgtttacatttcgctttcccttctaagactttgagcactttggggccatttccatgtcttatctgtgtttttgtatcttcagcaactaacatggatgctcaataaacatacattgaactgagttgttacgttgtgacctggaaatattcacaattccttgtatagatagaaatagctaaataagggcacataaggatagactctaaatggcactcaataatgtgcatagggctgggcgtggtgactccctgcctgtaatcacagcactttgggaggtggaggtggatcacctgaggtcaggagttagagaccagcctgggcaacatggtgaaacttcgtctcaaccaaaaacacaaaaaatcagctgggtgtggtagtgtatgtctgtaatcccagctatttgggaggctgcagcacgagaattgcttgaacacaggaggtggaggttgcagtgagctgagatcgtatcattgcactccagcctgggcaacagagcaagactctgtctcaaaaaaaaaagcataggatttaatccatgaattttgaatttctatgttaaatttttagaaatagtaactttttctcccatatttctcagctatatctgagataactgggactgagcaacattgtctagacaggcaaagtgttagcaataataagtataataataattgtaatgtaataatggaatgaggatgttaaagtactgagatcaggataaaagttacaattgtccaaattttaaatttcctatcatttccactgaaatcactgactgtacttataacattatcaggaatttatgcaatttgtaggttttgaaataaattaccattcagaattcaaccgtgaaaaacagtgtaactctacttgaaaaacactttgaaaaactcaagtttccaccaaatctagaagcacatgggtcgtaaaacatagttcgaaaagttacgagagatgatgactacaaggaactttttataaaaatcttttataagcattactctgtggtcaaatttattttcacatggatattaaaacaagttattgctacaaatgggtttctgttctgatcctttttttgtttgcctcacatatcctttctcttccaccacattctgcttcactctccccgtctctcatcacagacaagaaaaatgccacctcccataggacccactccaaaccctgtttcctgaatgatcaatgccttcccccatcgcaatcaaaaaagcactttctattctgtcttcatgacacactggttttgacacttgcatagctgttagtaattctgcaatgtgcttgggctatttgtgagcacatgtatttttcctttatagattataaacatctaaagaacaaggttaacccaggagtcaagtaaatagttaaatattattttgacaatggctgtaatagtggacatttgaaaggaatacacctcagtattttgaaattgaaataattttctagatcctggcatttctggactttcaacagcccaccctttttaaaaattgtgaagacacttttactataaaggtctgcccagaccctctctgatacacctgtgtaaatgccacgtgcatgtgagcatgcgacagtacgtgtgtgcacgcctgtgcagtggtaatcaaccatggtgctaaggtttgaaaacagaaaatacatcaatcgacctccaagcttctttcatcccacttcataacatctcaatctcttgagtgctgaggcttattttgtttaagatgatttggactcttctgagtgcaacgcaatctccttccagcacagcggaccgaggagaggtgaggggagagttttgagggtgggcatattgatcctacgcttgctgaattaaaaatgagccaactgaggacaatttccaggttgcaacacagacggagccggagtctgggttgaggttagaggagccgttagggcgcagggatgcaacaggatttgggagaaaggggagagaaagcaaggccacttccagggggctttcattttttttttatcctggcagcttcccgagccagatttcaaaagcgatttcaaacgtgaagccaactgaagcactgccttacactaattggaaggggaagggagtgactcatattacaccagctcgctcttccctctcggcaactgctaacttgtagctttaaaaggaagtgacatgggtggggagagacgtcagctgaggaccactttttttttttttttcttcctgaagggtccaccccatgggtggagtctcgctttttctttccagtgttggctgacttacagctcttataaactagtggcaatttctgaacccagccggctccatctcagcttctggtttctaagtccatgtgccaaaggctgccaggaaggaggtatgtggtcctggtgccgttcgcaggcaccttccccgctgggtgtggctgatgtttgcattcctcttcccagcatatttttctctcctgggctggatttccttaggacctctggaaggggtaggctccgggggcggggggggagtgcaaggcgggcgggggaaaggtgcagggggcgcctggagggaggcgaagagaggctctgctggtacaaaaggaccctcgctttgtgctgggccgggtgagcgtccctttctgggctgtgatttcaagctgctgttcctggcttcatttacccacccacccagccccctcccggggctaaagcattttctctgctatagacgaagctgggcggggggtggtggtggggggaatgttcctattacatattgctctcttttgtgtcatgcaacatgttcttccgtcgctgacgtttctatggcaaccacaaaaatactacacaatatgcagccccgatatacattgatttatttgtattttgtgtctagtttgcagctttctgctctgcttcttgctttggtttgctaaaatccagcatggcttgtggctacccctcctcactttcattttggtttttccctatcacaggaggggtgggggaggggagttgtcaaggaaacaggcattggtaattacctctctatttacctaattttcggcctatgaatttctccatatcgaggaattaaaaaaagaatgctttgatgtttatgtaagtcttcagtgtctggtctttttttagaaaacctaaacacttcttaagataagatattgatcctgtggtcaagctaagggggaattaattccttacaggaggtgagatcattgaaataaagttttagagagcattggagaattcgcactgataaatgtgatattgcctgcccaggtttgcctaaaagcttaaatatttaaaagatgggtctttgctctcat

SEQ ID NO: 11000 - DNA, 6000 bp, Homo sapiens; identical to SEQ ID NO: 1200

SEQ ID NO: 11001 - DNA, 6000 bp, Homo sapiens
tccccctcgtagcctcttcttccccacagctttccatccaggtctggaattagctctgacttctctagaagccctgagctgagcacgttaggtgccctacctccagaatcctcccagcatggcctggagattgctgttgtcttgactctagacttgaaaaaccaaggccgggcgctgtggctcatgcctgtaatcccagcactttgggaggccggggtgggcggatcacgaggtcaggagatcgagaccatcctggctaacacggtgaaaccccgtctctattaaaaatacaaaaaaattagccgggcttggtggtgggcgcctgtagtcccagctactcgggaggctgaggcaggagaatggcctgaacccgggaggcggagcttgcagtgagccgagatcgcgccactgcactccagcctgggtgacagagcgagactctgtctcaaaaaaaaaaaaaaaaaaaaaccaagactaagaggtgtggtgatctggctaggaaggaagccacagttgggagttggaggctctaagtaacagcagagccccttacagcctgcgagatccatgctggatcttggtttgtttttcaacaaacgggtgttgttttctcaaattcactccaagaggaagctgtgattataaatcaaatgacttattcaacggctccaagcctgttaagagtggccttggtccacggaaactttctgacacataatccagggctttttttttttttttttagacggagtttcgctcttgttgcctgggctggagtgcgatggcacgatctcggctcaccgcaaccttcgcctcccggggttcaagcgattctcctgcctcagcctcctgagtagctggaattaacaggcatgcgccaccacgcccggctaattttgtattttcagtagagacagggtttctccatgttggtcaggctggtctctaactcaatccagggctctttttaaccatactatttaagccctgttgctggaagcctgtggttataacctatgcttaaaaagaaatagtgatgaggataaagcagggtaccgaacttgtcaagagaaaacacataaataagaaagagcaggcagagaggaggacaggaaaaggttgtctttttgaaaaaggacaaaatgatacaaaaattagccaggcatggtggtgcatacctgtaagcccagctacttgggaggctgaggcaggagaatcacttgaacctgggaggccgaggttgcaatgagctgagattgtgccgttgcactccagcctgagtcacaaaagcaaaactctgtcccccaccccccaaaaaaaagaaaaggaaagaaagaaaagaaaaaggacaaaatgtgttgcccttcagattaaaaaccagtttaatccaagctgttcttcctctgagactgcatcaggctttcacagacactgagaaagtttccatcggcccacccccccggtttctaatttgggcacacaggtgatgtcatggtaaaatgaatatgtgaaaagtgctttgggcatcatatggtccatgaataattaaggtgaggatgatgggattcttgtctgtagaaaggaacccctttttttctgcttctctttctacagtcagttattgagattaaactctaagtgcagtgtcttagtgcaatgaaaattagtttacatcctggagagtgagaatttataagagtatgtgttatggagaaataagcaattagtgattgaacataatatacaccctgccagttattgagcaaccaaactataagtctttgctggttcccaatttgttcagaactctttatttatcccacctgatcagtgcctccgacttagaattggggggtattaattttgatctgaaattcaacctgggatgaacaatctcgcgtccttttggtcactccctgattaccatctcctcccattatatcacacaaacgcaagagcctagagcccagaattgaggagagtgattactgatagattgtacaagggcattgggaaagctggagggtctggaagaccagcgtgtcccatgtgcctaccaaaataaaatgcaccagctggcactgggttgatgaaaaaggaaataggttcatattaattctttttttaaatgtctagcattgtcaaagatactattttacagaatcataaatattccagagctcaaaatcaagggaccgtcttagcattacaggtaaggtacaagtaaagacgtatgaactttgcttgtacttgcagcagagcacaaaatacaagtgttcgttaccctgcaactaaatccagtgagttgtaaattcgaagagcaggcaaataattcaagatgcttctatgtctgcaatgtctggagggatagaactaggccaagaatgaggtaagagtcaaacaaacacctgatgtaattgtctggataaattaggagaaaatatggtaaaaattacttgactagtttagataagcataattcagcattgacattttcatttaatcattcctatagtatttcatttgatatggacagggtctaaagagacgttaaaagtcaactaaaaattagagaaattttagtcatttcagaaaagattgattttgtatgcgttctgtattgaagaagtgatttgttcaaaagaattctggatagacgcatgaaagatagttaagaaaatagatatttgggttgattaaattctattttgggggccctataggcacaactgggtgtacctgagtcacgctgtagaatctgattccagaagcaactgagaactgactcactgtgttctagagaattttccctgtgtcctttcttgtcatcatttcctgtgttcctgacaccgtgaaatggggttggctgccgtctcaatgtgttcgcttttagctgggttagcggaaaaatcaacaggaataactccaggttctaaagtagtgattgtgaagataatacccaaggcacaccaagaagcactatggaaaatgttattgtataatagtaagtgcagaatgcaggatttaagcttgcatcttcctgcgttcttttttttttattagagatggggcctggctgtgttgcctaggcaggtctcaaactcctggcctcgagctcctcccgccttggcctcccaaaagtgctgagattacaggcgtgagccactgcacccagcctcccctgtgttcttgataaaataagaatgtgtatttcctataggcaagaggtaaatgaaagtacaggacgtggaaacattgtgtttagaaactatctacgatattatgtcgtctttgtgattaagaaaatgagccaggtgcagtggctcacagctgtcatcctaaagctttgggaccctgaggtaggaggatagcttgaggagttcaagaccagcctgggcaacacagtaagacccccatctctacaaaagagtaaattaattaattaattacatttaataaaagttagaagatacattggaaaaattaggtttattgactgtaccacattcacagatacaaatatatatctcctacaaatcagtattacctggaatttctcactaatgtgatcagggaagcagggaaatgaaaacttgagcattcaatcaataaatagttgattgtgcggtggctcgcgcctgtaatcccagcactttgggaggccgaggcgggtggatcacctgaggtcaggcgtttgaaaccagcctgctcaaaaatggtgaaaccccgtctctactaaaaatacaaaaattagccaggcatggtggcaggtgtctgtaattccagctacttgggaggctgaggcaggagaatcgcttgaacctgggaggcagagatttcagtgagccgagatcgtgccattgcactccagcctgggcaacgagagcgaaactccgtttcaataaataaataaaataaaataaaaagttgcttgtctactacatacagacaatgctaggagccagaaacatgaggaatacatgagctcggcgccaatggaacatgctttcacaccgggtgcagctaaccaccacatcatacaaaactcgtcgctgacgttttagatgtataatctgattggcatggactcacagaggagggagtaagggaagagtaagaagatttcaaaggagaggtaattgtgtcatttattagaagtatgagtgtggggtaagagatacgtgtgtatgcatgcgtgtgtgtgaacggacttcttgtttagtaccattttgctgctgctttaccaccccaatctgttcctggacacggcgatggactctgtatatgttatctcattttattctcacaattgacctctggtggtaaaattattctcattttttacagattaaaaaaaaagcctcctttaaagcatttgtaaatctggacataagagcctctctcctaaaattcaagactgagatgctcttctctccttcctctaagcatcagggttctctgtctgcatcctatgcggaccagggcaaaataaacttgaaattcactatgttagcctgtatgcaattttgggtgatgatgggctattggtcgttttgttgttttaaaaaaagaagttagcctttattcatccgagtgccacagtcactttgtgcagtaagttaggtggtgaggtaagcttgctaattaatgggcattttaaaggactttacccagcagcagacaaaattaagccctggaaagaatttagcccagtagccagtcatatgccatgtcgtatagcatacccagccaatggggagagcgaggtgtggctgtggaaaaagacagggttaagcaatttttttaaagcactacatatttattgatagaatatctctccaggcagtattcacatgctttaaactgaagctcgtagcttggcagtgcagtttaagcaaataaactcaggctgttgaacacaatgattaacaggaagcaggggaggggacatagttactagactctggccgggacaagaggctgaggttaaggtcttagagccgatgacttgcagaatggtcacctcacccacttgtaatttcatggtgggaacaggtggaccccctggaatcagaacctctctgaggacatctgtttttgtgtagacacaggttgcaggttagcaggagaacaggcaagccaaatgcaaaggagccacttcagaaatgtgtcacagaaaagtgaaaatgcaacctagtggtaagtgaagaggggaagaagaaagaaaaaggaccagaaccgtgaactgaagggacagggaacagccagacgagagcttcagccatcacgaggatgatttcggaacctggagaaaatgtaagttaaatatatctacactctgatcctatctcaagagagagatattttactcatttcctggttgtgaatgatgggctcttggaagcactgtctttttagcgcgtctcttatctctgccctgatttttgtatttgtttacaatactgagttatgggagaataaacgttttctgagggcagctctgtccaatgcttcactgttagcagaagcctgtcatcagatttttgaggggaaagttttttacccaacagaaaatgcattgaaaactacccttgatgaagctacctgctatgagtacatggttcgaagccactatgtaacagaaacactctctgaagaagaggctgggttccctttagcttacacagtgaccatccacaaagacttcggcacttttgagaggctcttcagggcgatttatatgccccaaaatgtctactgtgtgcacctggatcagaaggcgacggatgcctttaaaggtgcagtgaaacagttactcagctgcttcccaaatgcttttctggcttccaagaaggagtcggttgtctatggggggatctccaggctccaggctgacctgaactgcctggaagaccttgtggcctctgaagttccctggaagtatgtcatcaacacctgcgggcaagactttcccctgaaaaccaacagggaaatagttca

SEQ ID NO: 11002 - DNA, 6000 bp, Homo sapiens
gtggctcacacctgtaatcccgacacttgtgggaggcccaggcaggcagattgcttgaggctgggagtgtgggaccagcctggccaacatggtgaaccactgtctctactaaaaacacaaaaaatagccaggcatggtgccacacatctgtaatctcagccgctcaggaggctgagcaggaaaatcacttgaacctgagaggcaaaggttgcagtgagctgagatcatgccactgcactccagcctgggcaactgttagaaatgcttgttccccagcaccacaaaatagcactcaaacataaatttaattctctcagcaaggccattttcacttcctgcagaaagggtgcttctcacagatggaacaacggcaatagcacacttgaacaaaggaaaagcagagggtttacacatttgggtcctccttactgctgtgtcctgcatgcattgactggtgctggacctcggtcttaaatttccaatttgctaacaacctgaaactttcctaaatagttaggtgcaagggaggataaaggagactaagttgcttatgaaaggtttaaggaaataataacatttccaaataaggaaggggcataaaatatgagctgagacttgcttgggcctgtccagacatgcctgaataagccaaagcaactaactgggctaaatcgtaagaactaacagttgatagcaggctttggagtaagatgtgattattcctggtgtctatttttaaaccaagacaaggtttgaagagaagcttttctactttctacaacagcaaaactccatctcaaaaaaaaaaaaaaaagcaaaaaccatgctacaaaggccagcaaagcagctcatgcctctaatcccagcactttgggagactgaggtgggcagatgagattaagagtttgagaccagctgggccaacatggtgaaaccccattgtgtctggactttgtgggttcgtcttgctgacttcaagaataaagccacagaccctcatgattgaatgttacaactgttaaagatggtgggtccaaagtttgttccttccgacattcagacattatctagtttcttcctactggtgggttcacggtctcactgatttcaggaatgaagctgcaggcctttgcagtgagtgttacacctcttagaggtggcacatctgcagttacttgttctttctggtgggtttgtgctctctgctagcctcagcaataaaaccaccaacctctgcagtcagtgctacagttcataaaggtggcacatccagtttttcatctgctttcagtgggtttgtggtctcactagcttcagaagcaaaactgtagccttatcacggtgagtattaaaactcataaacattgcacggatctaaagaactatcagcaccaacatttattgcaaaaagcaaaagaacaaagctctgtcagcccaagaaaacacccaagcacgtttcccctactggctgtgggtggccagtttttattccctaatctggccacacccacatccagctgattggtccattttacagagtgccgattggtgcatttgcaaacctttagctagacacagagtgctgattggtgcgtttacaatcctttggctagatacaaaagttctccaagtcctgaccagattagctagacacagagcgctgattggtgcgtttacaaacctttagctagacaaaaaactgctgactggtgcatttacaatcctttagctagacacaaaagttttccaagtccccacccgtcccagaagcccagcgggcttcacctctcgctgggagttgggtgggactttttggcaactagcctgggcactccgggagctcctcccacacaaccaagaggaaaagaggaggagagagacagagacccgccatcgtggccaacgaccccgccaagagggaacggcggtccacgcactggacccagcctccgatcaagcccagcaggggccggcaggtcgcgccaagtgcggggcccaccgagcctgcgcccacctggaacccggggcagcgcagccccagtccccgcctgcgcctctccctccacgcctccccacgagcagatggagccggctccggtctcggccagccccagggagggccccgcacagcgcagcggcgggctgaagggctcctcgagcctggccgatgctaaggaggcaccgagagcaagcgaaggctgctagtgagaggtgacgacgtgctggcagtcctcagagccctcgctctcggcgcctcctcttcctgggctcccactttggaggcacttgagccctttagcccaccgctgcactgtgggaacccctttctgggctggccaaggccagagctggctccctcagcttgcagggaggtgtggaggaagaggcgcgagcggaaaccagggctgcgcgcggcgcttccgcgccagttggagttccgggtgggcgtgggcttggcgggccccgcactcggagcagccggccggccggccctgggcaatgaggggcttggcacccaggccagcggctgcagagggtgtactgggtcccccagcagtgccagcccaccggcgctgcgttggatttctcgcggggccttagctgccttccgacggggcagggctcggaacctgcagcccgccatgcctgagcctcccaccacctccgtgggctcctgtagggcccgagcctccctgatgagcaccaccccctgctccacagggcccagtcccatcaaccacccaagagctgagaagtgtgggcgcagggcgcaggactggaaggcagctccacctgcagccctggtgtgggatccactgggtgaagccagctgggttaagtctggtggggaggtggagaacctttatgtttagctcagggattgtaaatacaccaattggcactctatatctagctcaaggtttgtaaacacaccaatcagccccctgtgtctggctcagggtttgtgaatgcaccaatggacactgtatctagctactctggtggggaccgtggagaacctttatgtctagcttagggattgtaaatacaccaatcggcactctgtatctagctcaaggtttgtaaacacaccagtcagcaccgtgtgtctagctcagggtttgtgaatgcaccaatccacactctgtatctagctactctggcaggaccttggagaacctttgtgtggacactctatagctaatctggtggggacgtggagaacttttgtatctagctcagggattgtaaacgcaccaatcagcaccctgtcaaaacagaccactcggctctaccaatcagcaggatgtgggtggggccagataagagaataaaagcaggctgcccaagccagtagttgtaacgcacttgggttttcttctatgtggaggaggctttgttctttctctttttctttttgcaacaaatattgctgttgctcggtgcttaggtcctgtgttgtctttacaagtggtaacgctcactgcgaagatttgcagttttgctcccaaagctacgaagaccacgatcccaccggaaagaacaaacatattccagacgcactgccttaagagctttaacattcgttatagaagtctgtagctttgctccttgagccagtccaaagctagggagaccacgatcccaccgggaagaacaaacaattccagacacactgccttaagagctttaacatccaccacagaggtctgtagctttgctcgttgagccagtgagacagcaaacccaccagcagaaaaactccctgaatacttctaaacatcggaagaaaaactctagagacactgcttttaagaactaacactcatcgcgagggtctgcagctttctcaagtcagaccaagaagccatcaattttgaacacactggcacgttgtgatctctcactatctccactaaaaataacaaaaattagcctggcagccaggggtggtggtacaggcctataatcccagctactcaggcagctgaggcaggagaatcagttgaacatgggagtcagaggtagtggtgagacaagatcatacgctgcactccagcctgggcaatagagtgagactccacataaaaaaaaaaaaaacttggctggaattcgctttattcactgacaattatattggtcagatttgtgtatgttgatacttgtaggggatggagagggagaagtcaacgatgacagcaaattttagtgtagagcaactaagagaatggtggtgcaggaaacggaataggagtgactccaagtgggaatggagataatatgctgtggatattttgggtccacagagctgggtaaaaatcaggtttaacttactccccatccccctttaagatgcttctcaagcagcctcactccctaaaacaaacggatatttggctttgagccacattattctgcagcccccgtattttcttccaggcaggcccttcctggtgtagacaagatcgggcttgagtgacactcctccctgatggcctgcatctggtttataccctgtaacttgttcctctattaatggggtccttcaaaatccagcctcagattccctggtcccgcagcggtggcctcacctctggcgtggccgagctcacgtggtccggcttgtgcaagtcccaggtccaactccgggtctcctgcttttggccactcaggattggacctgggactgatactggtcggccctgcaggcgctgcggacaggggaagcacagagattccccgccgcgttccctggactcaggagctcgccgcgatgccccgccccactctccacccgctgaatgcagggcgcatgctgctacttggcggctcaagccccgcccgcaccgtccccattctctgaccgcccctctcccggtacactgcgcaggcacaacagagccgctcccctctcctcgccccgccaccgggacggagagcgcccgccgctgcatttccggcgacacctcgcagtcattcctgcggcttgcgcgcccttgtagacagccggggccttcgtgagaccggtgcgagtatttggggattattcttattttctgccacttttaacttttagggattatttaggagtttcacggccgtctgcttttcgtccccccgattcagcgggccttcaggccgtgtggtcggtgcttttctcgttgggtattttctgcttttaaaagaagttgtggatgcgcggagcccctgggctcctgaggcaaaggcttacccatgtagcatagtgttgcctcgtttcttggtgattttcttgctccatctctttaaaagcctcccttactcggtgccgtctcgagttaagaactgtgggcaagatcccaagcccgctgcccttccctgttttatggaaacttaattctttttttttttttttttgtccttgagggagggacttgctctgtcgcccatgcttgagtgcagttgcctgaatatgtctcattgcagcctctgcctcctgggctcaagccatcctcccacttcagcctcccaagtagctgggatttacagtcgcatatcaccatgcgcgattaatttttttatattttttagtagacaatgggtttcactatgttggccaggctggtcttgaactcctaaccccaggtgatccgcccgcctcggcctcctaaagtactgggatgacaggcgtcagccactgcgcttggcctaattctttaaacagaataaacggggtatgcattgctttcatcttttggctcactggacacaggatactttctgtaagaaaatagaagctgtttttccaagggtgtagtgtcacatgtgaatatgaccactgtttccgtatattttatcctctcctactactgccctcctaacaagaactgtgagttggacgcagaagtttctaaaaaagttgagctttgaaattggctgttgcagcagggatgaaaagcaacacccctacctcccctcaaaagagacattaaagtagttggattaagggcacgggagtat

SEQ ID NO: 11003 - DNA, 6000 bp, Homo sapiens
agtctcaaaacagaattcttcatgggacatttaactgaaaggcttaaactggcttaagtctattttaagacacggggtctctgtcaccttttgcagtggcatgattatagcttcctgcagctttgaactcctgggctcaagcaatcctcctgcctcagcctcctgagtagctgtgactacaggcatccaccatcacacccagctaatcttattttttttgtagagactgggtttcatcatgttggtcaggctggtttcgaactcctgacctcaagtgatctgcttgccttggcctcccaaaatattgggattacagacatgagccactgcgcccagccagagggtgtttttttaatgtggcatttgaaaataaaaagttggaatatacatttgtttttgggagtattcaatacttttaaggaagattaatatgtttgtgaaatacaggggaaagcttttagtacaagttaagtatagataaatcttagtttttaaaacataggcagattttattagatgtgttaagtagtaagtagaacatgtgttagacacagaaaggaatagaaagtccaggatacctaacattcctagctaccaagtatacatgagacacctgagcatgaaatatttgatacattaaatgtccaagaggcactaaatacagtgcataaaatatacataagcatgaaatagtcatgctattcacttctgtccccaagtgtcctctgtccaagaaacacagtaaaacccatggttgctccacaggccaacaggcaaagctcagctctttgctaggcttgcttgtacctgcatctcggacagagcaagtttgtgtcattggcgtggggcaccttgcctctttgagtctccttgctcaaacctgtcgtcttcagcaccacgatccacaggaaagtcaatatcacagagaggggtggaggttggggcaggtgggggatggtggcccctgaacattgtatgaggtaggctttaggtagcaggcatcttccaccagatttgcaccgtctcttgacagcgtttacttatcccatctctttcctcttgcttttcactgtctctttaaattgatttaaataaactaagagattcaagcattttaatttgatctgtgagcttttctgctcactgatctctgaggtagtatacctggaggccatcgcatttcccacatgataacaattcatatcaaaatacggaatccatttggggaagtcaggtagattgcttcccttttcttcctgagaatggatagtctgcatatagtcttagccgtccatgtgttgaatgatcaacttttctatttatgtagaacaggttttaatcacacatacactccttcctgatacaattccccatgtgtaagcatccatctccaccttccttgctccattgtttatccgacagccatgaagtgagtgctcaccatgtgtgccaggtgctatcctagattctgagggctaaaaggaaaaacacaacccttctgaaagacacagctttggtaaataaattaacatattgaatgcaatggcctggggcagtcatgggcagcttgactgattagtgaaatgttgagtttttgaatgacacagggcccatgatgtcaactcaatttttcatttttcttttcttttttttggaaatggagtctccctctgtcacccaggctggagtgcagtagagtgatctcggcttactacaacctctgcctcctaggttcaagcgattcttccatctcagcctcctgagtagctgggattacaggcgtgcaccatcacacccggctatttttttttttttgtattgttagtagagacagcgtttcaccatgttggccaggctagtctcgaactcctgacctcaggtgatccatgtgcctcagcctcccaaagtgatgggattacaggcgtgagccaccgctcacagcctatttcagattttaaaagactcttcactgcaagaaacaaatgcaactctggatgtcctaagcttcaacagaggacgtgggggtaagtacatgagaaggacacaggtgtatctggctgaggccaaggcaggaagaaccagagccagggtacagccagggcaaactgtacatgtggcctttgttctcctgtctgccgaccacccctctcatttctcactccacatctacttgtccattcaacacatgtttactgagtactggttatgggccaggcactgtgctaaatgctgcataaatatcatcactcccatgaaacaaacatgcaaaaaagggggaggtaggctctacgatgattaagccagttacagagcaggttagcagggaattgtcatggaaggaaagatgctgtcgggggaaatgcagatgagttgaagttttaaatcaggtgattagggaaggtctctctgagaagtgacatttgcgtaaagacagaaaggaggagagggcgtgaaccaggagattgtctggggaggcgttccaggcagatgaagcagctgagggcaagaaggaaacacaagtgagggggaaagagaagatgctgatgtcagggaggaggatgtgtggggctttgcaaagcactgcctgagaaaaggggtgccaccagagggttttggggagagaaatggcacagtcagacttctaacccaagtgctctggtcactgtgttgagaacagactaagagacagaaaaaagactcttcactgcaagaaacaaatgcagagttaggacagctctgccatttgctgtgtgaccttgtagtctgtgcctcaatttcttccatgtgtaaagcaggagataatcatagtcgtcactgcacagagttggtatgaagtgtaagttagttaacatatgtaaagcgcttccaacagtggcagataataagaactgcatatgcttctgctaatatttttatggctccaatgaatatgatccagaagtagatggcagataggttaggttaagaaaataggcggttttttttttatgatttcatttatttcttggggaaagagttattgaccttgctcttcaaacaaacctataaaatactcccaaagatgtagaaattggtattgtagacacttgatagacatgaattacctgggcagactgcaacttgggatttgtttttgacgtttttgttcagggacttcttaatttgtaaagtcaacacattcaggctccaaaaatgctaaactaatgcttacattgaagctcaattccctttcttcatgagctcttgtgttgtgggagatgatctctactgctcttgctgtgtgagtacacacctgtgtgtgtacctgtgtttgtctaccagacacaattcttactcaaagcctctttgtgggaaaaacaaaacaaaacacccaaacctactgataggcctcagtgaccaaagactagaaacttaacattccctgacataattttgattacacccttttgacacatttgtgttccagggttccgataattcagtgggcccccagtgaagagctaagctatctcctaacaacgttaatgccaactagaaatattcccaaacacaaatcattgattgttttactctggtactaattgaaatagagcagaaaccaatttctttaatttattttatgacatgttttgatggactttacctacacagaagagctatgtgttctggttgaggaacgacactgcaagaagcagcatatggtagaattaaggacgcaggctttgacattagaccttactttaaataatagctctaccagtgaccaggactgtaggtaatttaattctctgaggttcagcctcttcaagtataaggtggggaagggctcgaggatcatggtggatgatcctaattaaggtttgaggcttgcacctgcatagggaagaatgagtccctaaagccattccctgctggttaagacaagtctcattaattgttcaggaaagtcttcaattaaattgaaggtctggcatactgcaattcctgcaagttcttagttattatcagctctggctggttagaagcagctatgataaacacgggcttcaatttagctatctggaaggtaggtgctgctgcaagtggaaagtttgtctttaagaatatgcgctgcaatttgctttattcactgatgattatattgatcggagttgtctatgttgatacttgtaggggatgaaggagagggagaagtcaacgatgacagcaaattttagtgtagagcaactgagcgaatggtggtgcaggaaacacagaagaggagcggctcggaagtgggaatggagataacatcatactgtggacattcggaatccacagagctgcgtggaaatcagatttaacttgctctctctccccatttaagatgcttctcaagtagcctcactccctaaaacaaacggatatttggcattgcgccacattattctgcagctgccatattttcttgcaggtggaaggcaggcccttcctggtgtaaacaaacaagatcgggccagagtgacaatcctccctgatggcccgcacctggtttataccctctattaatggggtccttcaaaatcatcagatgccctcctcccgcagcggtggcctccacctctggcctggcccagcttacgtggtccagcttgtgcaagatccaattccaactccgggtttccggcttttggccactcaggattggacctgggactggagctggtcggccctgcaggtgctgggcctggggactgaggaagcacagagattccccgcccggttccccgccaacggcgctagccgcgatgccccgcctcactccccgcccccgggatgcagggcgcgtgctggtaatccgcggctcaagccccgcccccactgtccccattctccgctcacctctctccaaggacactgcgcacgcgccacgacgtcccgcctttctccccgccctgccgcggccccggggcgcagcgcgcacgcaatcgcgtttccggagagacctggctgctgtgtcccgcggcttgcgctccgtagtggactccgcgggccttcggcaggtcggtgcaggtctttggagagtattgtttttattttctgccacttttaacttttagggattatttaggagtttcacggccgtctgcttttcgtccccccgattcagcgggcctttatgccgtgtggtcggtgcttttctccttgggtattttctgcttgtcttaaaagaggctgtggatgctcggagcacctgagctcctgaggcaaaggcttacccttgtagcatagtgttgcctcgtttcctggtggttttgttgctccagctctttaaaagcctcccttactcagtgccgcctcgagttaagaactgtgggcaagatcccaagcccgctgcccttccccgttttatgggaaattaattctttctttttttggggggtggggaggggttctcgctgtgtcgcccagcctggagtgcagtagcctgaatatgtcttattgcagcctctgcctcctgggctcaagccatcctcccacctcagcctcccaagtagctgggattacaggtgcatgccatcatgcccgatttgtgtgtgtgtgtgtgtgttttaatagaatatgggtttcaccatgttgaccaagctgttctcgaactcctaacctcaggtaatccgcctgcctgggcctcccaaagtactgggattacaggcgtgagccactttgcctggcctaattctttaaacagaataaacggcgtatgcattgctttccatcttgttaggttcactgcatacagaatacttttctgtaagaaaataggagctgtttttccaagggtgcaatgtcacatgtgattctgacttgagtttccgtgtattttaccctccccttctgccctcctaacgagaactgtgagttggatgcagaagtttctaaaaaaaaaaattgagtattgaaattggctgttgcatcagtgaagaaaagcaacatccctaccacccctcaaaagagacatta

SEQ ID NO: 11004 - DNA, 6000 bp, Homo sapiens
aaatagtatgcatgacttccaaaccagtagagagaacaccacagaatatatatttctatttttattttattttttgagaccaagtctggctctgttgcccaggctggagtgcagtggtacaatctcggctcactgcaacctccgcctcctgggttcaagtgattctcatgcctcagcctcctgagtagctgggattacaggcacgcaccaccacacccagctaaatttatttatttatttatttatagtagagatgggttttactatgttgttcaggctagtttcaaactcctgacctcatgtgacccacccgcctcggcctcccaaagtgctgggattacaggcataagccaccatgcccgggctaaaatatttttattaatggtcaataaaaagatgcaagaaaggaagaggcagagaaaaatctggttaagcataaagcgtaaaacaaaatgaccaaaataaatcctaatgtagcagaattcacaaagtaataaaattaaaccctcagttagcaagatagattgtcagtcatactggatagaagaaaatctaacaatatactttaaaaaggacacaatagaatgtaaggaaaaagaaatgttgaatgtaaaagtattgaaaacgccagcaagaaattaacccagagaaaagaagaggcagaggatggtaatattaagagtaaacaggctgggcatgatggttcacgcctgtaatcccagcactttgggaggctgaggtgggcggatcatgaggttaggagttcgagatcagcctaccaacatggtgaaatcccatctctactaaaaatacaagaattagccaggcatggtgacgggtgcctgtaattccagctacttgggaggctgaggcagagaattgcttaacctgggaggtggaggttgcagtgagccgagatcccgccactgcactccagcctgggcgacagagcgagactccgtctcaaaaaaaaaaaaaaaaaaaaaaaagtcaaataaatgaagagaaaaaggaacaattcattggaaaaacataacttccagacactaaaacatagcatcaaattataccaagccaaaaaaatgataaaatttcagagataaacagacaattctgtagtcatgggagagaatttaacacatctctttcaataattgatagttcatgattacagaagggatatagaagatctgagcaacaccatgagcaaaatcaaaaagatctttctttccgagtacatgccactcttaccaaaagatcacatatgaggctacaaagcaatccttgatattgcaacaaagaatcatacagactgttcttgagcaacctcaactgttagacaccagtagcaaaatgaaaagcaagccatatattgggaaatttttttaaaaaaaccctctaaataattcataattcaacaagtgacttaatggagagtctaagaacacattgttaacattaataagaaaggaaatttctactcactggctatggacacctagaaaaatagagtttaaaaaatatatatgtgaaagtagcaacacaatgtgaaggtatccaggaagaaatctatcaaaagatgtgaaaaacctatatatatataattttaaaaattcttgaagacctaaataaatggaaagatacacaatatgggatgaatttgtagaactgacttctaaagatgttgattttaggagatttataaattgaatatattcctactaaaattcaaatcaagttttttgaggttcacaaattgatataatatgtataaggtagaacaaagaaccaagaatgccagaacattttttttttttttggatacacagtcttgctctgtcacccagtctggagtgcagtggcacaatctcggctcactgcagcgtggacctcctgggcttaagcgatcctcctgcctcagcctcctgagtagctgggaccacaggtgcaagccaccatgcccggctattttctgtatttgttatttttttgcatttttagtaaagaccaggttcaccatgttgcccaggccagtcttgaactcctaatctcaagtgatccgtccacctgggccttccaaagtgctgggattacaggcgtgagccactgcacccagccaccagaacgattttgaagacgaagttcaacatgtgaggactcacttccaccacagcaagacttaattaaattatagtaataagaaagtgtgatattagcacaaagagaggcagaatagagtctagaaacaggcccactcatatgtagaaatttgtataaagcacagatgtcattttaaatcagtagggaaagaaggacttttagcaagcagcattggaaaaaatggttatccatatggaaaaaataagttagatcacgacatcaaaccatatttaaatggattaaagaccaacatatgaaaaagcatgactttaaaagttttggaaggaaatgaaggagaatgtttttatgatctcaggtcaggaaaagatttcttaaacacaataccagaagcacaaatcataaaccaaaagatcagtaaatttgaccacatgaaaatattttttaaaaactctttggtaaattaaagatatcataaacaaaatggaaaatacaaatcttaaacttggagaagagatttggcatggatataaccaagaaaggatttggcccagattttataaacagcgctcatggaaaaggccaaaggatatgaatgacaatgctcagaaatatccaatgttcttgaagcatatgttatcaatgtaacataaattaagcaaaaaggatctaatatttcacactcattagataggcagaaatttaaaaagatctggctgggcacgtggctcacacctgtaatcccagtaccttgggaggccaaggtaggaggatctcttgagcccaggaatttgagaccagcctgagcaacatagtgagaccctatctttaaagaaaaaaatctgatcatgctaagacctgctgaggggagtgtaaatgggcatgtgcattttggataataagacggcaatatttaacaatgcagtgtaattactgagctagagtgttggaagactttcagctcccctgcaacattgtttataatcaggaaaaactgaaaagaagcataaatggctaggtatgagatctggcagaggacacatagtgggtctcaaaagaccatcctggctaacacggtgaaaccccgtctaaaaatacacacacaaaaaaattagtcgggcgtggtggcgggctcctgtagtcccagctactcgggaggctgaggcaggagaatggcgtgaacccgggaggcggagcttgcagtaagctcagatcacggccactgcactccagcctgggagacagatcgagactccgtctcaaaaaaaaaaaaaaaaaaaaaaaaagagggtctcgaaaatgttagtactgttttatttctcaagaataaattgtatacagatgtgttcaattccatattttctatacttattttgtatgcttaacattttcacaattaaaaaattaatttggtgaggctgctggagaaaaggtactcacacaagctggcgggactgtcaattgatataactacttccaagagcagattagaactggtggtatagtgatgccactctttttaacctcttggatggacaaagatagaaaggttggataacagtttgtgttggcaaacaggcactctctttgcagatgggaatatagattgaagacacctccttgcaggtaattttttggcaatatttgacaaaattggaaactccccttcacctagcacaatttccttgaggtatttattctaagaaaataagcaattttagagcaaagatttatctacactgaagtttcccatagcaatcacagtattgtttctaatattagtaatacaaaaagaaacaacctgtatgtctaacactaatcgattctaatttatggtgcaactgaacaatggaccaaaatgatgctgttggaagtttttaatgatgtggaaccgcttgcaaattattaagctaaaagaaagtaggttacaagatagcaggaagaataaaccattaaaaataccaatctgtgcactgacaaatgttataaatattttacgttatgttatgttataaacattttataatataaaaaaatgttaactgaagttacttcctggatgaattacaggtgatttcattgtcttctagaattttcttttccaaaaatgttgtgtatgcgtgtaattattattttaataggagacactctcctttggtgatataatttaaacaggacggtactgactgataacctcccggggaaggcagggagccaagtactacagacttgtatgtttccatggaaatctaacgcgcctttgattatcacagattctggagaagagtgaggacttgggttcaccagtgcgttcccaaggacaggctgggcttctgaggaagttgcccaccctctcggaatctggtttggcctccgtaaaatgggcagatcccgctcggatggcccggttcccggcttccttttgcgggtcaacggcagcgtcacgcgcgcgagcgcggtctgcaaagcccccagcgctgggcgtcacgcggggattgctgtcgccgctgccagccgcagcagcgacgcgaactcggggcgcccggcccgggcgcgcgggggcggggacgcgcacgcggcgagggcggcgggtgcgacgggggcggggacgggggcggggacgggggcgaagggggcggggacgggggcgccccggcctaagcgggactaggagggcgcgccacccgcttccgctgcccgccggggaatcccccgggctggcgcgcagggaagttcccgaacgcgcgggcataaaagggcagccggcgcccgcgcgccacagctctgcagctcgtggcagcggcgcagcgctccagccatgtcgcgcggcctccagcttctgctcctgagctgcggtagggctcgcgagcgcctgtctcgcctgtcgccccccgcccctccacgacaccccctcccgtcggtcgcttgctcacgacgcgctctctctttcttgtagcctacagcctggctcccgcgacgccggaggtgaaggtggcttgctccgaagatgtggacttgccctgcaccgccccctgggatccgcaggttccctacacggtctcctgggtcaaggtaggtgctgcgatacccacgggctggggtttggtgggctcatttgaagacagcaggaaccatctcccctaggctggcgaccctctgtggctgccaggtgggggcgaggggcgtctcccgcagctgaacttggagtacccagcctcccgtcgcgcctcccccaccccatccgcatccaggtacagggccgaattaggttttgctctccgcagacctcaatccccttcctgtcactgaaggtggcctgagatgaatgatccacttaagatgttttggaagggcagagactctcatttggattaattctggaggccacctgtggttgtgggccagcaggtcaggaagaaagcaacagggacctagatttgggcattggacagggggaatgtctccagacttctgatttcttgtgttttgtgactgtgatgcccatgatacatgggagggggagggggcaatttgaaaggaaaggctaagacacagaagtgacttaggccatttcatccatggtagttatcagtggtcatctcctttgtgggatacccttggcttcctcccctagccctcctcctccttcctctggcagccttgagagcatcaggtggatgcatgagccggagcccgcatgtgtaagaacaggccttgctgctcctactgtaagtggactgagtgacaaggaggctttttcaaggtttcctcttgactgaaacattctcagattctaagatggcaatgatggtgtcattccaaagccaagcagctactgtttgatatcactggtccttctttaagtcaggccactgctaccac

SEQ ID NO: 11005 - DNA, 6000 bp, Homo sapiens
cttcctaaaccaagaaaatcgaactttgtcagccacaccagaagcctgtccatgtgctccatcccaatcacaaactcctttcacccccatcactaccctgactttttaaataaccacttctttttgcatttaagtatatccctagacattatagtcttgctcattaatttaatgtcttttatgcctcctttaagctataggttctatttcttcccccccccccacttataatatatatattgaataacccagttgtttactttgcagggttccccatggtctggattttgcagattgcacactcatggcatatttcaatatgctcctttgtcctctatttctgtaaactggcagttggatcaagaagcttgagcacactcaggtttaatccctttggtaaaactacacgttactatgaatttatatatttaaacatatacgatgggtttcagtccattctaattattacctttattgaaactcaaattgtcctatccatggccaataggagcctcttctagttggctgggtcctttggacatgactccagaagtctttaatcatttctctgctctctagtataataagatatttcgtgctcattccatacatttcctgccctaaacctagaaccccttgtttcttttagtgggacttggcatttcatactatatatctatatatctatatacatatagatatatgtatatagtcatgtgctgcataacgacattttggtcaacaatgaatgtcatataccactgtgatcccacaagattataacagagctgaaaaattcctattgcctaatgacatctttatttcattttattttgagacagggtcttgctctgtcacctaggctggagtacagtgtcgcaatcacttagtgacattttgatgatcctgaccctgtgtagtcctaggctaatgtgtgtttgtgtcttcatttgtaacaaaaaaagcttaaaaagtaaaaaaaaataataattatcaaaaactttaaaaataaaaagcttatagaataaggatacaaagaatatttttgtacagttgtacaatgtgtttgcgttttaagccaagtgttattacaaaagagttgaaaagtttttaaaaaatcaaaaactttataaggtaaaatgttgcaataaactaaaggtaatttattatggaagaaaaaaaattttaaataaatttagtgtagcctaagtgtacagttttgtatcaagtcttcagtagtgtgcagtgatgtccaaggccttcacattcactcaccactgactcacccacggcaacttccagtcctgcaggccccatttatggtaagtgccctacacaggtgtatcatttttaaccctttatactgtatttttactgtattctctatgttttgatatatttagatgtacaaataccactgtgttacaactgcctgcagtaatcagtacattaatatgctgtacaggtttgtagcctgggagcaataggctataccatatagcctaggtatatagtaggctgtaccatataggtatgtgtaagtagtacagtctatggtgttcccataaggacaaagtcgcctaatgatgcatttcttagaacatatccctgttgttaagtgattcatgactctgagagtgtgtgtgtgtgtgtgtgtgtgtgtgtgtgtgtgtgtaatgttaggacacatatatatatgtatttcagaaaaaaatttttttgaattataatgtgttataattagttctgttacctgtcttgggttttctttatcaagaacttctaatctatatgttggatcttctttgcctattttcaatatttatcatttctctcaaattatttctgtttacatttatttttgattaaaaaactcattttcaaattgtagttcttttcagacactattgtattttcttattcttttattccttgtattttagtcctcttttctgaaatcagtttttcttttatttctaactctttcccaagttctgttacttcattcctgagtttttcttctggcttgttttgctgtttcatgtttcatatcattttatatctttacagtgacactgtgccaggtgttacagaaacagtggtattcaaaacaaagtccatgtctccaataatcatatttcactcattccaagccacatttatttctttgtttctgtttctctttcttccctcaccccaacttggaatgcttgtttaaacattaaaattttctcatagttgattttaaaatgaaatctgtaagggtaaacttttctagctataggctaccataatctttcccttattttgaattcttgaataagttttcagttttcttgacagtctgtcccttgaacctagatcattagctttttaaggaaaaaaattatggctttttatatctcccagaataaagccaacaatgactctggggctgggcgtggtggctcacacctgtaatctcagtactttgggaggacaaggcgggtggactgcttgagctcaggagtttgggaccagcctgggcaacacagtgagacccccatctctacaaaaaatgaaaaaaatgagccgggggcagtggcacgtgcctgtagtcccagtcactcgggctgaggtgggaggatagtttgaacctgggaggtcaaagctacagtgaggagtgcctacactgctgcactccagcctaggtgacagagtgagaccctgtctttaaaaaaacaaagaaagaaaaaaaaaaagaatgaccctgggcattgttggaactcagaaaaccataccccaaaatgaagacctcagaagcaaaagatttttcccaccttctccaaccctcctgtctcaatcccattcttccccccacccccacccacaaggctagtcatagaaactggaatccgtctttcccaaagcagggcatagaaaccaaaaccccaccctttcccaaagccagccacaaacctaaaaatattactctaacctccctgcacccctttctgtgcaaatattggacatagagaaattatctggcagagcgcagtggctcacgcctgtaatcccagcactttgggaggccgaggcgggtggatcacctgaggtcaggagttcaagaccagcctggccaacatggtgaaaccccgtctcaactaaaaatacaaaaaaaattagctgggcgtgatggcgggcgcttgtaatcccagctacttcgggaggctaagacaggagaatcacttgaacctgggagggggaggttgcagtgagccgagatcgcaccatcgcactccagcctgggcgacaagagcaaaactctgtcaaaaaaaaaaaaagaaggaaaagaaaaattatctgacctaccttgtttaactgttgtaggccacagcccccattccagagggtcctgttccatacccagaaggaatgaatgctgcagacaggccaaggagaatccagataggccttgctgggtttcttgcctgtttgcatcagagtgttttttgtccagtcattttttttgagacggagtctcgctctgtcgcccaggctggagtgcggtgacgcaatctcggctcactgcaagctccgcctcccgggttcacgccattctcctgcctcagcctcctgagtagctgggactacaggcgcccgccaccacgcctggctaatttttagtatttttagtagagacggggtttcactgtgttagccaggatggtctcgatctcctgaccttgtgatccgcccgcctcagcctcccaaagtgctgagattacaggcgtgagccaccgcgcccggccttgtccagtcatttttttatacggctgtccatgctttgttgaacctaagcatacaaatacacgatttcccttgttatctttgggtcttcattctgaaggctcccgtgtcacataaaacgatggtcaaatcaatgtctatgtcttttctcctattaactgcctcctgtcagtgactttcagcgaaacttcagaaggtgaagcggaagttttcctttggcccggacagcatcatcattaatatcattaataaatattcccacagtatttggcccttgtatgtcctttgtatggtgctggggatacaataacatatcgctgcagagattttcaaatgtaaaagaagagagattatactgatttaaaagctagattctgtcctcaccctggagctagtctgcatttacgaaaacttactttccactgcggtagacagacgctttctactccagcgcaactgtgcctttcctcaaatctagtctcaaatttaggttccttttcattttctgttatggaaaggccctcagcgtatcccaggctttggagccttttgttagtagtctggcccatgcataatttccccttcctctgaattatacatagcacctcactagttatattttaatacactttcctatgtctcagtggtagtttcctatattaatatatatcccagtttagtttggcttttaatttcttttcttctaaggggatagatgcgttctgtaccaccttctcgagtactaatggttaactggaatgaacacaagcaacaaaccctccggcctggatcccaaaacaacagtcgcggttctgcaacagaaaaggctgcgctggccctgggacctgtctcggaaatactcctcatccatctagtttctcccaggacaactaggcccaaccccacgggaatatacagagaggcctcgggtcacagacttaaagctgtaaaagggaggaggcgacggtctggtcccagtcaccgaccagccaccgactactagggcccgaacccgggactgcagacgcacctccccgccctcccttcccagctccgcctggcggcgggcgttgctcctgaggggcggggcttccgcttccggcgggggattgttgacgcctgcggttgctgcggtggtgacggggctgttggggaggggccattgggggagggaaacggagcagtgacaggtatcccagagggtgctgctgaggcgacgatggccgaggggcccgaggaagcccgaggccaccctcccgggcaggacgatggcggaggggaccacgagcccgtcccttccctgagaggccctcctaccaccgccgtcccatgcccccgcgacgacccccaggccgaaccccaggccccgggccggcccacagccccgggcctcgcggctgccgccgcagccgacaaattggagccgccgcgcgagctcaggaagcgcggggaggcggcctccggctccggtgcagagctgcaggagcaggcgggctgcgaggcgcccgaagccgcggcgccacgagagagaccagctcggctgagcgcccgcgagtactcccggcaagtgcacgagtggctgtggcagtcctactgcggctacctcacctggcacagcggcctggccgccttcccagcctactgcagcccccagccctccccgcagagcttcccttcgggcggcgctgcagtcccccaggccgcggcgccgccgcccccgcagctgggctattacaaccccttctacttcctgagccccggggccgcggggcctgacccgcggacagctgccggcatcagcacccctgctccagtcgcgggcctgggaccccgggctcctcacgtgcaggcgtcggtccgggccactccagtgacgagggtaggatccgcagccccttcgcgaagcccgagcgagaccgggcgacaggcaggtgagaagcgcgaggtggaggctgggcggagtagaagggttttcgggggcctgtggggtagagctggcacgctttttagacctgtaactgctgcttctactctgattgactatcctgcccgttcagttcactagctatcgtttgtccaggccctaaattcccaaaatgtacaaggaggcaatacagtttcttcttcctttagacctggcactccaaattgactcccttactcatgggactagttgtttattcgtgaaaagaaattgctcttcaaaccatc

SEQ ID NO: 11006 - DNA, 6000 bp, Homo sapiens; identical to SEQ ID NO: 3547

SEQ ID NO: 11007 - DNA, 6000 bp, Homo sapiens
aaaaaaacgttaacttcatctttggaagactcagttggcagggggtggtgccagcgagaccttgaggcttcttcagtttaacatgtcaaaacatattttggggtagcagtttctgaaccccaactaaataactttctttacttggcttctaggattccaccctctgattctatttctttctttgtcactcctcatactcttctgctggatctatctcatcttcttaacaattcaatatgagaggatctagagctcaattgtatgatgactttttctctgactcacttcttgggagacttttttttttttttgagatggagttttgctttcccccaggctggagtgaagtggggcaatcttggcccactgcaacctctgccccccgggttcaagcgattctcctgcctcagcctcccgagtagccaggattataggcgcctgccaccataccccaataatttttatatttttagtagagacggggtttcgccacgttagccaggctggtttcaaactccagacctcaggtgatccaccagcctcggactcccaaagtgctaggattacaggggtgaaccactgtgctcggccttcttgggagatctcttccaatcttgtggctttaaatattctatacagtctcaaatgtaactatctatctccaacaccttccctgaattccaggctgcttacttgacatctacactcagatatctgtctaggacatctctcgaagttaacattcaaaaccaaatgccatgccatagtttttgttgttcttgtttttgttgttgttcttgttgttgttgttgagacgggagtttcactcttgttgcccaggctggagtgcaatagtgcgatcttggctcaccgcaccctccacctccgggttcaagtgattctcctgcctcggccccctcagtagctgggattacagacatgcaccgccacagccagctaatttcgtatttttagtagagatggggtttctccacgttggtcaggctggtctcgatctcccaacctcaggtgatccgcacaccttggcttcccaaagtgctgggattacaggtttgagccacagttttcaattaaaaacttctcctttctggccaggcatggtggctcacgcctgtaatcccagcactttgggaggccaatgcgggtggatcacaaggtcaggagatcgagaccatcctggctaacacggtgaaaccccatctctgctaaaaatacaaaaaattagctgggcgtggtgtcaggcgcctgtagtcccagctacttgggaggctgaggcaggagaatggcgtgaacccgggaggcggagcttgcagtgagcagagatcacaccactgcactccagtctgggcgacagagcgagacttcgtcacaaaaaacaaaacaaacaaaaaaaaaactgctcctttccaaaattccctatctcagtaaatagcaccagcaaggccctgctgttcgggatacacattttggagcaacatctatgcctctctttctcttatatcccatctgcaaatgttgtcaactcagccttcaatatatggtaccaagcccaactcatcttcccctctccaccatccccaccttagcccaaaccatcatcaccatctctctgcttccaattgcctctctgtagtctctttcccacacagcaagagtgacccatttaaacataaatcagattgttacctctgctcattacctctctgctcgaagtcctccaatggttcccacccttctcagaaaaatctttgccacgaattacgaggctgtacgtctggacaggttccagagttttccttagactttgcaaaagttatcttagagctgtctcattgtgctgggtgcaaattttgttttaaagagaaagttatcacatattttctcaaagaagcatctctgaaggcatgtaatatgtttgaaatacttatctcatcattaaagctttagtaaaatgaaaaatctaccagccatgttctctatactcagcgattttccagacttcaacgccctggaagcaatgattaaagtttttctttgccttcaattatctgaagggttgggctgcccctccacacctgtgggcatttctcatcaggtagaatgagagacttggaaaagaaagagacacacagacaaagtatagagaaagaaaaatgggcccgggggactggcgctcagcatacagaggacccgcgccggcaccggcctctgagttcccctagtatttattgatcattatcaggtgtttcctggagagggggatgtggcaggacaataggatgatagtggagagaaggtcagcaggtaaacacgtgaacaaatgtctctgcatcataaacaaggtaaagaaaaaagtgctgtgcttttgatgtgcatatacataaacatctcaatgccttaaagagcagtattgctgccagcatgtcccacctccagccctacggcggttttcccctatctcagtagatggaatatacaatcgggctttacactgagacattccattgcccagggacaagcaggagacagatgccttactcttatctcaaatgcaaagaggcgttccttcctctttcactaatcctcctcagcacagaccctttacgggtgtcgggctgggggacggtcaggtctttcccctcccacgaggccatatttcagactatcacatggggagaaaccttggacaatacctggctttcccaggcagaggtccctgcgaccttctgcagtgttttgtgtctctgggtacttgagattagggagtggtgatgactcttaacaagcatgctgccttcgagcatttgtttaacaaagcacatcctgcacagcccttaatcatttaactctgaggtgacatagcacatgtttcagggagcacagggttgggggtagggttacagattaacagcatctcaaggcagaagaattgttcttagtacagaacaaaatggagtctcttatgtctacttctttctacacagacacagtaacaatctgatctctctttcttttccccacattatcaagtcaaacatcctctcttctgtgaaggcttctctttgtgcactgccctcctactccatccccagtcccagtaccctgcagaataaaatgtttctatctctgtctccttagctttgtgtccatacatagatattgaaaggaagtctgtggaacttgtgtctgccttgtattactactgtggaagggacaataaatttattaactcatatttttaaaatatgcatacatactgtatttaacctaagacttttttcatattttaaagactggaattgagatatgtctttcaatctacatgtttagaaagcataacttatcagtttttttttctttcttggtggtacataaaataatggtaccttaaaattgatgctatcttacattttattaaatatggaatagaaatcttatgtgtctgtgctcctcattctttatagcaaaagtttaatacatgacatcattccatatgacagttgattatttttgccactactggggctcaaaccataataccccaaaatatgatgttttggcatgctgagtctttggggtttgtttgttttgagatgggagtctcactctgtcgtacaggctggaatgcagtacaggctggaatgcaatggcatgatctgggctcgctgcaacctccacctcctggattccagcaattcttatgcctcagccttacaagtagctgggattacaggcacctgcaaccacacccggctaatttttgtatttttagtagagacgggttttgccatgttggccaggctggtcctgaactcctaacctcaagtggtccacaacattggcctcccaaagtgcttggctcccaaagtgctggattacaggcatgaggcaccacgcccggtggcatgttgagtctttgaattaaaggaaattaaaagggtctcagaaagaagcctaaaaatcaaggcctctctctctcaccttcccccttccttttgtctctctgatactcttactttttccaagcacctgaaggggctctcttttcctgcacagccagataaggaatttccttatctgacagagaaaactcttttccaaagaaatgcaattgtcttaaaacccgttccttaggaatcgcattaaataatcagaagagattaatcacccagagaagagacaaaaactgaaagtcatagccacactgagacttttcatagatacttctgagggtagctccaagagattacctgggaaactttacctgtataataggacaatttttgttcagagtgaagtttcacagcttgtccacaagcgattgtttgtacttctgtcccactgaatgtccaaggagaatcatttgcaaaccactgtctggctttcgggcccattcatacctatctccctctactcaacaaagaagggtatacaagcatctggaccttaattgagttattgagtaatcactcttctgtgatttttccctatgcacgttaagcaaattttgtatgcctttttctcctgctaatctgtctacttagttcattccagcaactttcagagggcaaaagtaggagctttccctcttgctccctacaccacgttaaatttaaatataaattaaatgatgtgggaatgggtaacctgctcatttccaaactgcaattttcataggtatgaaaattctccacaaactacaaaaccatgacactccaagcgcccaagaacctaggttggacagctcacttagtgcaggtaaacgtgctccacccatctcccagcccgcctgccccctcacttaggtacaggtgcaggtacaggtaggcaagcaaacgtctattggctgtggacttaacaggctcgcccacaggtaccttccgagcatgcgtggggaagtagcacgcaggcgcggcacgccccgcgcatgcctggtgcacagagtctgcaggtcgggcggtagcgacaggtcagagctgcggcctgagcagccagcgtccggcatgaaggtctggggtctggctgctgcctgcttcttgctccagcaccatggaatgcctgcgcagtttaccctgcctcctgccccgcgcgatgagacttccccggcggacgctgtgtgccctggccttggacgtgacctctgtgggtcctcccgttgctgcctgcggccgccgagccaacctgattggaaggagccgagcggcgcagctttgcgggcccgaccggctccgcgtggcaggtactgcccttccccggcaacagccttgggacgctggtcttgcagtgaccttagactgctgccccagccgtccggcgcggcgcgcctgttgctccgcgccctccgcaggcctcggcctcccgcgtgtcctgtgagcttgcacaggcccgcgggccgagctgcgtcccactcgctcagaatgcgaccttgctatgtgcgctgtgccctgccggggtcccagcggccaaccctctgccttctcctccaccgcccttgctgcagattatgtaaccataggaacaacctaggaatcgtttacagaccgtgatcacgttagttaacacccgcttaagtgctcttgtaagaggttttttctgtgttgtttttgagacagggtcttactatgttgcccaggctggactcaaactccttgcctcgagccatcctaacgcattagcctcgcaaagcgctgggattacaggcgtgagccaccacacctggccgagaggtgtttttaaacaaggatttcatctgttcggaagtcataagtataaattaatacttccctgttttctgtttcttcgttatggacacatttatacagttgtccagttgcacggagattggggacgcacctagaagtgaggctaaagactgagttgtttctgagaacgacttactttcaactacagtactctataagtaaacagccagggagatcggattgagaaaaaaaaatcttatttgctgtttattttttc

SEQ ID NO: 11008 - DNA, 6000 bp, Homo sapiens
tgggttcaagcaattctcctgcctcagcctcccgagtagctggagctacaggcacccaccaccacacctggctaatttttgtatttttagtagagacggggtttcaccatattggccaggctggtctcgaactcctgaccttgtgatccgcccaccttggcctcccaaagtgctcggattgcaggcgtgggccaccgcgcccggcctccttggactttttatctgcattgcaggcactcagtggtccaggccacctacttctgctctacctttggacatcctggcaatgtgctgctcctcagcctgaccacaacacctgcagtgtcccaaacatatcatgcagtttcatgcctctgcacccatttcctctccctggtcaacacacctgggtgacccctattctactcactcagacaaaccaggacaggatccttgacctttctgcaactctatttttctcacctagaaatagaattaatgacatctacttctttagcagatgtttaggaatgagatacggtgtggagagcacctggtgcgaacacagcgcgtatctgtgatagtgaccgttagccgttatcctcatcaccacatcctttccccacatctcagatggtgccacagtctaccacctcagagagaaaatagaaaagggaggtcccaaacttcctgctccaccacctatacctgtccctcatgatctgtttcctctgatttcaacaagcaggtgttctttctcctgtctcaggctaattctgcacccacatcggggagcccccaccccagcttccctcaggcttctctatttggtcaattcattaattcattcatttgacaaggatccatgaacgctaactatgtgccagtcactattctaggtggtggagtcacagaagtgaacaaaacagaaagttctcattcaaaaacaacataacttgtggtaggaggcagacaggaaatgaaataattagtaatatatatggtgtgctggatgatgataagtgctcaggagagaaataaacctggaatagcagaacttgcatttctttttgaaggggtcttgctctgttgttcaggctagagtacattggagtgatcatagctcactgcagcctaattttttttttttttgaaagacagagatcttgctatgcatactgcccaggttcttgaactcctggcctcatgcaattctcctccctcgatctttcaaggtcctgtgattacacctgtaagccctcgttcccggttggaagttacagtttaaaatagggtggttatgagcaaggggagcgaggcacagaatacttgggagaaaagcattccgagttgagagaacagcagtgccagagcacagaggcagaagcactgtggtttgtgtgaagaaaagcaatgaggctggggtgcgcagagcacacagggtgatcaggagaagaggaggtgacaaggccagagggggttgagggccagatcatgtatggccttgaaagtcatcatgctgacctgggctttacctctgagaggggagccactggaaggttagagcagaaaaaggactggactgacttatgttttaagaagttacttcacatgctagaccaagatgggctgtgggtaggggtggtggatggaggcctgaagacccagctgggagctactgcagtgatccaggggaaagatgcagatgacttgtaccagggaggagccatgaaaatgttatgatgctggatttattttcaagatagaataaaaaggctttgctgataaacttacaggtggggtgtgaaaaaggagggcatcaagggtgaccacaaggttttggtcctaagaaacggtacagatggagttgccacttactgagatggggaaaatgagggagaaaccgcttgtggaggccagaggaggagccagcacagaatccaaaggtcagttttgaatatgttgggtttgaggagcttactagagattcccgtggagatgtagagtaggcaggtcaataataagcttgcagtccaggcaacgggtcagggctggaaacacaagttattctctttgtcttctttatattcatgtttgttgccactgtgtgtttcacttacctaatgcattcgtgatttattgctgcataacaaattaccacaaacttagtggtttaaaacagtacacttttccagcctgggcaacatgatgaaaccccatctctactgaaaacgcaaaaaataaaagataaaaaattagcccagcgtggtggcacacacctataatccccgctacttggtaggctgaggcacaagaattgctagaacccaggaagtggaggttgcagtgagccaagattgtgccactgcactccagcctgggcaacacagcgagactctgcctcaaaaataaataaataaataacagtacacttttatcacttcagtttctgtgggtcagaagtccaggcagagcttagtgggcttctctgctcagaacttcacaaagcaaaagtattattcatgcatgtaaacctctaagcacaataccaacatcacggtaggttctatgtgagtataagctattattaagaataataatcaatcctcttccctctcctccatccctaaggcctcatcatttcttgcctggagtgtcacagtagctttcttcctggtctccttgtcttctaccatctgattctctaatgaggactggctatattgtgtaatcatagcgtcatcattccacagaatacaatgtaaatggcactcttacttcccatcttccctggcacctttcacactattgtttccaatgtacacattttctcatgccatttttaaaaaagattttctcttcaccttcaaactaaaactccaactccacaacaggcaccagctgataccgaacctttcataatggaaaataatgacattcataaagagttaatatgtgcaggtgctgtgctaggttctccccaaacaacttaagaagcaggtcacatccctacccatagctgaagaaacaaagacattgagtgagaaatgaacttaggggtctcatagtttggaaactacaaagttcagagatatgaagagttgggctcagaaactcctaatctgaagcttagcacattggctgcttctttgtgtcaaagtgacttggaccctccaggcaaaggtgggatgttcattcttactaatacgatctcaagcagcacagcttctgatagagtctgaatttaaaaataaacaaatgaacaaataaacaaatattgatggatgaataggggtgaacagcaggatggatttataataaagtaagaaactaaaatattaattatacaatctacatggtagatatattggaatttactgaaattctttcacctttgctatatgttttagaagttttataataaactgttggggagggggaagggggagggaaaaattgtgtttttctgttgataacagagaccagaagtaccactggcttaaataaaacaaggatttgttttcctttcatgaaaaacaaacttatttggaaatttaccctgagtactaatatataataaaatattttaaaagaaaaaattttttaaataaatttagatggtgacagtccagggctgatctggcacctcagatatgtcattcatgccccagcctgcttctgacttcattctctgctgtcccagtgtgtggcttccaacctcaaggctgcctcatggtcccagggtgggctactgcacctccgggtccaaagtccatgttctaggcaagaggaagaaggaagaagggagagtgtaccctcacactcccagctattttggcctccctttgaaggatttctgggagaagtacaagcccacaactttcacctacaaaccgctggctccaacttagtcccttggcctgccctatcttcaagggggaagagcaggatgcagtaccccagaaaattaggccttgtcactaagaagaagggggcatgcacgctgcagaagcaaccagccatctcaagcagataccacacagcctaaattcaaactgttgcaatataatcaaatcccatcagctccagtcacatattagctctaggagatttctggcttgcagcccaaaaaagtgtgttttgaggtcgtaagccacagggagaacaagattgtcccataaactccttacagagatggtgtacaggaaacgagccttacagagaccacagcctatggagtgtctagcttcagagaatatgtactccactggcagcgtgagaaacaaatacccaagaaaatacaatatagcacaaaccaggagctgagggtgaatgaagatgctcagaaagatctgcagtaagaatttcctgggaaaggtaaaacaatgtcaagcagcactgcctctggaaatcagaaaaattatattatttgataccatatcctaagcctaaatgccagaagttcttaaagaggtgcagtttgtctcattttctttccattcatacctttattaggctctgtaaaaaagatcctcctcttctacgtacctatctacatgcaagcaaactgccacagaagcatcttaattagtgcacatcttcctctctttgcacattaaatttttttactttcctactccattctgctaatatttctattaccatgtaaaagacacgagacaggtgaatataaagaaatacttatatacatccacgcacaagaatgattcaaatagataaacacagaaacacaaacactaagggaggtagggctggagtttttcctcaacgtgtacaattcaatgtactttcagttttcatttcaacgttcctcagtggtttctgcccagcaactgatgagaaacatcacctctgagccaatcaaaaaactaattcttccaaagagcgactcttactgtttctcatggtgagaagacaatatttgctttctctttttcctttcttccggatgagaggctaagccataatagaaagaatggagaattattgattgaccgtctttattctgtgggctctgattctccaatgggaataccaaggggtaagtgcaggaaattgattagagcctgggctacaacgcatgggaggagcggggctgaatcgctgagagtggtgagtgggcatgcagggagagtactctcccagagaaaggggtgcagtgcctgtgtgtgtgtgtgtgtgtgtgtgtgtgtgtgtgtgtgtgtgtacatgtgtacatgtgcacactcgcacatgcacatatgggcacgtgggaagacgggagaagtactgcaaagtataaggaactgcagaggttgggatttagtggaaggaaagggagacaacatgaatgaagaaatattccaactgcatgttcttaacgtattgtggtcagaaaagggcaaacaaacaaacaaacaaaaaacccttaaaatctgttctggccaactcaaggcatctattctgagaaattctgaagaagaagaagaaaaaagagatgtgcctcatagatttatatgtaaatgtgtttattacagaagtatttataatatagtaaaatctgaaccaacatacatattcaacaggtggggaatagacaaacaatgcatggttcagtcataaaacatgttccatgtaaccattaggaatcataattttaattaagtgaaattctttataattttaataacactggatccttatattaaaccatttttggtatcttttagggatagtacttggttttctttccattcatcatttccccaaaacctaaagcatgatttcccatggttacaagctactacattgtatgaatatataattattgggagtctctgtgagcctactctgactcagaaagccgctcctaaagaagaaaaaagaacaaacaaacaaataaaaaacccgaattatttttaaaactctttattttggatttttcagtttctacattttgttactgtagattttactagattgaacagccttatccataaatatttgcatcaatctctaaat

SEQ ID NO: 11009 - DNA, 6000 bp, Homo sapiens
tgctcaccactgtatcccctctactgggcaagtgcttgtcaagttctagttgttcaataaatttgttaataatgctgactcttcaacttggttttttctagactgtggtgtctactcagcacagtagagtagtctacatacccactgtactccccacagtttcagtttgcctcactgcagcattttcacaaaacccttattggatgcctcttctattgttgccatctgaattaccagaaattcatagatttaaagcaacacaaatctattatctcactgttctgtaggtgagaagtcccacagggatctcaccaggctataatcaaggtgtctgcaggctggattcctttctggagtctctaaggaagaatctatttccttgcttattcagatcgttggcagaatcagttcccttcatttacaggaatgaggtcccagttgtttcctggtttatagccagggactgtacccacttctagaggctgccacactctgactcttagctcccttcctccatcttcaaagcagcaacagtacattgagtctcctctcctagttctttttctccattgtatcattctgattcttttaccttctcctttttttccttccttttatttatttatttatttattgttgacagggattcgctctgtcacccaggatgaagtgcagtggcgtgatctcggctcactgcaaactgtcccctgggctcaagcaatccacccacttccgcttcccaagtagctgagaccacaggcccacatcaccatgccccggtattttttttgtagagacagggtcttgccatgttgcccaggctggtctcaaactcctgagctcaagaaatctgtccaccttggtctcccaaagtgctgggattataggcatgagccacggcactcagtctgccttttacttttaaagactcctgtgatttgactgagtccaacagacagtttagaataatctctctaatttaaggtccataattttaattttgtgtaacatccatttcgccatgttatacattctattcataagtttcttagtggatataactcaaagggtgggcgggggggggcactactcagctcaccacactgatttgggaagtgatcccaggaaacacaagtgcagaaataaattgagaaatgaaagaaagccaattacatgagaaatgagataaagagttcattcatgagtcagttatcatgtggaaaacttggcttaatcccttttacgactctctaagaaaccatatgaaatgtgtgatatagctcagaatcttcctaaggactacagggcctgcgactttatctccacttcccatcctcctttgcttgaattgtttgaagattggcctgggagtgttaattctaatgtactttaagattgggctatgtaactgcagaaaagcaactatcatgggtgtgataaagctcacaggcaaaggagaagggagatactcactggaggtgggaaggttgtcatctttgcagaaaactgtgcctcagctattggcaaactgtgataggccaagagaataagggatggggcatcaacagcatcagttataagggctcacctctgagaatatagtgaatgcctttcaaggtctctctgccctccctgcaccacatttatttagcattagtgacctcttgtcttccaatacatgcccatatcacatggccctgcagcctcaccacatggactgggtctaggatggacactgacccaggctaggccagaggactaagtgacatgtggctagttactcctgtaacagatgtgcatgggagctgtgggaagaaatgttccattcatgctgtggactaaaggatggtggactgcagagaagaccaaagcagatgagcagagagaaggctccaaatggagagcttaggcaattttatcatgtttgtttcttttagaagcccaatatcatttcttctctttgaaaaaatttgttgtgttgagacaaggtaaatgtactagttaatattgcggcagttgtaaaatttggaagcttacataagcattataatatgctcattgattctgtgagtcaggaaactaaaatttgaacaggacaaagtagaaatggattttctgtgtgccaagatgcctgtggatcccctcggagtactccatagctggagatgacacacccatattactttcaaagattggagtttattgcacagcaacagtgaatcattgctcactccgggtcccggttcttccaggattggcaggtacaccatgtccataaagaatctttctgaagtgacccttcctgtctctttttccatcccaggacacagtatgattgggttagatcattactatctaacctggcacaccccagtagaacctggtttcttgctaagctaccccatggccaaatgatcctcttccttctcagaacacacatgtttccctcctgctcagatgaactttggcagaggttgaggcctggcttagctggatgcttcttgcacaagctgcttcaaagccctgggtcttatttcttcaaataaaaatataaagtcaggtctcatcctgggtggccatgctcttagacacttgcatccttctcttctgtcctttcccaacagctgcccagtcctggttggaatattctaatactgacataattaccctcattagccactcaacccaggatccaattttaattataatccagaaatatcaggtgatgagtgaggcttctgtatgagaatgggacagttcaagtgtcaattcaatagtaaaaacacttcttaggcctttctttatcttattctcatcaaagagctttctctgcagaagggacctactggttcatccttcctggtccttgatcttctgatctagagtggcttaatagtgctgccacctctctctcgaactctggtgccgaatgattccaggaactgggccatcctgtggtgggaatgaccttaccctgagcatgtcactcatgcattgaacaacagctgagagcagagcttagagttgggccttgtaaggagagaagaatcacatcctgcagaagtctgtcctgaggaacaggtactccagtcacagcaaagacacagttgatacctggataacaataatagaagacaggacatgggaacagcaaaagatatgggtgttagaagaggccgagagcacttcaggcaggagcattcagagttgttcttggaggaagtaggcacgaaggctgggcaggatttcaaggggcaaagatggagcaagcaattcaagtgaaaggcatggcatgggaaagggagcgctggccacagggagtgcaacgttgtgatgcaaggccactgtggagccattgctagtgtattaactgcaaagttttgaattgaatcagaagggaattggaggcctctagactaagcatttatttgtgtatattttattatttatttatttattttgaggcagggtctcactttgtcacccaggctggagtgcagtggcatgatctcagctcaccctaacctccacctcccaggttcaagccattctcctgcctcagcctcctgagtagctgggattacaggcatgtgccaccacacccagctaattttttttttttttttttttttggtagagacggggtttcatcatgttggccatgctggtcttgaactcctgacttcaagtgatctgcctgcctcctcctcccaaagtgttgggattacaggtgtgagccactgcaccagttccagactaagtatttagacatttgaggggattattgacaactgggccttgggaagattattctggaagatatctatacaatgacaagattggattctgtgggggagggattatgttcatggggaggaggttatgtgtgctggtgtgtgtgtgtggtccttggacttaaccccaccacctactggcagaaggtcaaggtcaactgaaagtctttgctcacttccatcttctgcctccaccagaataccacctccccgtgggaaagggtttttaatcctcactcagtattctcagcacgtcttatccaatagctttggagtgaacaacaagaccttcataacagccactgcaactgctgtcacctttcctttgctacccctcccactccagccatgcctgcttcccccaaggcctcccgcgcaccaggcccaaccttcaaagccagcaacatgaacaagagtcctctggctttggaaagacggcggcttatgttttcctcctcatgtttcctccccagcaaaatcactctacatagagagccctctcctcgtctacaccagcaaagccactgacaccttggggatctcaaggctttgtaaaagaacggaaggaaagaaagaaagagagagagagagaaggaaagaaagaaagaaagaaagaaagaaagaaagaaagaaagaaagaaagaaagaaagaaagaaagagaaagaaagaaaggaaggagaagagaaggaagagaaagagagaaaggaagagagaggaaggaaggaaggaagaaaaaagaaagaaagcgagaaagaaagaaagaataaagtgagagagagacatatgaaagaaagaaagaaagaaaaagagaatgagaaaggaaagaaggaagcaaggaaggaaggaagaaaggaaggaagaaaggaaaataaaggaaaaaagtcttgcttccaaagacagaaaaaggaaatagaaatacctaataatcccaaaaggttatttgctgcttgagatttttggggggtttttgtgtgtgtattctacctagtaacagctgagaaataaggctcgagacaccattggttggttcagcctcactcggccaatcctgggctctaaactgctcagtggaaatcttgggactttttggacacccagagaacaggtcccagataccgagtccgcaactccaaacatcgcgattaataggaggtgaacacagcttttctcttctctttgggatgctttgttgtctggtggtgactgtgcccatgggtgagttgtatcggaaaatcgtcatgtgaggatcagaggggaaaagaaaacagaggttagttctagaaggtaggaaagggagaggaggcgctacagctccggggtgggggcggtagctgggggcggtaggtgcggggagcgggatctgctctggagaggagagggggacctgggagacaggaagcctactggtggggaggcgcagcctcgcctggctttacctcgagtgtcccgacctgggtctcggggagggggaagtggagggacgagggtgtgaaagaatccagggacaactgaagaaaccggactgtggcccgagaagtgggaagaggaaggaggaaaacggcccccttgatctctgcattgatggcttacttatggaatgtttacggaatccctctttcggagatacctgagccttgagatgcaagcgactcccagaagttggggcaccgatgagacctacttgagtgacaggagaggttgggcccgaccagcactgaggtgccaagactcctaggctgattctcctcctctgtaaccctaggcctctggtctctgcctgccctgggtgctcatggaaccagctgctgctctgcacttctccctgccagcctccctcctcctcctcctgctcctcctccttctcagcctgtgtgcactggtctcaggtagggatgtgtgtcacttgctgctgtcacctctcagaaaggaacatcaaccctgtagtctgcaaagggaaagaaggaagaactgtggggttgttgacttatcctttcattctgaacatgttcactgaatttataccagcactgtccaaaagaaacacagtgaagcacaaaggtcaagtgcatatacaagtgcaaatcttcaaaaagatttttttaactttttatttatttgtttatttatttaagagagagtatattgctctgttgccaggccggaatgaagcagatggagaatgagatcataactcactgtaacctg

SEQ ID NO: 11010 - DNA, 6000 bp, Homo sapiens
ctcttgctctgttgtccaggctggagtgcagcagcatgatgtcggctcactgcaacttctgcctcctagattcaagcaattcccctgactcagcctcccaagtagctgggattacaggcctgtgccaccatgcccagctaatttttgtacttttagtaaagcggggtttcaccacgttggcctgactggtctctaactcctgaccttaggtgaactgcccgcctcagcctcctaaagtgctacattacaggcaagagccactactctcagcccataagcattgtttctatcagttactaatggtttcccaaccattaaatccgttacacatttctattttcccctcccacccccgtgctttcctttttagagagacaggatcttgctctgtcacacaggctagagttcagtggtgtgatcatcgctgactgctgccttgatctcctgggctcaagcgatcctcctgccttagcctcccacagtgctgggattatagctgtgagacactgggcctcgcttgtcattatacacttctgtccttcctttatggacaacactgagttcttcatagacctgcctgagtaggtgttcctgcctatgtggcgtctgcctcatcaatccccagggccctcttcttggcctttccctgctcctagggagatctttctcagaattcttgcttcacttgctccagaactgctgatattccttaggctttcgtcttggcctctcttttcacaccacatatgctcttgtggggtccaatccgttttcaaagctctatcccataagcagactcccaccagcacttgcatttctgtctccagccccacgcattccctgaatgcccactagacatctcacaatgagtgtgtccaaaactaaattcccatcaaccctgcctacccatcattaactgaatgagtgacaccacctaagagtcatttcagccttctcatgctctcttttacctaccacttctgactgatagccaggccctgctatttatacttcctttcaatagtctagctcagtggtttcatcacagactctggagtgagacagcctggactcaaagcccagcttagaaagaaactactcatgtggccttggggagttatttaacctctctggacctcagattttatatctattaaatgtgcgaaataaggtttctacctcttagggttgtcatgagtcgtattaatacatgtaaatctcttagcacaataccagcatggtagcaggttctatgtaagtatttcctagtattaaagttagtaatcaataaagtctcctatcccccattgccaagccaccataatttcttgcctagactgtcacagtagcttccttcctggtctccctatctcctaacatctggcccaccggatgaggatgggatatattgtgcaaccccagcagacatcatcccatagaatacaatgtaaatggcacctccttcctcccatcttccctgcacctacctcacttctattttaaacatacacatttcctcatgtcaaacttttcagatattttcccttcaccttcccactaaaactccaactccacagcagacatctgttgatgttgtctccaggggaagtggatttaggactcatcaatgcagggatcagaattgagcctttcagaatggaagacaatgaaattcattgagggttactacttgcagggcctgtgctaactgctccttaaataacttatggaacagatctcatttctgccctacagatgaataaacagagaccttgagtaattagttaaccggctttgggttccagggctaatgagttgtgaatgagaacagatgaacatagaaaaaaaaaatctcgagacagtagatagtaaggcagtgtgccttggatgtgctgacagatatctagatacagcataaagaaaatgtgtgttcatgagagttcttaatggcaacaagaggtagcatgatatccatgagaaatggacatttgttgatgagactaactaaacaaaggagacggatttctgggcatttttcaacacctattgcatgcaggacactgcactaggtcttgtaaaagacaaagagaagatagcatcaagggcctaggtcttgaaggagggctgagtacactttcactaagtgtacattcttgtgacatttttttttgatacactgttgtaagcaaactgcatgcattatctcattccatcctcacaacagcaacccaagaagtcaagtactatcactgtccttattttacagatagggaaactgggcacagagatgttaggtaactggctcaaggtcacgcaggccacctagcttgagaattagtgctcttatccactccattatgcaacttctactcactaattttgaacttcagtgcctgagaactactagatgataggttctcaataaaaatttgttgaatcactgaattcatttctgccccatttcacatccatttctttcccaagatttctttcccagagttctgtgtgaaggactgcatgagaaatggagcaaggggcctgatactttggaaactacaaacttgagagatatgaattattgggcccagaaactcctaatctgaagcttagcacctcagctgcttctttgtgtcaaagtgatttggatccttcaggcaagggtgggtgatcactcttactgatataatttcaagcaacacagcttctgatagactatgaatttaaaaataagcaaatgaggtgcagtagctcacgcctgaaatcccagcactttgggaggccgacgtgggcagatcacctgaggtcaggagtttgagactagcctgggcaacatggcaaaaccccatctactaaaaatacaaaaattagctgggtgtggtggcaggtgcctgtgatcccggctactcgggaggctgaggtaggagaattgcttgaaactgtgaggtggaggttgcagtgagccgacagcatgccactgcactctagtctgggagacacagcgagactccatctcaaaaaaaaaaaaaagagaaagaaaagaagcaaatgaacaaataaataaggatgatggatggatagggaatgaatagtgatatggattataataaagtaagaaagtttagtaaaatattaactctatcaatacaatttacatggtaggtaattggtattcactgaaaattctttcacctttgctttatgttttagaagttttatgacaaactgctggggaggaaaaagggagagggaaaaattttgtacttctgctgataacagagaccagaaataccactggcttaaacaaaacaagggttttcttgttttttttgttttgttttgttttgttttcatgtaaaatcaattcaggtggttgcagtccagggctgatctggcacctcagaggtgtcattcatgccccagactgcttctgacttcattctctgctgtctctgcatgtggcttccaatgtcaaggttgcctcatggtcccaggagggccgctgcacctccaggtcaaaagcctacatcgcaggcaagaggaagaggaagtacagagagtgtaccctcacactcccagctcttttggcccctcctttgaaggatctcttggagaagcataagcccacagctgtcacctacaaaacactggttccaactttgtcccttggtctctgctatctaccagatggaaaagaacgttgtagtacctaagaaaattaggccttatcaccaagaagaaagggggaatgcatgatgcagaagggaccagccatctcaatcagatactacacagtctaaattcaaacatttacaatataattaaattgcatcagccccagtcacatcttagccttaggaacttcgatcattgacttgcaatcccagaaagtctgttttgaggtcctaggccacaggaagaaccaatttgttttatagacatcttacagagacagcattcacagtttatctagagtctggcctcagagaatatgtactccactggcagcaggagaaacaaatacacaggaaaatacagtgtagcacagaacaggagctgagggtgaatggagatgctcagaaacacctgcactaaaaatttgctgaaaaaggtaaaacgtgtcaagcagcactgcctctggaagccagaaaaattacattttttgataacagatcctaagcctggatgctggaggtgcttaaaaatgtgcattgtgggccgggtgcagtggcttaagcctgtaatcctagcactttgggatctgaggagggaggatcacttgagctcaggagtttgagaccagcctggccaatatggcaaaaccctgtctctactaaaaatacaaaaagtagccgggcatggggcgagcacctgtaatcccagttattcaggagctgaggcaggaaaatcacttgaacctgggaggcgaaggttgcagtgagccaagatcctgcaactgcactccaacctgggtgacagagtgaaactccgtttcaaaaaaaaagtgcattgtgtctggttttctttccattcatacgtttatttgactctgtagtaaaatctcctcctcctccatgtacccatattcatgcaagcaaatgttagcaaactgccacagtagcattttaattagtgctcatctttctctcttcaccacattaaaatcttttcccattgtgttctgctgatatttctattatgataaaagacttaagacaagtgactatatagaaatacgtatatacacacaagaatgaaagagataaacagtaagggaggtagggcaggaatttttcttcaacgtgtacaattcaatgtactttcagttttcatttcagccttcctcagtggtttctgcccagcaactgatgagaaacatcacctctgagccaatcaaaaaacttattcttccaaagagagattgttattattcctcacgatgacccgacagtctctgctttctttttcctttcttccagaaggagatttaaccatagtagaaagaatggagaactattaactgcctttcttctgtgggctgtgattttcagaggggaatgctaagaggtgagtgggggaagtcgattagagcctggttcacaatgcctgggaggacaggggctgaatcgctgagagtggtgagtgggcatgcagggagagtactcacccagagaaaggggtgtgtgcctgagggggtgcgcacgcacacatgtggacacatggaaaggggagaagtagtgcaaagaataaagacctgcagagtttgggatttggtgaagaaatagtctaattgcatgttcttaagaacgtattgtagtcagaaaagggcaaacaatctttaaaatctgttctggacaactcaaggcatctattctaagagattctaaaaagaggtgtcctttatagattcatatgtaaatttgttcattacagaagtattaaaaatgtagaaaaacctgaaccagcatacatatacaacaggcgggggatagacaaacaatgcatggttcaatcataaaagagatttccatgcagcctttaggaatcgtgtttttaatgaagggcaattatttataattttagcaatgttagatccatacattaaaccttgttttaaaatcttttaggaacagtatgtgtttttccttttattcatcatttcccccaaacctaacgaatgctatccaatggatacaatctatttcattgtatgaatgtacaatttttttgtttgttttgagatgcagtcttgctctatcacccaggctggagtgcagtggcatgttctcggcttactgcagcctctgcttcctgggttccagtgattctcctgcctcagtctcctgggtagctgagattacaggtgcacgccaccacacccagctagtttttgtatttttagtagattcggagtttcgccatattgtctaggctggtctcaaactcctgacctcaggtgatctgcccacctcagcctcccaaagagctgggattacaggcgtg

SEQ ID NO: 11011 - DNA, 6000 bp, Homo sapiens
actccctgcaggctgaagctggaggctgctctaagctcctacaggccacctcagctccttgctatgtgggtctccaacgatgactacttttgtcttcaaagccagccaggaagacagagactctagagtgggtcagctagcaagacagagtcttacactacattatgtagtcatggaagggacatgccatcagctttaccatattttattggttagcagtaagccataggttcagctcacactcagggaaagtacaggctgcaaactgcaagaggagtaatcataaggggtccactccagagtctgtaggctacaccatatacaagctcaaggttctcccactgtaactgccctgcttcccctttcccagggcaatacaccacacttgcctttctctaggtctctacttccatgaaagcaaagtctcagaaagagaacacatgcatggccgtcaggcactgtttgccatgatgatggccactgctgtaccacaccataaacattgttttacagttactagtggattcccaatcattaaatccattatacatttctattttcccctcccaccgccatgctttttttttttttttttttaagagagataggatcttgctctgtcaccccccaggctagaggtcagtgacgtgatcatagctgagtgcggccttgatctcctgggctcaagtgatcctcctgccttagcatcccatagtgctgggattgtagctgtgagacactgggccttgcttgtctttatacacctctgtcctttctttatggacaaccctgagttcttcatagacctgcctgagtaggtgttcctgcctatgtggcatctgcctcatcaatccccagggccctcttcttggtctttccctgctcctagggagatctttctcagaattcttgctccacttgctccagaactgctgaaattccttaggctttggtcctgggctctcatttcacaccacatatactcatatggtccaatccattttcagagcagacccccactggcacctatcccataagcagacccccactggcacctgtacttctgtctccagccccacacattccctgaactcagtgcccactaggcatctcacaatgagtgtatccaaaataaaattcccatcaaccctgcctacccatcatcatctgaatgactgacaccacctaagagtcattttagccttctcttgttctctcttaacccaccacatccgactgatagccaagccctgctatttgtacttcctttcaatagtccagcttagtggtttgatcaaagactctggagtgagacagcctgggctcaaggcccagctcagaaagaaactacttgtgtgaccttgggaagtcatttaacctccctggacctcagcttttacgtctataaaatgtgggaaataaggtacctcttagtgttgttgtgaatcttgttaatatatgtaaatctctaagcacaatactagcattgtagcaggttctatgtaagtatttcctagtattaatgtgagtaatcaatcaagtcccctctcctccattgccaagctgccatcatttcttgcctagagtgtcacagtagcttcctttctggtctccctatctcctaacgtgtggcccaccggatgaggatgggatatattgtgcaaccccagcaggcatcatcccatggaatacaatgtaaaaggtgccccctacctcccatcttccctggcacctgccccactgctattttcagtgtacacattttctcacgtcatacttttcagatattttcccttcaccttcacactaaaactccaactcacagcaggcaactgtcgatgttttctccaggggaggtggatttaggagtcatcaatgcagggatcagaattaagcctttcagaatggaagacaatgaaattcatttagggttaatacatgcaggtgctgtgctaactcttccttaaataacttatggaccatgtctcatttccactatagacaaagaaacagaaacattgagtgattagttaaccagctttgggttccagggctaatgagttgtgcatgacaacagatgaagatagaaaaaaaaaagcctagagagagtagatagtaagccagtgtgcctgggacatgctgacagatatctagatgtagcataaagaaaatttgtgttcatgggaggtcctaatggcagcaagaggtgagataaccatgagaaatggacatttcttggtgagactaactcgataaaggagacaaatctctgggcattttgccacacctactgcatgcaggacactgcactagatcttataaaagataaagagaagatagcatcaagtgcctaggtcttgaaggagggctgagtgcacttttcatttagcgtacattcttatgacttacttttttatcatacactgttgtaagcaaactgcatgtgttgtctcattccatgctcacagcaacaactcttaaaagtcaagtactattactgtcattattttacaggtagggaaactggggcacaaagaagttagagaactggccaaaggtcacacaggccacctggcttcagaattagtgctcttatccactctattatgcaacctctcctcactagttttgaacttcagtggctgagacctactacatggtaggttctcaataaaaatttgttgaatcactgaattcatttctgccccatttcacatccatttctttcccaagacttctttgtcagagttcggtataaaggactgatgagaaatggacccagggcctcacactttggaaactacaaagttcaacgatacaaactattggtcccagaaactcctaatctgaagcttagcacctcagctgctgtgtcaaaaatgacttggatccttcaggcaagggtggggtgatcattcttactgatataatttcaagcagcacagcttctgatagactgtgaatttaaaaatgagcaaatgggctgggctcagtggctcatgcctgtaatcccagcactttgggaggccgaagcgggcgtatcacctgaggtcaggagtttgagatcagcctgggcaacacggtgaaacccagtctctactaaaaatacaaaattagccgggcatggtggcacatgcctgcaatcccagctactcaggaggctgaggcaggagaatcgcttgaaccttcggagccggaggatgcggtgagccgagatcgcaccattgcactccagcctgggcaacaagagtaaatctccatctcaccaaaaaaaaaaaaagaaaaagaaaagaaataaaaatgagcaaatgaacatttaaataaataagtatgatggataaatagggaatgaacagtggtatggattataataaagtaagaaagtttcgtaaaatattaagtatatcactataatctacatggtaggcatattggtattcaccaaaaattctttcacctttgctttatgttttagaagtgttatggtaaactgttgggaaggaaaagggggagggaagaattgtgggattctgttggtaacagagaccagaaataccattggcttaaacaaaacaagggttttcttgttttttcttgatgttgttgtttgttttcatgtaaaatgaatttagatggcggtagtccagggctgacctggcagctcagagatgtcattcatgccccagcctgcttctgacttcattctctgctgtctctgcatgtggctttcaacctcaaggttgcctcatggttctaagagggctgccgcacctctagttcaaaagtctacatccaagacaagaggaagaaggaagtacggagagtgtacactcacactcccagctatcttggcctccattctgaaggatctctgggagaaacacaagcccacaactttacctacaaactattgattccaacttagtcccttgttctctggtatctatgagatagcagagcctattgaagtacccaagaaaattaggctttatcaccaagaagaaagggggactgcatgatgcagaagggaccagccatctcaaccagatactgcacagcctaaattcaaactgttacaatataatcaaatttcatcaaccccagtcacatcttaatcttaggagttttgatcactgacttgcaaatccaaaaagtgtgttttgaggtcctaggccacaggaagaaccagtttgtctcacagacctcttacagagatggcatttgtagtctatctagattccagcttcagataatatgtactccactggcagcacgagaaataaatacacaggaaaatacaatatagcacaaaccaggagctgagggcgaatgaagatgctcagaaacacctgcactaaaagtttcctgaaaaaggtaaaaaatgtcaatcagcactgcctctggaaaccagaaacattatattatttgataacagatcctaagtctggatgctggaggtgcttaaaaatgtgcattgcgtctggctttctttccatgtatacatttatttgacgctgtagtaaaatctcctccttcaggtacccatattcatgcaagcaaatgttagcaaactgccacagtagcattttaattagtgcacaactttctctcttcaccacattataatcttttctcattttgttctgctgctatttctattatgataaaagacttaagtaaatatgtagaaatacttatatacatggacacgcaataatgattcaaatagataaacacagaaacacaaacactaagggaggtacggctggaatttttctgcaacgtgtacaattcaatgtactttcacttttcatttcaaccctcctcagtggtttcctcccagcaactgatgagaaacatcacctctgagccaatcaaaaaactaattcttccaaaaagagattgttattattcctcacaataaccagatagcctctgctttctttttcctttcttcggaatgagagactcaaccataatagaaagaatggagaactattaaccaccattcttcagtgggctgtgattttcagaggggaatactaagaagtaagtggggaatgttgattagagcctgggctacaatgcctgggaggacaagagctgaatcgctgagagtggtgagtgggcatgcagggagagtacttgcccagggaaaggggtgcagtgcctctgtgtgtgtgtgtgtgtgtgtgtgtgtgtgtgtgtgtgtgtgtgcgtgtgtgcgcatgggcacccatgcacacatgtgggcacatggagaagaggcaagtagtgcaaagaataaagacctgcagatattgggatttggtggaaggagagggagacaacataaatgaagaaatattccaactgcatgttcttaagaacttattgtggtcagaaaagggcaaaaaagtcgctaaaatctgttttggccaacacaagccatctattctaagagattctagaaagagatgtgccttatagattcatatgtaaatttgttcattacagaaatacttataatatagaaaaatctgaaccagcatacacatacaacaggcagggggtagacaaacagtgcgtggctctatcataaaagagatttctatgcagcttttaggcatcatgtttttaatgaagggcaattatttctcattttaacagcattagatccatacattaaaccttgttttgtatgttttaggtacagtatctgtttttccttccattaatcatttcctcataacccaatatatgtgtttcaatggacacaatctatttcattgtgtgaatatataattattttgtaatactttactaattttggctatttcaattatctacatttggctactgtatagattttattatatttaacaacctcagacataaatttttgtcttaatttctgtcttttttttttgcctcaacaataattcctataagtggaacttttgggtaaagcatacaacttttttttttaatagcatttccttggtagagcatgtaactttt

SEQ ID NO: 11012 - DNA, 6000 bp, Homo sapiens
actgagcacttaaagaagctgtttctggggattcaggagtaataggttggaagtgggaagtggaactgacatttcttaaaagcactttgtcccatttggttttttttttaaatacatgtaatacatataaagagcttttttaaaaactttgacagaatgatattgtcttgagaaatatgtagataagtaccacataaaacaactgaaccacatttaaaaagaaaagacgttgactgggcgtggtggctcacacctgtattcccagcagtttgggaggtcaaggcagccagatcacttgaggtcaggaattcaagaccagcctggccaacacggtgaaaccccatctctactaaaagtacaaaaattagccaggcatggtggtgcatgtctataatcccagctacttgggaggctgaggcacgagaatcgctttaacccaggaggttgtagtaagccgagattgtgccactgcactccagcctgggcgacagagtaagactccgtctcaaaataaataaatagactcaaatggttgcctcagtgatgaaagtcaagtaagatgagaacgagagtaaccattgaatttgacatgaggataacactgagaaatttgaacagattatagtgaaaagcagggaggggaaacaaatgctgacattttatcattaggttccatatgaagcatatcatattcctcagcccaaatgatttcatgtctaagaagaagaagtttttgtttctatctcgcagtgggcctgggaagagcaggaacttcctaagagcagcaccacttcacaaggcctctcccattcaggaaccatgacaggcaggggcatcctaggggcatcctagaggttctgttctctaaaccttgggaaatttagagatcctgtctttcattgtgtaagactgatgacttggtttctgtcaaaaagacccagatgctatccaatcaaaatagtgtctgttatgcaatagcttgagctccaagtactttcttcttctttcccccagaccctttcttttcagtatggctccgttagttgcaagtaaaagctctttttcccccctgaaaacaatgtcttatgagaatatgaagcatgagacaaaagtatcattgaaaggggctgataagagaagtgaaatgaggaaggggaaatagattataggtgatatgatcagaaagttaagcatgaagaggaaaatgggacaggagcctttcaaactaggaaggctaaggaacgatgggtttgaatgaagccacaaattctatttcagtctatgtgctgatgagaagacagggagtaagaactaggaaagctcagtttaagaggggaagacaagcttggaaacaaaagatgacaataaacacatctgcttctgaaactagggctcagatcaggtgtctgccatgagaaagggaccaagtgtcacaggatacacctggcccatcttccaggaaagcctacttctcttggaggggacaaaggctaatcaggagaagccctagaagtgaggttgcatctgcttgatgcaatgtctgaaagacattgcagaaggtgcagcccttacatgagcttttgagggaagaataggagttcatcataaagataagagggaacaggctagtcgcggtggctcacacctataatcccagcactttgggagaccgaggcgggtgtatcacttgaggtcaggagttcaaaaccagcctggccaacattgggaaaccccacctctaccaaaaataccaacaaagccaggcgtggtggggcacgcctgtagtcccagctacttgggaggctaaggcaggagaaatgcttgaacctgggagtcagaggttgcagtgagctgaaattgtgccactgccctccagcctgggtgacaaagtgagactccatctcaaaaaaaaaaaaaaaaaaaagttaagaagagacagaatattctggaagggggaaggcaagcactgctatctggaggcctgagaggcattgtgggttgaggtaaccacacccactccaaattcagcctgtgggtggacaagcagggaaggagaaggggaatggagaaaaagccctcaggaaagaagcaaggagactgccagagtattttcttgaccagatcaagctagacctacagtattttcctaaccagattaaggtgcataaacttgatgctgaagtcactagggagatgtggaaggatttttaagcaaaaagtgatatgatcagatttgcatttgggaaagatcattctcttggcagtctggtgggtgaaatggagcaactgtcttttgtcttaatcacaattccaactcaaagataaataacaaaactgggaagaatgtttgttacaaatataatacaggattgatatttttaagttattaaaattcacacagattgctaagaactagcaccaggaccagtcttgaaaacaatgggcaactggcctgaacagctcatttctagaatgtattaaatgtctaattaacacataaaaaactccagcctcgctaacatataaaggcacaataaataataatttaattaacttgacccatcccaatagtaaggatgtgaaataataacttctcagtgctagcagggattaggtgagggcacctccattgagggtgtgatggattcaacatttcaggaagggactgtagaaatatgctgatactaggtcgggcatggtggctcacacctgtaatcccagcactttgggagaccaaggcaagcagatcattgaagctcaggagttcgagaccagcctggccaacatggtgaaaccctgtctccactaaaatacaaaaattagttgggcatggtggcacgtgcctgtaatctcagctactcaggaggctgaggcaagaggaaaatcctttgaaccctggaggcggaggttgcagtgagccaagattacgccactgcactccagcctaggcgacagagtgagattccgtctcaaaaaaaaaaagaaaagaaaagaaatatgcttataccatttgatctgatgactctatttctggaaatttattaaacagtttatcaggacattatccaatttgcaaataaagacttatatataaagtgtattatttacaataggaaaaaaatcccaaatgtcccacaatcatggcaattatacaactattaacaatattttgagttacacaaaaagtctaattgattgcttttatgatatacataagcataaaataaatcttggaaggactatgccaaaatgtgaattgaggctatcattagttagtagattaagtgtgacctccattttataaaaatatttttctgtatttttaaattttttcataacaatgagaggtaggtttagtataaattaaggaattgtaggcctcatgatgagttgcttcaaaagaaataattgtcagggaggcaacttttgggccctgtaaacagaattcacagcctacccttaagactggcctttaatggagttgttccaacagacacagcacctaaggtggacggacgctccaataacgaagatggctatagacagaggctactgctaccttggcctctgggctttcatttttcaacccgcagaaataataatagaataacaatttatcctccgctgagttcctactatgtgctaagcactttacctgcttaatctcacttaatcctcccaacacctcttcaagaaaggtatgatcaatattattaccattttagagatcaaagaactgaggcttggaaagaggaaataactggctgaagccatcacatctcatttgtgtgtttccttgcctctcttctctttttctcttttctgcctttcatttggtccagctcatcaatgcatatcttgatttctgagctgaagaccacaaatccagttttccatctctctgaaaaacttttcatctcccttttttttttcctcagagtgaatataccaggccacctggaggcaggctttcctgagagcacctcccgcttccttttcctgctggcttttaacttttgccccgggggccacagccagctttctcacttggtagcagtggcctcttgtgcctttttctccaagatcacccaggtcagtatgtgtggttactctcagctccctgagggagtgagcagccagaggggcatagcatacttctctccctccagctcctttctccttggtcctaggccctctactcttcaagcccttttgcttgcttcagctcctgcttcttgctccatctcctcccatcttttctctcttctccaattcatttccttggactccatttctgcctttatacccttatctttattatcattgccaaaagcaaataccaaattcttgtatttgaaaaaagactttggccaggcacggtggctcacgcctgtaatcccagcactttgggaggccaaggcgggtggatcacgaggtcaggagttcgaggccagcctggccaacgtggtgaaactccgtctctactgaaaatacaaaaaatagcggggcatggtggtgcgcgcctgtagtcccagctactccggaggctgaggcagaacaatcgcttgaacccaggaggctgaggttgcattgagccgagatcatgccactgcactccaagctgggcaacagagcaagactgtctcaaaaataaataaataaataaataaaaaggagactttttttttagtgcagtgattccaagatttgttcatcgatatgcaaccaactaatgagtgttatgcctcacagttcccttctcctaagttttagagttagagtagtgggtgggaaggtgataaccacagtgtaaactaaaaatccatactggggatggaggctgagaggaggtttcaggggcaaatgaccagaacacttgcagctggaaagaactgtagagaggactttggaaagcggagggttgacagagccggtagttgtctcctgtccattcatctcctaggctgaagctcctgaggggactcacatcagttatcttgctgctccagaagggtgggagatggcagttttcccaagctccggtctccccagatgtctgctcaccctcattctcctccagctgcccaaactggattcaggtaagtctctctctctctctgggctgcatagttgaaatatatcaataaatgtaaaataaacaatcccacttggctctccctggagacctccactggatccagacaaactcagctgtcaaaggagtaagagagcgcggggcactgcgctttggcgggaatctggtcggtgtctgtccgtagttcccatctccacatcccgtctgatcccgctcgtttttcggcagctccctttgacgtgattggacccccggagcccatcctggccgttgtgggtgaggacgccgagctgccctgtcgcctgtctccgaacgcgagcgccgagcacttggagctacgctggttccgaaagaaggtttcgccggccgtgctggtgcatagggacgggcgcgagcaggaagccgagcagatgcccgagtaccgcgggcgggcgacgctggtccaggacggcatcgccaaggggcgcgtggccttgaggatccgtggcgtcagagtctctgacgacggggagtacacgtgctttttcagggaggatggaagctacgaagaagccctggtgcatctgaaggtggctggtgagtagacgggttttgactttctccgacgactcccctgctgtatacactttcgtatggatcagttactttggaaaccatcagattcattctcaaaatctcttttaggttgatgtcgccggggagggacgactatctgggcgggaggcgagggggggtaaaagaatttaccaagacagttgtaaagaaaggcagatttacttttaaaagtatgaaaatacttttcgaggaggcaaaaggcaggatcagcaaaagagaagctgactgccaggaaacaaaggcttgctggataatttatagaatagtttttatgctgtctgttgaagatg

SEQ ID NO: 11013 - DNA, 6000 bp, Homo sapiens
ttaggcgcagctctcaccttaatcgacatcagagaattcacagtcaggaggagccctgtgagtgcaaggagtgtggaaaaacctttagtcaggccttactcctcacccaccatcagagaatccatagtcactccaaaagccatcaatgtaacgagtgtggaaaagctttcagtttgacctcagaccttattcgacaccacagaattcatactggagaaaaacctttcaagtgtaacatatgccagaaagccttccgactaaactcacaccttgctcagcatgtaagaatccacaatgaagaaaaaccctatcagtgtagtgaatgtggagaagccttcaggcaaaggtcaggtctttttcaacatcagagatatcaccacaaagacaaactggcttgatgaggtgttctctccttgtagaacatcagagaaggcacattgactagcaaacagcactttaggaaaagtcaccgtagcccactgtggcatcagaaaattcttgggggctgagttggaggctccctgcctctattctctctcctttgctttccttgaagtcagctttggaccacaataatttcactgtagatgatatgctaggatcaaagttaaacagcattcttcactgcaggacatctcagagcatgtaacataactgcatgattatatactctaagcaatagagagcttcatgactgagtaagagttttgaagtcagcagtgaatcaagtgcccacagatttgcaggcttaagcagaacaagggaagattgatatttttggatatgctatagcagctttctcctatgaaataaaactgatgatgtttggaagtatactactctcaaaggtgtctttaaagtacaggttaatggtgaacattttcccccagtggcttcacctcattcctcccactggccttaccccttccttccccagtggaagcattttcaaaagcaaagataattttcgctggtgaacttcagaacttgccttcagggttagcttcatgtaattttaccatttcccatccccattccccaccacattatgtcaagattcaagttataaattaacgttttacttagactttgaaagagatttcatgagtaatttgaatgaaccttgctgaattaatctgaatagcaactgtctgacttgataactccagtgccagtatagtggctgctgcatagacactattcagtaaatgtctgatgaaagaaattggactttttccctttaatactgatgatgcaattttgaaatgttgcttgttctggaatacttcggaagttaaacaataaagtcagcttggagaggagatcatgatctttatactgtgaatagcagaatgtcacagatgaagaatattaaaattaggggcgtccactccaaaacatatcaccagagtgacaacttcagccctcagcctctgcaatccatatatatcctggtcttgggagtccatagaatactgtttccttctaataaaggtttcaaacaaatccctgcagatttatttaaagtgtttgtggaagataattttccatataagctgtgcagtattctatggtatatgtccccattgttcatcatttacgtcatttacagtttgatcaccataaacaatttttcagtgaacatccttgtatatacaactttgcctacttacagaatttttttctttgttcagttcccataatgagaatcaatgaggcagaaggtaggcatattttctaaggcttttgatgcattttccagaatgccctccagaaaagttacactaatttgtacaccctgttagcagcctatgataatgcccaattttctatacccacgtaaactgggaattattcttttgaatatttgacaatctgatgtgtacaaaatggtttgctttttttaataaaccattttttagagcagttttaagttctcagcaaaattgagaggaagatacaaagatttctcatatacccactgctcccattcatgtatagcctcccctattatcaacatcccctcccagggtgacatttgttacaattgatgaacctacattgacatattatcacccaaagaccatagtttacattagggttcactcttggtattgttcattttatgggtctggacaaatacataatatcgtgtccaccattatagtttcactgccctaaaaatcctctgtgccttacctattattcatccctccctttttccagcccctagcaaccactgacctttctacagtctttatagttttgccttttccaggatgtcatgtatacaggttgagtacagctaatctgaaaacccaaaatccaaaatgcattaaaatgtgaaacttcagcaccaacatgatgctacaagtgaaaaatttcatacctgacctcgtgacaggtcatagacaaaatccagtcaatactttgtttcggctgggtgcagtggctcaagcctgtaatcccagcactttgggaggccaaggtgggtggatcacctgaggtcaggcgtttgagaccagcctggccaacatggcgaaaccccgtctttgctaaaaatataaaaattagccgggtgtggtagcatgcacctgtagttccagctacttgggaggctgaggcacgagaatcgcttgaacccaggaggcggaggttgtggtgagccaacattgtgccactgcactccagtctgggcaacagagcaagactcaatctcaaaaaaaaagactatgtttcatgcacgaaagtatttaaactgtataaaattagctctatgtgagtaaggtatatatgaaacaaatgaatttcatgtttagacttgggcctcatccctaagatatttcataatgtatgtatatattccaaaatccgaaattggaaacacttctggccccaagcatttcagataagggatactcaacttgtagttgaaatcatacagtatgtagcttttcagacaggattctttcactttgtaatatgcttttaaattttctcaatatcttttcatgccttgatagctcatttcttttttttttcttttttttttttgacataaggtctcactctgttggccaggctggagtgctgtggtacgatcttggctcactacaacctttgcttcctgggtttaagcaattctccagcctcagccttctgagtagctgggaccacaggcgcacaccaccacggccggctaattttttgtatttttagtagagatggggtttcactgtgttgcccaggctagtctccagctcctgagctcaaagtgatccacctgcctcagcctcccaaagtgctgggatcacaggcttgagccaccgtgtctggccagcttatttctttttagcactgaataatattccattgtctgcatataccacagcaaaagaaatatctgttaaaggactgttatccaaaatacagaaagaactcttaaaactcagaaataaggaaacaacccgattcaaacatgagccaaagaccttgacagacacctcattaaagaagatatacagatggaaaataagcatatgaaaagatgctccacaccatatcccatcagggaaattgcaaattaaaacaactgtgagatgccactacacatctattagaatgaccaaaatccagaacactgacacatcaaattctggtatggatgtggaacaacaggagctctcattcattgctggtgggaatgcaaaatgatacagccactttggatgacagttaggtagtttcgtacaaaattaaacatactcttaccatgtgatacagcaatcgccctccttagtgtttacccaaaggagctgaaaaccagtgtctacacagaagtttgcacacagatgtttatagcggctttattcataattgccaaaactcagtaggtaaatgaataaataatgggtctgttttttaaagagttttttatatttttactattgaacatcttttcacatgttaatttgtcacttatcttgtgtgtagtaatgttcatatcctttactaatttttctactaaagtctccttttactcttaaacagaagtgcccttaaaaatcaaatagggaacttgcatatcagcattttaaatgcacgtgtcctttggctgaacagttctaatatgtggcatttatcctagaaatatattcttaaaagaatgtaaaggtattgaatggtgttccctctagcattgcttttaaagaaaaaatataacctaagtatgcatcaataggatagttaagtaaattatggaacactcatacagtattacttagctgttaaagaataagctgatctgtgaagatctccaagttgtcttaaccgaaaagagctaaggtgcaaaattacattatgataccataagtgttttaaaatgtataaatacttattcactaaacaaaatgttcattaagtgctactgtgtggcaggtagtgtcctagataaatatgaacaaaatacaatggttaactctaaagaggggacacttttcgttttatggtccttttgcaacttgacttttttattgtacatatattatgtatacttaaagaaaataatttgtacagcttactataatggtctttttattgatctgtctctcctaccagccagtgatgaccccgaagacagacatttaccactgtgttggttttcaatcgaaatgatgtacataaatttggggcgtgcttgcaccgtccgaatgggcctggggtccggcggcggagagtgacctgggcggggcaggaggtggcagcgggggtcctcccggctcaccagagagacgagcggccgtgctcctagagaggcagggaacccgccagactccgccactccgctgcgggcgcggcgcagggagaagcttttgtacccgcccagctgctggaggcgccggcagcgcccgccagacccgccagcccagcggcccgggctctggggaaaccggcgctcccgacaggggagcaccgggcctctgagctccctcgggagcctttcacgaggtcagctacgtctttgttgtgcgcgttcctgaacttttggtccattaaccaacaattagacacgccggtattcagtgcctggcgcggtgctagatgctgggtgtaatctcagaaaaatacattcaggggcgcgcctgagggtgctggctgctggcatctcaggtgctttacgtgcattcgtgaagaagcccatcagtatttcttgaataccaggtacgtgccgggcatgtagagtctatgcagagataaactcctgtcctcaagaacccgggtggggatggggttggtgatctgtaatacgagatggagatgagggttgggtgcagttttctatgggaataccccatctcaacctgtgtggcttacttttcctgtctatatgttagggttaggggttgccagggaaggttttacaatagaacatttacgctgggccttgggaatttacccttagaagggcggtcctgactgtatagagtgggtggaaaaaaattgagtacttagcatggcagtgacataagaaatttgggaagaccatggctttcttgaaagcaggaaccaagtcttttattccagagttaactttatgcctggaaaataatgagatgctccacaaatgttgattgagtgacaaacaaatcagcaaaacccagtaaagattagatcctggggagtttgaatttacttcaacgagtttaatgaaaactttgtgtgtgtttatgtgtgtgtgaggtatgttgaatatggtcacaactgtgctttagggaatattaatccagtgaccatagaagcggggagttgggcaggaataccgtaacagaacattattgtaacagtgaatgaaaataatagtaaaattataagaaggaaagaatggctgcaagaggcgtttttaagaattgactcactgattgtgtatagaggctgtttaaaagactgaatgcgtggaagatgatggtgatgccagtagaaatggagaaataccgagtgaac

SEQ ID NO: 11014 - DNA, 6000 bp, Homo sapiens
aattttatctttcaatttgtgtcttataatgaagtccgatgagaaagcagaacatgggctagagacttttggagcctggctcaagcgaggtcctgctccccatgcctcccagcctccccaggactggttttcagctgccggctccaccaccttctgtgcaggctcgctcccagcaggggcctgggaacagtggaaaggaggggagcggtcaggcatacacacctcccttgccaaatggaaggcatggccctaggcacttgtgaagatctgcacttccccctaggtactcctgtgcctggagtgtgacattaaattaaaaaaaaaaaggccgggcgcggtggctcacgcctgtaatcccaccattatgggaggccaaggcaggcggatcacgaggtcaggcgatcgagaccatcctggctaacacggtgaaaccccgtctccactaaaaatacaaaaaaattatctgggcatggtggcgagcgcctgtagtcccagctacttgggaggctgagacaggagaatggcttgaacccgggaggcggaggttgcagtgaaccgagattgcgccactgcactccagcctgggcgacagagcgagactccatctcaaaaaaaaaaaaaaaaaagaaaagaaaaaaaccccacataataggttgacagtggaaccacagaaaaaaggaaaaggttgggttttttttctgctttttattttctattttattattttttaatagatttatttaactagagatggggtctcactatgttgtaaaggctggactcgagaccctgggcccgagcgatcctccaacctggtcctcccaaagtgatgggattacaggcgtgagccactgcacctggtcttttcctgctattaaacaaggagctccatagtttcattttgcccctcaaaatatgtagctggccttagtagactgatattcattgccaaattatatgtaagagcaaaaaggttgaaaatgatggcctgacattgatcaatttgtgcctttaggtaacatataactgtaatataactgcaatacaactagaatataactcataaaggcaagaatcttgtctgccttgctgaaagttttataatcagggcctaatataaagtatgacacatagcacttgcttttaaatatgtattgatttaaattaattgagtacatttttgcttcatcctagtaaaaataggtatttaaaaaactgaaacagtctaaatgtcttgggatgctacttaaataactatattatattcatccaataaaatattgtaagctgtttaaaaataacaaggatgttctttaggtactgataaggaaagagcttcaagataaattgttaccatttatgtaaaacaggtgggagaagggagagggagggatgtgtgagcgctacttgcagtactcacaggcagtgactttcgtggagcgccctctagtggtatatatatacaaacggaaggatttagagaaaatacagatcggctttagctggctgagatttattttcaaagcatgttactttataagaatcaatttttatttaaaaaatttttttgagatagggtctcactctgtcgcacaggttggagtgcagcagcacgatcagtgctcactgcagcctctctctcttgggctcaacaggtgcatgtcaccacgtccagctaacaatcaattttcaaaagtacaaaaaagccatattatgtattaatgtggaattatgaattaagtagacaacaagaatcaaaacagggtgtctattatcacttctgataacataaataatgtaaagatacatattttacagattatctgtaaaagcttatacagtactgttgctgggtatttatgtaggaaagctaccatttattgaatgcttactatttcacatatggacagcatagagcatgttaaaaaattaccacacacatttactgtattcaatgtgtcactctgaatatattactgtgtacatggtctgtcattggacatggtgagagatgcagattaagctgaaattactgaggacagcaacactggaagaaaattgagctgggtgtagtggctcagcctgtaattccaacatttcagaaggctgaggcaggaggatcacttgagtccaggagtttgagaccaagggaaagaaaagaaaagaagctttcatttagccaggcatgctggcacatacctgtagtttcagctactcaggaggttgaggcataaggttcacttaaacttgagaggtaaaggctgcagtgagccctgatcacgccactgctctccagcctgtgacagagagagaccctgtctcaaaaacgagaaagaaagaaaaaaagaggcaactcaagaactcaggaatacttgcaggatctcataacatatgctatacaaaatcaattaaaataatatttaaatgctgaaagaaatgagcagctcccagggtgatacagggtggtttcacttcttggacacatctacactgagctctattcctggcaatacctgatgttcccataccccagatttctttattttattttgagacggagttttgctcttcttgcccaggctggagtgcaatggcgggatcttggctcaccgcaatctccgcctcctgggttcaagggattaccctgcctcagcctcccgagtagctgggattacaggcgcacgccaccatgcccagctaatttttgtatttttagtagaggcagggtttctccatgttggtcaggctggtcttgaactcccaacctcaggtaatctgcccgcttcggcctcccaaagtgctgggattacaggcgtgagcgggcccagcccctataccccagatttctgcaagtggcaacaccactggcttcattttgctggtggcccctctggccttcccttgtatatatcacctttgcccaaagaccatgtcagccaagggactgctctcacagctccaggaatcctcccctttcaggaaatttgaggcagttgagggcatgaaagtaaataagctgagctcatcagaggccttgtattgtggtggttaaaagagccagttctaggactagaaagcctggcttgaaatcccagctctgccactccctagtggtgtgactttagcaagttcctttacctcttttgtacctcccttttctcacctgtaagatatgggtgataatagtttaatatttgttttgttgttgtgaggattaaaggtgttaatgcaagtaaaccacttagaaccacagcacatagaatatctcagtaaggtggttagttttttttattgttgttttcagagatgctgtgatttctccaaagtggctgtgatggctcggcaggctcctgaccctctctgctcccacatgcctccaccctcatcctgatctcccatccagcttttgacagcttgcttggtgctggacaattgcacacatcttaccacccccaaatcctgcccagaagcatcttgtgcataactctcctacctgaatatgcaacagggagaaagagcgtcccaggacattttaggtttttgaagaaaaaaaaacccctttggtaaaaagccagagatccacagcggccactttttccatgggattgacccctgcaatcttgactttcaaccacacagcaccagagtagccaaacattgcttgtgtccaaacgctggctgccttgaagggtgaaagaataagcagttcccaaactcagctgaccttaatgtccttctagctccttacgcccatctcggacaaaagcagaaatgtatgtctcagttgtgtttctaccccttgctgcccaatataaatttttgtgttgcccaatataattttttgtgacgatggaaatgttctgtatttgtgttgtctgatgagataaccactaactgtagtgctattgagcatttgaaacatggctagtgtaatcaatgaaccaaatttttaattttatttaattgtaattaattttaagtggccacatgcagggagtgactgctgcattggacagcacggctctaaattgagccttttttccttatttggtgaggcatacttgccttaagattgggaagtctatttttggaacctgctaccaatgctggtctcacacttgcaattctcagctgagccaagaggtgagagaaaggtcattttccattccagatctcactctcccctgtgacactgaggaaactggcaagtgatgtgaaggctggagagcgtgtcctgtatgctggctctgtcccttctgcctgtgttgactgacatagttagttgctgcccttgctggtctcccttcctccaaccttgcctctctgagcacacctgacattcatctcatgacttccctaaaaacattctttgggaacaagaaactaacaaatcccaagtgacctatcacatatacaaacatacagggcagagtttggattcgcggtagaagaaagggaggttagacattaagaagaatggtctggtgatgacagttgtgagataatagaaacaggaaaaagaaatctaagttttctttctttttttaagaaccaataataatttctctcttttgactagtcagtagggctggggtggattggaggaagcttacatattccatgaacaagcctcttcctaaggtcctgtaagtgatcctgccccactgattagcccctagaagacccttcaaaggttggatctccaggagggagtgggggaggaaagccctgtaccaggcagcctctgctccattgctctgggggggtggggaaggcaaaccctggtcatcccctcagtctgtagcccttttgtgtgagtgcctggcaagggtgacgtggggctgtttctgcgggcacagctgcagcaattaccggagtggaggcagggcccaggcagcactgccctccaagatcttcccttgggcttttcagcagtaaggggacatgcaccccaagggcctccacttggcctgaccttgctgcgggggctctctgtccccaggaacagtagagatggcaagcttatcaagaccctctctgcccagctgcctctgctccttcctcctcctcctcctcctccaagtgtcttccagctatgcaggtaagacatgttttttttcctgccctggggagaccctgaaaacagaaaggctagtttcctggggcttagctccttcaaacatcctcaagttgctatattatctttctaaaacatagacctactgacatgcctcccttcctcagaaaccttccgtgggtggttcttacagccttcaagatggagtccagactcttttttttttttgagacagagtctccctctgttgctcaggctggagtgcagtggcatgatctcggctcactgcaacctcagcctccctggttcaagcgattctcctgacttggcctcccaagtagcggagactacaggcgcctgccaccacacccagctaaattttttcttttctttttttttttttttttttttgtattttagtacagacggggtttcacatgttggccaggatggtctcgatctcttgacctgctgatccgcccgcctcagcttcccaaagtactgggattatgggcgtgagccactgcactaggcctaatttttttatttttagtagagatggggtttcaccatgttggccaggctggtctggaacccctgacctcaagtggtctgccctcctcagcctcccaaagtgctgagattacaggcatgagccattgcgtctgacccagactccttaatgtgactaactcaaggctttccttgaactacttcttacttgtctttccagctttgtcttttcacctctcaaattgagataaaataataacaacctcttggagttctcatcaggattacatgaaatgagatatgtaacatgcttagcagtgcctgtccatagtaaatctcaataaatgtttgtggaattataatatcttgtcatgtttgagactttgctctgcataatcaggcaccagtag

SEQ ID NO: 11015 - DNA, 6000 bp, Homo sapiens
acggaatattatgcaaccataaaaaggaatgagatcaagtcctttgcagagatacgaatgaagctggaagccattatcctcagcaaactcacacaggaacagaaaaccaaacaccgcatgttctcacttataattgggaactgagcaatgagaatacatggaaccagggagaggaaaaacacacaatggggcctgttcggggagggcagtgatggggggatcattaggaaaaatagctaatgaatgccagggttaacacctaggtgatgggttgataggtacagccaaccaccatggcacacgattacctatgtaacaaacctgcacatcctgcacacgtaccctggaacttaaaattaaattaaattaaattaaattaaaagataagcttaaagcattaaagaaaaataattagataaaagaagtctttgatttacaaaatcctgaaacaatagttttaattttgcttttaacatatacgtaagtcctttagtacagctctctttcagaggtgcagcttaattccctctcttaagtgtggcttggacttaatgatgcacttctgatatggcctgtctctgtgttcccacccaaatctcattttgaattgtcatgcgaattctaatccccacatattggcggagggacttcatgggaggtgatcgaatcatggggatgattcccccaagctgtggaagtcagcggttgaacctatttttcctaatgctcccctcagcactgccctcccataataggctccagtgtgtgatgttcctctccctgtgtccatgtgttctcattgctcagctcccagttacaagtgagaacatgtggtgtttggtttcctgttcctgtgttagcttgctgaggataatggcttccagcttcatccatatccctgcaaaggacttgatctcattcctttttatggctgcataatattccatggtgtatatgtaccatataaggggattttccccacttcactctgcatttttctctcctgccaccatgtgaagaatgacatgtttgcttccccttctgccatgattgtaagtttcctggggcagcctcctcagccatgcacaactgtgagtcaactaaacctcttgcctttataaattacccagtctcaggtatttctttatagcagtgtgagaacagactaatacaacttctaactgatagagtaatgttgacataacagtttgtgactctgggtgtagaatgtgaaactcactatggcttccaccttctctctctctgtctctgggatcatgagctcttggggacccagctgctgtgccataagcagccctgcaggaaggtccatgtggctaagaactgaggccccctgggaccagacagcaaggaactaggcttttccaacagccatgtgactaagccatgtttcacatgaatccctagccccagtgaagccctcagacgatgcagccctaggctgacaactggactgcaaccttgtgagaggccctgagccagaagcactcaggaaaaccgctcctggattcctgaccattagaaactgtgggagatgatgaatatttgttgttttgagctgctaagttttacataatttgttacacaatagtaaataactaatacattttcacaagagaggatgtattattacacattaatttgcatttgctctaaatttatcatcatcatattactatttttgagacagggtcttgctctgtcacccaggctggagtgcagtggcatgatcaccatgcactgcagtgtcgacctcctgggctcaagggatcctctgatctcagcctcttgagtagctgggactataggcatgaattaacatgcctggctaattttctaatttttttgtagagatgggggtttcaccatgttgcccaggctgatcttgaacttctggagtcaaatctgccttcctctgccttcaacagtgctaggattgcaggcgtgagccaccacacctggtctaaattaactataagatattaaacatgtaacttagttttaaaaggaaaggagaatttccacggctgaagaggatgtattttattactattcacaatgatcactttacttgaacttcaatttccaactgtgtccaaattaaacacaaaaggaagatccagcccttcctgggctgattctatcatggctcccaacaaccagctcctggtcattcaccttcccccagttattcaaccaactctaatgtaggtgctgctgtgaagggatttagcagatataattaagggcctcaattagttgactttaggctgagtttatcctgcttggactgtcctaataaggagagtccttgaaaggactgggttcttcctgagcatagagattcacagtgtgagagggattcagcataaggggtttcctccactgtgggctttgaaaatgaaggggctgtgtaggaaaggacgctggtgggcaccatgcattgagtgcagccctccctgttctctacagtgacagccagtgaggaacagggacctcagtcttacaactgccagaaactgcattctgccacctctgtataagcctgaaggaggattcaaaatgaaaacacaggtttaggaagaccggaacagagattccatccacatcatgcccagatttctgattaagaaactataaacaacaaatgagtgttatttggccaggcgtggtagtgcacacctgtatcctaacatttgaggagctgacacaggaggaacacttgcagccaggactttgagaccagctaggataatatagtgagacactcgtctctacatttctttttaattagctgggcatggtggcacttgcctgcagtcctagctactctgaagactgaggtaggagggtcccttgagcccaggaatttgaggctgcagtgagccatgatcatgtgactgcacttcatcctggatgacagagggagactctgtctctaaaaataaatcaatgaatacaataaatgggtgctgtttaaagccaatgtttgtgacaatttgttacccagtcttataaaattcatacacagactcaaaagactcctggaatgaactgatgaattgatacgcacactagttacataaaataaaatcttttttaacttttttagtgttttacattttataattttctgtgatgcaatttaatacactcataattcattcattcagccaagaaaaaataatttagtccctacaatgaaccaggtatgccctcatatgctcaagtgcctgacattctagaagcttcacaagaatgaggtggagccactggagtgttttaggtggagaaatgacacactctgactcatagtagcaggaccactatagagagaacactcatgtagcaggtcatggaacagtgctagagccacagttcaggagtgagagggtggtggggattaaggggagaagagggcctgagggatgagagggacggagggaagggctggaggagcaggaggtgaggaaaaggagcagaggaaagaattccaaagcagcagaactcttaggtttaaacacattgttttatagattttaatacatccatctacagagcttcgctgggtgttctttgcagttggcctttaatatcttatgtgggtctgcctagaaactaattgttttttatgttaatcaggtttaaaaaatactaagtattcctaaaaaatatacactccactcacatgtggatacttcctaaaaacaggcagtgcgtgagcactagtgaggggcattgtgactgcactgaacacttacaactgtgaggtgaataaagtttgtgctggctcctggttgcaacatatagtaacatagtgtggtactttgtcttgaggagatgtcctggactcacacggaaacttagggctacggaatgaaggtaaatttaaaataaaacaagcgggagtcacagatacactgtctgggaaagtgaaacttaagagctttgtgagtcgtgttgtaatgcttttagatgcatttatataccaacaggccaaagtcacattttttaccgattagattcctgatcattcaggggttaccaaggttatgctacccactatagttaataaacaaaaagcaaactggtctctattctatctcatgcactcaggcacaacttttccagatttaagggggaaaaaaaaccctgtctttacacctacaatcccagggcgagctcactctctggcaacaagctccctggggtgatttttcttctagaagagtacaggaggacaggcaaggagtgggaggcagggagtccagttcagggacagggattccgggatgaaaagtgaagggagagggccagggaccttgccgagggtttctccctggtttctcagacagctcctgggccaagactcagggagacactgagacagaacgcttggcacaagagtagcggggtcagggcgaagtcccagggcctcaagcgtggctctcagggtctcaggccccacaggcggtgtatgggttggggaggccccgcgttggggattctctcctccttctcctaacctgtgtcgggtccttcttcctggatactcaccgggcggccccagttctcactcccattaggtgacaggtttttagagaagccaatcagcgtcgccgcggtcctggttctaaagtcctcgctcacccacccggactcattctccccagacgccaaggatggtggtcatggcgccccgaaccctcttcctgctgctctcgggggccctgaccctgaccgagacctgggcgggtgagtgcggggtcaggagggaaacagcccctgcgcggaggagggaggggccggcccggcgggggcgcaggactcggcagccgcgccgggaggagggtcgggcgggtctcaacccctcctcgcccccaggctcccactccatgaggtatttcagcgccgccgtgtcccggcccggccgcggggagccccgcttcatcgccatgggctacgtggacgacacgcagttcgtgcggttcgacagcgactcggcgtgtccgaggatggagccgcgggcgccgtgggtggagcaggaggggccggagtattgggaagaggagacacggaacaccaaggcccacgcacagactgacagaatgaacctgcagaccctgcgcggctactacaaccagagcgaggccagtgagtaactccggcccagggagcagatcacgacccccacctccatgccccacggacggcccgggtactcccgagtctccgggtctgggatccaccccgaggccgcgggacccgcccagaccctctacctgggagaaccccaaggcgcctttaccaaaatccccgcgggtgggtccgggcgagggcgaggctcggtgggcggggctgaccgagggggtggggccaggttctcacaccctccagtggatgattggctgcgacctggggtccgacggacgcctcctccgcgggtatgaacagtatgcctacgatggcaaggattacctcgccctgaacgaggacctgcgctcctggaccgcagcggacactgcggctcagatctccaagcgcaagtgtgaggcggccaatgtggctgaacaaaggagagcctacctggagggcacgtgcgtggagtggctccacagatacctggagaacgggaaggagatgctgcagcgcgcgggtaccaggggcagtggggcgcctccctgatctcctgtagacctctcagcctggcctagcacaaggagaggaggaaaatgggaccaacactagaatatcgccctccctctggtcctgagggagaggaatcctcctgggtttccagatcctgtaccagagagtgattctgagggtccgtcctgctctctgggacaattaagggatgaagtctctgagggagtggaggggaagacaatccctggaagactgatcaggggttccctttgaccccacagcagccttggcaccaggacttttcccctcaggccttgttctctgcctcac

SEQ ID NO: 11016 - DNA, 6000 bp, Homo sapiens
gtattcagaatccacaaagaacttaagcaaatttacatgaaaaaaaacttcattaaaaagtggacaaagaacatgaacagacacttctaaagaagacatacatgtggccaacaaaaatatgaaaaagaaagctcccatcactgatcattagagaaatgcaaatcaaaacgacaaatgagataccattttatgccagtcagaatggcaattattaaatagtcaagaaacaacagatgctggcaaggttgcggagaaataggaatgcttttacactgttggtggaaaagtaaatggttaatccattgtggaagacagtgacagtgtggcgattcctcaaagatttagaaccagaaataccatttgacccagcaatcccattgcagggtatatacccaaaggaatataaatcattctattataaagacatatgcatgtttacattcatggcagcactattcacaatagcaaagacatggaatcaacccaaatgcccatcaatgatggtctggataaagaaaatatggtacatatacaccatggaatattatgcagccataaaaaggaaggagatcaagtcctttgcagggatatggatgaagctggaagccattatcctcagcaaactcacacaggaacagaaaaccaaacaccacatgttctcatatataactgggaactgagcaatgagaacacatggacacagggagaggaacaacacacactggggcctgttgggggagggtggtgatgggaggatcattagcaaaaatagctaatgcatgccagggttaatacctaggtgatgagttgacaggtgcagcaaaccaacatggcacacatttacctatgtaacaaacctgcacatcctacacatgtaccctggaacttaaaaaaaaattaaattaaaagacaagcttaaagagttaatgaaaaataattagatacaagaagactttgattttcagaaacctgaaacaatagttataattttgcttttaacatatattcaaatcctttgatactgttcctttctagaggtgcagcttaattccctctcttgagtgtggcttggacttaatgaggcacttctgaaatggcctggttctgtgttcccacccaaatctcatcttgagttgttatgcaaattgtaatccctacctattgggggagggacctcatgggagttgattggatcatggggacggtgcccccatgctgttctcctgatgctgagggaattctcatgagatctgatggttttataaggggcttttccctgcttcattgtgcatttctctctcctgtcaccacatgaagaaggacgggtttgcttccacttctgccatgactgtaagtttcctggggcagcctcctcagtcatgcagaactgtgggtcaattaaacctctttcctttataaattacccagtctcaggtatttctttatagcagtgtgagaatggactaatacaacttctaacttatagaatagtgccaacataacagtttgtgactctgggtgtagaacataaaactaactgcggcttccaccttctctctctctgaatctgggatcatgagctctgggggaagccagccgctgtgccataagcagccctgcaggaaggtccacatgactgagaactgaggccttctgggaacagacaacaaggaaccaggccttttccaacagccatgtgactgatccatgtttcttgtgaattcccagccccagcgaagccctcagatgctgcggcccctggctgacaactggagtgcaaccttgtgagaggccctgagcaggaagcactcagggaaacctctcctggattcctgacgattggaaactgtgggagatgagaaacatttgttgtttcgagctaagttttacgtaatttgttatgcaacagtaaataatatattttcacaagagaggatgtattattacacatcaaattgcatttgctctaaatgtgtcatcatcatcattattatttttgagacagggtcttgctctgtcacccaggctggaatgcagtggcatgatcaccatgcactgcagtgtcgaacgcctggggtcaagggactctctgacctcagcctcctgagtagctgcgactaccatcatgaactaccatgcctggctaattttctaattttttgtatagatggaggttttgcccaggctgatcttgaacttctggagtcaacaaatctccattcctctgccttccacagtgctaggatgacagatgtgagccaccacacctggcctaaattaattataagatattaaacatgtaacttagttttaaaaagtaaggacaatttccatggctgaagaggatgtattttatgaccattcacaatgatcacgttacttgaacttcactttccaactgtgtcccaattaaacacaaaaggaagatccaacccttgctaggctgattctatgatggcctcaacaagcagctcctggtcattcaccttcctccagttattcaaccaactctaatgtaggtgctgctgtgaagggatttagcagatataattaagggtctcaattagttgactttatgctgggtttatcctgcttggactgtcctaatcaggtgagtccttgaaaggactgggttcttcatgagcatagagacttacagtgtgaaagggactcagcatgaggggtttcctccaccatgggctttgaaaaggaaggggctatgggccgggcgcggtggctcacgcctgtaatcccgacactttgggaggccgaggcgggcggatcatgaggtcaggaggtcgagacaatcctggctaacaaggtgaaaccctgtctctactaagaaaaaaaaaattagagcatagtggtgggcgcctgtagtcccagctacttgggactgagacaggagaatggtgtgaacccaggaggcggagcttgtagtgagcagagatcattgggccactgtaccccagcctgggctacagagccagactccgtctcaaaaaaaaaaaaaaaaagaaaaattaaggggctgtgtaggaaagaacgctggtgagcaccgggaattgagcccctcccagttctctacattgacagctagccaggaacagggacctcagtcttacaactgcaagaaactgcattctgccacctctgtataaacccgaaggaggattcaaaatgaaaacacagcttttggaagcccagaatggagattctatccacatcttgcccagatttctgaccaaggaactataagcagataaatgtgtgttgttttgccaggcatggtagtgtgcgaatgaattgatgaattgatatacacactagttgcataaaataaaatctttctgaactttttcagtgttttacagtttataattatctgtgatgcaatttaatacactcatatttcattcattaagtcaacaaaaattaacttagtccctacaatgaacgaggtatcccctcatatgctcaagtgcctgacactccagaagcttcacaagaccgaggtggagacactggagtgttttaagtggagaaatgacacactccgactcacaggagcagggccactgtgaaaagaacagttacgtagcaggtcatgggacagtgctagtgtcacaattcatgagtgacagtgtggtgggaactaaggggagaggagggcctgaaggatgagaaggatggagggaagggctggagaagcaggaggtgaggaaaaggagcagaggaaagaatttgaaagcagcagaattcttaggtttaaagacattgttttatggattttaatacatcaatctacagagcctaggagggtgtccttggcagttgtcttttaatacctcatgtgggtctgcctaaaaactattttttatgttaatcaggtttaaaaattactaagtgttcctataaaatatacacaacacttagaagtggatacttcctaaaaacaggcagtgcatgagcactagtgaggggcattgtgactgccttgaacagttgcaactttgaggtgaataaagcctgtaatggcttctggttgcaacatataggaacacagtggctactttgtattgaggagatgtcgtggactcacacagaaactcagagctaaggaatgatggcaaatttaaagtaagacaagcaggagtcacagatacattgtctgggaaagtgcaacttagtagctttgtgagtcctgttgtaatgcttttggacacatttatacattaaggggccaaagtcacattttttacctattagattcctgatcattcaggggttaccaagattctgctacccactgtagttaataaacaaagagcaaattggtctctattctgtctcatgcactcaggcacaacttttccggattaaaaacaaaaacaacaacaacaaaaatctacacctccattcccagatcaagcttactctctggcaccaaactccatggggtgatttttcttctagaagagtccaggtggacaggtaaggagtgggagtcagggagtccagttcagggacagagataatgggatgaaaagtgaaaggagagggacggggcccatgccgagggtttctcccttgtttctcagacagctcctgggccaagactcagggagacattgagacagagcgcttcgcacaggagcagaggggtcagggcgaagtcccagggccccaggcgtggctctcagagtctcaggccccgaaggcggtgtatggattggggagtcccagccttggggattccccaactccgcagtttcttttctccctctcccaacctacgtagggtccttcatcctggatactcacgacgcggacccagttctcactcccattgggtgtcgggtttccagagaagccaatcagtgtcgtcgcggtcgctgttctaaagcccgcacgcacccaccgggactcagattctccccagacgccgaggatggccgtcatggcgccccgaaccctcctcctgctactctcgggggccctggccctgacccagacctgggcgggtgagtgcggggtcgggagggaaaccgcctctgcggggagaagcaaggggccctcctggcgggggcgcaggaccgggggagccgcgccgggacgagggtcgggcaggtctcagccactgctcgcccccaggctcccactccatgaggtatttcttcacatccgtgtcccggcccggccgcggggagccccgcttcatcgccgtgggctacgtggacgacacgcagttcgtgcggttcgacagcgacgccgcgagccagaggatggagccgcgggcgccgtggatagagcaggaggggccggagtattgggaccaggagacacggaatgtgaaggcccagtcacagactgaccgagtggacctggggaccctgcgcggctactacaaccagagcgaggccggtgagtgaccccggccgggggcgcaggtcaggacccctcatcccccacggacgggccaggtcgcccacagtctccgggtccgagatccaccccgaagccgcgggaccccgagacccttgccccgggagaggcccaggcgcctttacccggtttcattttcagtttaggccaaaaatccccccgggttggtcggggctgggcggggctcgggggactgggctgaccgcggggtcggggccaggttctcacaccatccagataatgtatggctgcgacgtggggtcggacgggcgcttcctccgcgggtaccggcaggacgcctacgacggcaaggattacatcgccctgaacgaggacctgcgctcttggaccgcggcggacatggcggctcagatcaccaagcgcaagtgggaggcggcccatgaggcggagcagttgagagcctacctggatggcacgtgcgtggagtggctccgcagatacctggagaacgggaaggagacgctgcagcgcacgggtaccaggggccacggggcgcctccctgatcgcctgtagatctcccgggctggcctccc

SEQ ID NO: 11017 - DNA, 6000 bp, Homo sapiens
aaggctttagggccccagattctttcctctccagaggagagatttcctgttctctttcctctgttcttctgtatccacctttggctgaattacctttccctccaattcctcagcttccactacccttgaacctggactgttaaaacttatccccttaatggccgggcaccatagctcacgcctgtaatcccagcactttgggaggctgaggcaggcagatcacgaggtcaggagatcgagaccatcctggctaacacgatgaaaccccgtctttactaaaaatacaaaaaattagccgggcgtggtggcaggtgcctgtggtcccagctactcaggaggctgaggcaggagaatggcgtcaaccaggaggtggaggtggcagtgagccgagatcacgccactgcactccagcctgggtgacagagcgagactccgtctcaaaaaaaaaaaaaaagaaaagaaaagaaaagaaaaaagaagaagatacttgaacaagcatattgatagcagcacaattggtgattgcaaaaatatggaaccagcccaaatgcccatcaatcaatgaatggataaagaaaatgtaattttatatatatctatatctatatatatctatatctatatatagatatatagatatataatggaatactacacagtcataaaaagaaaggaaataatggcattcaaagcaacctggatggagctggagaccattattctgagtgaattaactccggaatggaaaaccaagcattgtatgttctcacttataaatgggagctaagctatgagaacacaaaggcttaagaatgatacaatggactttgggaactggcgggggaagggtgggagggagctgagggatacaagactacacattgtgtacagtgtacactaatcaggtgctggatgcgccaaaatcttggaaatcaccactaaagaacttatccatgtaaacaaacaccacctgttcccccaaaactattgaaatttaaaaatgttttaaataaataaaatttaaaaggattaaaaatggattatttgctttcaaaaaaaaagaaatcaccacttgcacagtttttatgtaatgtgaaatatgaatatccacaattacatgaaaagctgttaaaaataatcctcccagtccgggcatggtagctcacacatgttgttccagctactgggaaggctgaggtgagagaatcccttgagcccaggagttctaggctgcagtgagctattatggtgccactgcactccagcctgggtgacagagcgagaccctgtctctaaacaacagcaataataatccttccttcctgagtcagacgggcatggagacgcttctggaaggaacaccgcaatggctgcgcagggacagccccaggtccagttcaaacttgtattggttggtgatggtggtactggaaaaacgactttcgtgaaacatcatttgactggtgaatttgagaagaagtatgtagccaccttgggtgttgaggttcatcccctagtgttccataccaacagaggacctgttaagttcaatgtatgggacacagccggcctggagaaattcagtggactgagagatggctattatatccaagcccagagtaccatcatagtgtttgatgtaacatcgagagttacttacaagaatgtgcctaactggcatagagatctggtatgagtgtgtgaaaacacccccactgtgttgagtggcaacaaagtggatattaaggacaggaaagtgaaggcgaaatccattgtcttccaccgaaagaagaatcttcagtactacgacatttctgccaaaagtaactataactttgaaaagcccttcctctggcttgctaggaagctcattggagaccctaacttggaatttgttgccatgcctgctctcgccccaccagaagttgtcatggacccagctttggcagcacagtatgagcacgacttagaggttgctcagacaactgctctcccggacgaggatgatgacctgtgagaatgaagctggagcccagcgtcagaagtctagttttataggcagctgtcctgtgatgtcagttgtgcagcgtgtgtgccacctcattattatctagctaagcggaacatgtgcttcatctgtgggatgctgaaggagatgagtgggcttcgcagtgaatgtggcagttcaaaaaataccttcattgtttggacctgcatatttagctgttttggaacacagttgattccttgagtttcaaatatagactgctacagtcacatcacaatattcagcggtgaaatcttgtttgttactgtcattcccattccttttcgtttagaatcagaataaagttgtatttcaaatatctaaaaacaaaaaatccttcctttttcaactcaatatttgtgtaaggctagattttttaacatatacacttcaatcaaagtaagaaaatggctgggatgcagctggaggccataatcctaagtgaattaatgcaggaacagaaaaccaaatactgcatcttctcacttataattgggagctaaacactgagcacacatagacataaacatgtgtataacagacactgtagacgactagagtggagagggtggggacgtgggttgaaaaactacctgtgggtactatgttcactacctgagtgacaggatccataccccaaacctcagcatcagacaacatacccatgtaacaaaccggcacatgtaacccctgtatctatttttttctggttttttttttttttttttttgagacaatttcactcttgttgctcaggctggagcgcaatggcgtgatctcggctcatcgcaacctctgcctcccgggttcaagcgattctcctgcctcagcctcctgagtaggtgggattacaggtatgcgccaccacctccagctaattttgtatttttagtagacatggggtttctccatattgataaggctggtctcgaactcccgactgggattacaggcgtgagccaccgcgcctggccaccccctgtatctaaaataaaagttaaaaatttaaaaataagtacataagagaatgtatgctatgagccaagaatgatgcttgcaaaattttgcaagaacaacacttatgaaaatgaaaaataatcactcttcttgttaccaaaaatcttggtagctgcagaaggtgggatctttcctcactgggagtcgcagagccaatacatgaaaccaaaagtgagccttaagcagagcaagctttatttcctgcacaggacttgtaaagaggagagcagctctgccaagtcaacttctccactagtgaggcggctagtgaggggtgagggggctaaaatgtaggattgctctaatgaaggggttgggcattaaaagtgagggggaggaatattcatatgttttatgggaacaggcagtgaacttctccaaactggtaataccgctttccttttggtccttttaggacttcttctactcatcgtcatggagatcgtcaactgtcatggcatggatgggagcgcaatttagcctggaaacgggattacaatgaagcgtgaggtctttttgaagtcatttggccggctctcttggttgtaacgagtctcagctggtttgactacaaaggcaacttcttgaagcagatcctgtttttttgtttttgtttttgttttttgtttcttgttttttccccctagacatctcactctgtcgcccaggctggagtgcagtggtgtgatctcggctcactgcaaccaccacctctcgggttcaagcaattctcctatctcagcctccagagttgctggaattacaggcgcgcaccaccacacccggctaatttttgtattgttagtagagacagggtttcatcatgttggccaggttagtcttgaactcctgacctcgtgatctgcctgcctcggcctaccaaaatgctgcgattacaggcgtgagccaccgttcccggcctatacgttgtttattttggaaaaattaaaaattaagttttttttcattaaagatatgttatttccgatcaagagatcaagaccatcctggccaacatggtgaaaccccgtctctactaaaaacacaaaaattagctgggtgtggtggcacacgcctgtagttccagttactggggaggctgaggcaggagaatcgcttgaacccgggagaaggaggttgcagtgagccgagatcatgccactgcactccagcctggggacagagcaagactctgactcaaaaaaaaaaaaaagttgtttctattaacatgtaatgggttattaatattctcttaaatgaattaatatttttaatattttgttttaatatcttttaatttatatatgataaaaattgatacaatccacagaaacaaaatttatttgggtcctcactaatttcttttttcttgttgcccaggctggagggcaatggcacgatcttggctcaccgcaacctcctcctcctgggttcaagtgattctcctgcctcagcctcccaagtagccaggattacagccatgcgccaccacgccggctaattttttggacttttagtagagacagggtttctccatattggtcgggctggtctcgaactcccaacctcaggtgatcagcccgccttggcctcccaaagtgctgagattacaggcgtgagccaccgcgcccagccaggactaatttctaagagtgtgcagagataccgaaacctaaaagtttaagaactgctgattgctgggaaactctgcagtttcccgttcctctcgtaacctggtcatgtgtccttcttcctggatactcatgacgcagactcagttctcattcccaatgggtgtcgggtttctagagaagccaatcagcgtcgccacgactcccgactataaagtccccatccggactcaagaagttctcaggactcagaggctgggatcatggtagatggaaccctccttttactcctctcggaggccctggcccttacccagacctgggcgggtgagtgcggggtcgggatggaaacggcctctaccgggagtagagaggggccggcccggcgggggcgaaggactcggggagccgcgccgggaggagggtcgggccgatctcagcccctcctcgcccccaggctcccactccttgaagtatttccacacttccgtgtcccggcccggccgcggggagccccgcttcatctctgtgggctacgtggacgacacccagttcgtgcgcttcgacaacgacgccgcgagtccgaggatggtgccgcgggcgccgtggatggagcaggaggggtcagagtattgggaccgggagacacggagcgccagggacaccgcacagattttccgagtgaatctgcggacgctgcgcggctactacaatcagagcgaggccggtgagtgaccccggccaggggagcaggtcacgacccctccccatcccccacggacggcgcgggtcccctcgaatcttcgggtcccagattcaccccaaggctgcggaacccgcccagaccctagaccggggagagtctcaggcgcctttacccggttctttttcagtttaggccaaaatgcccacagggtggtggcgacgggggcggggcttggtgggcgggactgactaaggggcggggccagggtctcacaccctgcagtggatgcatggctgcgagctggggcccgacgggcgcttcctccgcgggtatgaacagttcgcctacgacggcaaggattatctcaccctgaatgaggacctgcgctcctggaccgcggtggacacggcggctcagatctccgagcaaaagtcaaatgatgcctctgaggcggagcaccagagagcctacctggaagacacatgcgtggagtggctccacaaatacctggagaaggggaaggagacgctgcttcacctgggtaagagggtccacagggctactctcccatctccttcttgggctaggactgtgcccac

SEQ ID NO: 11018 - DNA, 6000 bp, Homo sapiens
ccatcccatctaggaagtgaggagcgtctctgcccggccgcccatcgtctgagatgtggggagcacctctgccccaccgccctgtctgggatgtgaggagcgcctctgctgggccgcggccctgtctgggaggtgaggagtgtctctgcccggccgctccgtctgagaagtgaggaaaccctctgcctggcaaccgccccgtctgagaagtgaggagcccctccgtctggcaaccaccccgtctgggaagtgaggagcgtctccgcccggcagccaccccgtccgggagggaggtggggggggtcagccccccgcccggccagccgccccgtccgggaggtgaggggctcctctgcccggccgcccctactgggaagtgaggagcccctctgcccggccagccgccccgtccgggagggaggcgggggggggggggtcggccagccgccccggccgggaggtgaggggctcctctgcccggccgcccctactgggaagtgaggagcccctctgcccggccagtcgccccgtccaggagggaggtgggggggtcaaccccccgcccggccagccgcccagtccgggagggaggtggggggtcagccccccgcccggccagccgccccgtccgggaggggggagggggggtcagccccctgcccggccagccgccccgtccgggagggaggtggggggggtcagccccccgcccggccagccgccccgtccgggagggaggtggggggatcagccccctgcctggccagccgccccgtccgggaggtgaggggcgcctctgcccggccgcccctactgggaagtgaggacccctctgcccggccagccgccccgtccgggagggaggtgggggggtcagccccccgcccggccagccgccccgtccgggagggaggtggggggatcagccccctgcctggccagccgccccgtccgggaggtgaggggcgcctctgcccggccgcccctactgggaagtgaggacccctctgcccggccagccgccccgtccgggagggaggtggggggaacagtcccccgcccggccagccgccctatccaggaggtgaggggcgcctctgcccggccgcccctactgggaagtgaggagcccctctgcctggccagccgccccgtccgggagggcggtgggggggtcagcccccctcccggccagccgccccatctgggaggtgaggggcacttctgccgggccgcccctactgggaagtgaggagcccctctgcccggccacgaccccgtctgggaggtgtgcccagcggctcattggggatgggccatgatgacaatggcggttttgtggaatagaagggcgggaagggtggggaaaaaattgagaaatcggatggttgcggggtctgtgtggatagaagtagacatgggagacttttcattttgttctgtactaagaaaaattcttctgccttgggatcctgttgatctgtgaccttatccccaaccctgtgctctctgaaacatgtgctgtgtccactcagggttagatggattgagggcggtgcaagatgtgctttgttaaacagatgcttgaaggcagcatgctcgttaagagtcatcaccactccctaatcttaagtacccagggacacaaacactgcggaaggccgcagggtcctctgcctaggaaaaccagagacctttgttcacttgtttatctgctgaccttccctccactattgtcctatgaccctgccaaatccccctctgcgagaaacacccaagaatgatcaataaaaataaaaaataaaataaaaaaaaaaaaaaaaaaaaaaaaaaaaaaaagaaagacccaagccttgctaggctgattctatcatcccccccatgatagacgtgtaaccttggtcattcacctgaccccagttattcaaccaacaataatgtaagtcctgccttgaagggatttttgcatatataattaaggtcctaaatcaattgactttaagacagggattatccctggtcgggctgtcctcatctggcgagcccctgaaaggactgggttcttcctgatcagagagattcacagtgtgagagggattcagtgtgagggggttcctccaatgtggattctaaaaatgaaggggctgtgtggcaaagaatgctggtgggcaccaggaattgagagcagcctctctctaccttgacagtaggcaaggaacaggaaccttagtcctacaactggcagaaactgaattatgtcgcctctgtataagcctgaaggaggccctcaaaatgaaaacacagttttgggaaaccctaaacagagaaccctccaatcatgctcagatttctgactaaggaactgtaaataaataaataagtgttgtttggtcaaccatggtagctcatgcctgtaatcctaaggtttgtgggaatgacacaggaggattacttgcagccaggagtgagactagcctgggcaatttgaggagaccttcctctctacaaaaaggaattttttttttttttaatttacctgagcacggtggtacttgcctgtagtcccaggtactccagacactgaggcagggggacctctagaggccaggagtttgaggttgcagggaaccatgatcatgccactgcacttcaccgtggataacagagggagaccatgtctctaaaaataaataaataaatacaataaatgggtgttgtttaaagccagtgtttgtggtaatttgttatgcagtcatacaaaagtcatacacagactcaacagacacatggaatgaatttataaattgataagcacactacatgagtaaaataaaatatttcctttttccagtatttttcattttataatattccatgatgcgattaaatttttatacaatcatatttcattcaactagacaacaaaaattaatttagtgcctatgctgaaccaggtatgccctcatatgctcaagtgcctgacattctagaagcttcacaagaccgaagtggagccactggagtgttttaggtgaagaaacgacacactttgactcacagtagcaggaccactgtggagagaacactcaggtggcaggtaatggaacagtgctagagccactattcaggagtgacagagtggtggggactaagggaagaggagggcctgagggatgagagggacggagggaagggctggagaagcaggaggtgaggagaaggagcagagggacagaatttgaaagcagcagaattcttagctttaaacacattgttttataaatttttaatacatccatctacagagcctagcagggtgttccttgcatttggcctttaacaccttatgtgggactgcctaaaaattaattgctttttctgctttttttcaggtttaaaaaaatactaagtgttccaataaaacatgcacaccacttagatgcggatacttcctaaaaacaggaagtgcatgagcactggtgaggggcattgtgactgcgttgaacacttgcaactttgaggtgaatgaatgtattggctcctggttgcaatatacaatcacacgttgtgctactttgtattgtcaggagatgtcctggactcccacagaaactcagggctatggaatgaaggtaattttagaatacaacaagagtcacagatacatagtctgggaaagcaaaacttaggagctctgagagttgtacaactgtaatgcatttagacacatttatatatcaaggggccaaagtaacagtttttacacataagattcctgattggtcgggcgcggtggctcatgcctgtaatcgcagcactttgggaggccgaggcgggaggatcacgaggtcaggagatcgagaccatcctggctaacacggtgaaacccgtctctacaaaaaaattagccgggcgtggtggcgggcatctgtagtctcagctactcgggaggctgaagcagaagaatggcgtgaacccgggacgcagagcttgcagtgagccgagatcgcgccactgcactccagcctgggcggcagagagagactccgtctcaaaaaaaaaaaaaaaaaaaaaaaaaaaaaaaaaaaaaaaaaggttcctgataattcaggggttaccaagattctactactcactgcagctaataaaaaaaaaaaagaaagaaagaaactggtctctgtcctatttcatatgctcaggtacaacttttccagagaagaagaggaggggggcggggaggagcaggaggaggaggaaagaaggaggagaaggagaaggagaaggagaaggagaggaagaggaagaggaagaggaagaggaagaagaagaagaagaagaagaagaagaagaagaagaagaagaagaagaagaagaagaagaagaagaagaagaagaagaagaagaagaagaagaagaagaagaaaaggaagaagaagaaactgtctctacaccttcattctcaggacaagttcattgtctggcaccaagctccttggggtgaattttcttccaaaagagtccggggagtccaggtatggaatgggaggcagaaagttcaatcaagggactgggatttcggaatgaataatgaagggagatggactgggtccatgccgaaggtttctccctggtttctcagcccccgggcgaagactcagggagacattgagacacaccctgcacaggagggggagggggagggggagggcaaagtcccagggccccaggagtggctctcaagggctcaggccccgaggcggtgtctggggttgggaggctcagtattgagaattccccatctccccagagtttctctttctctcccaacccgtgtcaggtccttcttcctggatactcataacgcggccccatttctcactcccattgggcgtcgcgtttctagagaagccaatcagtgtcgccgcagttcccaggttctaaagtcccacgcaccccgcgggactcatatttttcccagacgcggaggttggggtcatggcgccccgaagcctcctcctgctgctctcaggggccctggccctgaccgatacttgggcgggtgagtgcggggtccagagagaaacggcctctgtggggaggagtgaggggcccgcccggtgggggcgcaggactcagggagccgcctccggaggagggtctggcgggtctcagcccctcctcgcccccaggctcccactccttgaggtatttcagcaccgctgtgtcgcggcccggccgcggggagccccgctacatcgccgtggagtacgtagacgacacgcaattcctgcggttcgacagcgacgccgcgattccgaggatggagccgcgggagccgtgggtggagcaagaggggccgcagtattgggagtggaccacagggtacgccaaggccaacgcacagactgaccgagtggccctgaggaacctgctccgccgctacaaccagagcgaggctggtgagtgaacccggccgggggcgcaggtcacgaccaccccccatccgccacggaccgcccgggtccctcagagtctccggatccgaaatctaccccgaggcagcgggacccgcccagaccctccacccgggagagtcccaggcgcctttacccaggttcattttcagtttaggccaaaatccccgcgggttgggcggggagggggcggggctagctgggcggggctgactgcggggaccggctagggtctcacaccctccagggaatgaatggctgcgacatggggcccgacggacgcctcctccgcgggtatcaccagcacgcgtacgacggcaaggattacatctccctgaacgaggacctgcgctcctggaccgcggcggacaccgtggctcagatcacccagcgcttctatgaggcagaggaatatgcagaggagttcaggacctacctggagggcgagtgcctggagttgctccgcagatacttggagaatgggaaggagacgctacagcgcgcaggtaccaggggccatgggcgc

SEQ ID NO: 11019 - DNA, 6000 bp, Homo sapiens
attctacatccccctttccattttggaagactgagatggaggaatccaggggaagttctgggtaggaagcagccacttgccattaagtggcaattaaattgctattgcaatttaaggtaaatcgcagcccctctgggcctagttttcttttttctcactctttttttggcgatagagtcttgctccgtcacccaggctggagtgtagtggtgtgatcatagttactgttacctcgaactctggggctcaagccatcctcctgcctcagcttttgggtagctgggattacaaggttttctttttatgagagccctgccccactcatgtcagagggccctgaggaggcaaacacaggatggttgaaaatgctagtaaaacacctaggatgtgcactgctgtcctggctggaggcttagggggagcaccatgggacgtacacaggataaagtgggattaactcctccctcccctcagccattactctgaactctgcatcccacatgctgctgccaaaaaccacttttaaaagaacacaaatctaaacatgtcatttcccagctcaaaaccccaaggttctttctcctcaccttcagaataagccaaactactcaatgataggttccaaatctgcctttctggtttcactcatgggatggacccttcttccaggtgaggctgcatttggacatagccatattcacgcctccctgccttggctcctccgcttctctggccaggaatggccttgcctcatctctgcaaatcttagcatgacttaaggcccagttcaagctccagctcctccctgaggtcttcctgagtcttgtctcctgtcccactcaggaggacctggcctcctccttccctgggttcccatgaccctttccagctctgcctgtagcacggtgttctgtcttctgtgactacatatatacgcctaacactctctagattgtaaaggcctggaaggtggggagtgggttccattactgaatgcatctttcatagctctcgctgtcagagccctgccctatgcaaactcttttatttttatttatttatttatttatttatttattttgagagggactttcactcttgtatcccaggctggagtgcaatggcgcattctcagctcactgcaacctccacctctcgggttcaagcgattctcctgcctcagcctcccaagtagctgggattacaggtaaccgccaccatgcctggctgatttttttgcatttttagtagagacagggtttcaccacgttggtcgggctggtctcgaactcctgacttcaggtgatctgcctgactcgggcctcccaaagtgctgggatgataggcatgagccactgcacctggtgccctatgcaaactcttattttattattattattttttgagacagagtctccctctgtcacccaggctggagtgcagtggtgtgatcttggctcactgcaacctccacctctcaggtgcaaacaattctcctgcttcagcctcccaagtagctggggttacagacgcgcaccaccacacccagctaatttttttctatttttagtagagatggggtttcaccatgttggctaggctgatctcaaactcctgacctcaggtgatccacccacctcggcctctcaaagcaaactcttaataacaactgttgtggaatgacttgggaggtggcactcagagatcccaagtgacacatgagaagtccacagagagagatcatgtttagtggagtttggatggttgcttttatcagtgggcctgtaccttacagatgctatctcattatcttctaaacagactctgggccagtgaccattatctccctcttactgatgtagactcagccaagagaagccagatgttgagtcggaaccttaactctccctctcagacgcagagccctgctttctcccctcccatttgatactctgcttcctcttgcatgctgtgagaggcggcctcattactcctcttccctcctccagtccctccaagcctaattcatcacctttggctttgggatcatagtttccaaaccaaggattgtctgaacattgtctgacaatgccctttttttttttttttaggcagggtcttgctctgttgcccaggctggagtgcagtggtgcaatcatggcacactgcagccttgacctcccgggctcaggtgatcctcccacccagcctcctggtgcgcatcaccacatccagctaattttggtattttttgtagagatggggttgtgccatgttgcccaagctggtctcgaacttctgggctcaagcgatcagccctccttggcctcccaaagtgctgggattataggcatgagccaccgcaactggcaccattgccattggtatttaagaggtgatggtttaggctttgaaattggggttgtttgtgaaaactgagagcaccttttgttttcagatatttcctatggccattggtgtaattggagggaagctctcgccatatataatatttttgagacagccaactaagaaactgggattctggttctctccagggtgcaaaatcctgggagaaggaagtgaattctcaggggcccagaaggagtctctaaaggacctctgccagtcaattctaatctctcttctcccctgcaaatcagcccctgcttctgcctctttctccgcctctcctagattctccccctctggagggcctgagctcccggccaccacccccaatgccgctttctgtttcctctgcctcccttcatctccttttgtctggggtttctttgtctggggtctccctttggttctgtttcacagttctcagcctcccctccctttctccacagccaggctgctcagtccctctctgcgggggcctagaggctcggtgaggggagcgggacttggttgccatggtcacattgaagccagccgcagctggcccgggcagctgctcctcctgggcccggggccccggacgctcggacaaagccaggcagcgttggcagccccagacccgaccccaaaggcctgagactggggtgactgggacctaagagaatcctgagctggaggtgagaggggggaagccagagatgaactgggagggcaggagtgggcactggagctgggccctccccttgtgggcagggaccaggcggtccccggctggaggctggaggtgtgttgggaggaggggagcggcccagagcctggcagggaggaggggaaagagagggaatagagttgggtgccatggtgtggtgaatgggctgagggactagggtgtccccaaagggggaccgttgtccagaaacaggttagattctctctttggtcctcatgtccccatctgtcccgcaggtgcctcttcctttctcagccttttatacttctcatctccccgtgtcccttagcttcacactctgcgccccagtctccctcctctttccctccactctctgtttcactccagccccttcttcccttgtccttgcttcttgtccccttgatctgtctgcccagctctcaagcctcctcagttccctgccttcctctcttaggagtttgtttccaacactgtttccttcccgagtccacttcagttccttcatccagttcagcccttttcttcccaaacttcagtctcctcctctgagcccctggggcttcccaccttttgctgtgtgtgccctgtcttcatcctccttttcctctctcagacctgtctccttggccttgacctcagtccatctccgtctctctgggaattctctcaccattgtccccatctgaccatcagcctcctctccctcttctggtcccttgcccttttcttccccaaccacagctgagctgtttcatctctctcccagagctacgtcatctcaatctcctccttcgctccctggcctcagtttccagtttattcagtggcatcaggtctgactcacacccaaagccttgtacactccttcaccctgccccccacccgtcgcttcttactctccccagctgctgacccagcctgctcctccagaggcagctgcagctcccggaaggggactgcagctagtgtatgtgtgggggcccatctggtccgtcctctcgctcgctggtcgtgctgggcttccctcctgtggccaggtggtctgcaggcctgaagctgccttctcccctctcctacgtgcctctcctcacattttttcagctgtttcccatcctctccttcctgggcagcaggctgccactggcttgaaggggagggaagcccaggatgggaggggatggtagagggtcatttgggggttctcagggacacagggggcctctggggttcggagtgatgcaggagatgtggaatgggctctggggaccacggatgggtaatcaggccctcttggtctttggtgctgctctctgggccccaggatggctgggatttccctctcaggcccctgggaatctcggctccgagtcccgcattccagctggctccagctccctttccgttgtcacttgactccactgggccccagccttgcatccctcccactcctccagcctagagctggggcgaggtgggcatcaccactaggaatttctcctgaggcagtgagaagaggggacaaaggtttcaggactctctagctccttctgctctccccagtggacccctctgtctggcactgccatgccacttagctggggtcagcgtgggcctggggtgtggaatgtcccaccagggtatgacgggctgtagcttgcctggcaggcctgttggggctttcccagagcacagctcctggaaggaggggctgtgggctgccaggtgaggtgacttgggaagccttggccccacccccaggctggccccacccccagtccagcgtctcctgggcctagattccccagctgctgttctctggaggggtaggtgttctgggggaatgaatccctgggggcttggtgggacaggaaggcgggaagaagctgctcttcgagtgaccctggggctgtctgttagcaggtccctcagccgttggaacgtccttgggcttctgaactagtgcccatgtgtgcctcggcctttcccaagggccagcttcttcctggtagtgcttttgtgtacttgtctggttgggacttcgtgtttctttcttgggattgttgtctgggactgcaagcagggtatgtttttatctactgtgaggttcctggggcggagatgtgcagtggagcgagaacttcctgtgaccgtgacattgtctaggtggtgagcaggtgtgggggtgtggagagaggtgaggggctgaggtagtgctgagtggggaaaaagcacctcccaccacaagctgttctgtcccgctccatcctctgcccagtagctctctcagttgctttgcctactcagtctcactgtttcatcttccctgggtctcttggtccccttccttttgactgtgtgtgattttcagtgtgcctccatccttctcctgctcctcttcttcctcctcccgaccactcaactttgtcctggcctcatttttggcctcttctggccagtgatcagaccctctggcccactacggccagagctggctgggcctgagggaggcttgccctgaggactcctgagtccccctcccactccactccgttgggagcccaggggaatcagggcctgggcgtctggacccccgggtcccttagaacgcccttcagagagaggaactgagaggagaaggagaagagagtgggcccgccttcagggtctggggccttccaggttgggtcgtaggggcgggagcgcacaggctgcgagagaggagcaaaggttggtggagggagaagagcagtctggggcctggctggacaggtgagccctgagacctgagctctgctcccttctctgggctaactcccgcagctgggctgggccgagcctgtgggaacctgcttcttcctctgtgccctggggctgctccc

SEQ ID NO: 11020 - DNA, 6000 bp, Homo sapiens
ggttatctgcctgccatagcctcccaaagttctgggattacaggtatgagccactgtgcccagcctccttaaccttttaaaaaaggttaaaagtatgctgggcacatcttttcatagcaatacttaaaattgctcttactctttttaatgacaacatagaattttatcgtgtagctgttctttgggagacgattaaaatcttctttatcttcactgtggtagtggagatgtgggtgtgtacaacagctaaaattcaacaagttgaacattttaaatagatgcagtttattgcatgcaaagtatgtcccaataagatgatttaaaaatattatcctctttgagacttgtactttgcttatgtgaaacaaaacaaaacaaaaaccctgttcttgtgcccaggagacacaccctgacacatctggaggtagagggtcatgctgtctgcaacttaccctcacaggctctgaaataacaataatagcagcatatttacagatttagagagagagaaatttgtggtaaaaatgttcataagtaaaactagataaagggcaaaaataaaagaaataatgaaactacgtcttttaaattttctctctccggccgggtgcggtggctcacgcctgtaatcccagcactttgagaggccaaggcaggcagatcacgaggtcaggagatcgagaccatcctggctaacacagtgaaaccccgtctctactaaaaatacaaaaaattagtcgggcgtggtggcaggagcctgtagtcccagctactccagaggctgaggcagcagaatgccctgaacccgggaggcggagcttgcagtgagccaagatcgcgccactgcactccagcctgggcgacagagcaagactccgtctcaaaaaaaaaaaacaaaaaacaaaaaaactctcctttactttttctctccccttttcttcctatctcttccctcatttcttcaacacgtccccccatccttccctcttttctccattctctgcatttgatccccggtatattccagcctccaggccaacaaacttctccgcgtccgccgggagcaggtcagggaagggacgcgaggcggcgctgtcaccgcattctgagcgccgcagctccctgggccccttgtatcatttcagtgaaggtcactccagtctttcatggaggccaaactaagggtgtaaattaggatcctcactgaagtggcgggaccctaagaggctttttcctggccccttagttgtgggttttcctgcgggcggcgcagccggtttccatcagaaccgcccagaggcggacgctgccttcctggggtgacggagcagcaggaagcgttttcggatcctggaatacgtgggcggcccgtgggaggggctgaggcgcagtttcctactcacccggatccgaatcctccgcggtgctgtttcaagagagccggattccagatcacgctccagcccggactcggaattcctgccctgcgggtctgcattttcataacgggcaggtgtgagtgccctgcagctggagaccagaagcctgaaggcagctcggccctccccagcccacagcgccgttattccgtttctatatcagtaaacacatttcattttccgtagaccagggcggggtgacgggtgatcccagtcctcgcagtgaattccgggcagcaaaattcaaaacacatgcggccaaggccgggcacggtggttcacgcctgtaatcccagcactttgggaggtcgaggcgggcgatcacctgaggtcgggagctcgagaccaacctgaccaacatggggaaatcccgtctctactaaaaatataaaattagacgggcttggtggtgaatgcctgtaatcccagctagtcgggaggctgaggcaggagaatcgcttaaaccttggaggcggaggttgcggtgagccgagatcgcgccattgcacttcagcctgggcaacaagagggaaaactccgtcgcaaaaactttcgggggcggagcggagccccgccctgggttatgtaagcgaccgcgctgggccgtttctctttcttttccggaccctgcagtggcgcctaaagtctgagagagggaagtcgcctctgtgctcgtgagtgcatggggtataaggcaagtgctgagggagaaaacgtagttgatggggtagagcagacggggttggaggtggggtggagggggagggctttggacagaagacctgggaggcttggtgggggaggggcgcccaggcctgggcactaagaaacaagtcccctggagctcaagaccatctcggcctcccctagcccaagagaggactggcttcatgactccctgaaaccatttctaaatgccttagaacaaaccttgcatattcattattgttattgaactattaaaagtcttttttgggggcgagctgaatcagatcctttgctggagctggcacacggaggaagtcctggagggagggtagacaccgtggaggtaagggcttgggacctgtgtcaggagagctaggtccatctccctcccagtctctcactaggcttatgatctttagcagtgaaaataatctctctaaggtggggaaaggaccccggtccctgctgtgctcaataaattatgaggatcaaaataaattatcagtgaatgtgaatgggaaaactaagaaattgttaaaattctcgaatacattacattttcatccacagaaaagtgtaggctagggatcatgggggaatagttagtaatgacagggatagttgaacttaaaaaaaaagtttgtgaggctgacaaagaagaaacggacacatttcctgatcttggagggttcatagggtagaagatggtagatgacagctgggtgtggtggcactcgcctgtagtcccagctactcaagaggctgtggtgggaggattgcttgagcccaggcattcaaggctgcagtgagctataatcatgccactgcattccaactgagtgacacagcaagactcctctcttaaaaaaaaaaaaaaaattcatggcagggcacaatgagtactatcaggaaggttcaaaccacgggctaaatcagtagttctaaaacttgactacacatcggaatcacctagggaactttaaaagatactaagatttaggtccaacctgggtttactgatttaacaacctaggttgtggctgtggcctgggaacatggatattaaaaactctccaggtggttctacgcagtggctaggtttgatgacctctgcctagatgtcccaacgactaagagatgtgcgttggggacaaggcaattctcttagtagaaagaggctttcgggacagcattcttattattgagaattgagaattcatatgccacacaatttatccttttaaagtgtgcagctcagtggcttctagcgtaatcacaaggttgtgccaccgtcaccactgtctaccctggaagattttttttcctttttttcttttttcttttctttttattttaaaggctagtcaagtgaaacagtgggagtgaagaagaaacaaagacatctataactggttgtgatcaattagttgtaaacactgcactcagaccagcctgggaagattttaaggatatggtgtggtctgatgggttccaaggcagaggttacaatagcctggaagagggagactgcttaggcagtggcatcctggtgggatagggtgaggagatcccagagcccacgtttactgcaaccctggggagatgtcaccagagaaatgggggtggtgccagacagcagattgtggcagctgaggttttccacggtagagtagaagcatccatcatgtgtgacattcagcagatggggcgctgtgggtggcttggagcactctggttgtaactgaggcaggcaccgtgtttaggaaggctgtgcagtaatctaggctgaagggaggggaaagcctagactaagattgtggctgtgggattgaaatagcgttgaaggagctgactttgactcccggagatgatggggaaagaggaaatcagaagggaccaaggatggtgatgttcttaagagaaactgaggaggaagagaggatgatatggtggcagacgtatagagagtctttgtagatctctcacattggaggggactatggtcggaggtacagatgtcctaaggcaggctggaaaagggagtctggagagagcttggtgttgtagtgaaccacagggagccgcctccttggccctgtgatcacccagggactgaatagagaggcggccctgggagacttcagacacttagaggatataagggggtgaaaggggggcctggctttgagtcaaagggaggagaaggagattataaagctgaaacgtctaagagagtttgtggtctgagcggttctactgcggcaggtgcttctgagaggcagaggtggctgagatctggaaacaggtctgcaaatctggtcactggtctcattgccagtaacgctgtgcgcggttgagggagtgtgttgggagaatagccacgcgttgtctgtcctggaaggaacaagccagtgagagccggtttaatggggcggccggcgaaaggggcttggtgaggcccgcgctcctcggggtgggggcgcggggatgggtggtcgcgatgccgggagggcaggcagggccctggccgtgcttatgaagttggagctgtactctcagctactcgaagctggtccctgctttaggctgcgctcccgcgtgctccccattttctgggccccaggtcccgccttctaaatctccccaggtctccagcccactggaattttctcttccaagcgtggccccgccctctccgctcgtgattggccctaagttccgggccccagtttcattggatgagcggtcgggggaccgggccaggtgactaagtttccgcggcgccttctccccggccactgcttgagccgctgagagggtggcgacgtcggggccatggggctgggcccggtctttctgcttctggctggcatcttcccttttgcacctccgggagctgctgctggtgagtggcgttcctggcggtcctcggcggagcgggagcagtgggacgtttccgggggtcgggtgggtagcggcgagcgctgtgcggtcagggcggggctcctgtgccctgtcggtggcgcagggagctggacgcggcccgttaccgccacacttcagccctgcttccccgtcacttttcagtcctcctcgggatcgcgcatcacctgcactttctggtctcctcctgctctttctctcctcgcgtctcctccgcttcctctcacttttcggacaaaccagtccttctgaggcccatgggttcccgggctgcctccggggctgctcctgtgaatggcattcgagtgcccttccagcgcggccactgaagcagccacaacccccggtgctcggggcggctctcaggtccctgaagtcctgtcctctcccggagccgacgtgttctcagctcctgggccgcagctcctggagtaggggccctcctttctcgggacccggagctggtgcttcctgctgctgtggggactgtggggggtcctgactctcaagctgaggggttggagtctgcaggctccgggcagaggattcttcctgcgacttctctcatccccagctcattctcccctcgcctctggctccgagggtcctctcctctctctcatcccacccctactaatgaccagtgatctaaggacaccagattccctctcacctcctccctgcccatctcagggcccgctgagtccttttgccctcccagctccctgctaccccttcctgtgtgctgttctctgatccatttctagggtgtcctctgccctcatcccctgtccccgccaccgaaggtccctcctgcaccccttatgggcctttcctacaagcagccttcacccagtgctgcccctatgcctccccgttcccaaatgtccctgactctaactttctggtg
